United States Patent Application Publication US 2008/0114160 A1 - sequence listing, part 8

SEQ ID NO: 4690 - DNA, 12481 bp, Oryza sativa
  unsure (1)..(12481): unsure at all n locations
ccgccgaatggtgtttccgcttgcacggctggcctttaatgccgccgttgttgggcgtatacgtcttcacagaccggccgcctcgtccgccgcagattggtgcttccgcctgcacggctggcctattatgccgccgttgttgggcgtctacgtcttcaccgaccggcttgcattcaccgccgccgactggtgtttccgcctgcacggctggcctttatgccgccgttgttgggcgtctacgtcttcaccgaccggcttgccttcgccgctgccgactggtgtttccgcctgcacggctggcctttatgccgcaattgttgggcgtctacgtcttcaccgaccggcttgccttcgccgccgccgactggtgtttccgcctgcacggctggcctttatgccgccgttgttgggcgtctacgtcttcaccgaccggccgcctcgtccgccgccgactggtgcttccgcctgcacgtctggcctattatgccgccgttgttgggcgtctacgtcgtcaccgaccggccacctcgaccgccgccgactggtgtttccgcctgcacggctggcctattattctgccgttgttgggcgtctacgtcttcaccgaccggcttgccttcgccgccgccgactggtgtttccgcctgcacggctggcctttatgccgccgttgttgggcgtctacgtcttcaccgaccggcttgccttcgccgccgccgactggtgtttccgcctgcacggctggcctttatgccgccgttgttgggcgtctacgtcttcaccgaccggccgcctcgtccgccgccgactggtgtttccgcctgcacggctggcctttatgccgccgttgttgggcgtctacgtcttcaccgaccggcttgccttcgccgccgccgactggtgtttccgcctgcacggctggcctttatgccgccgttgttgggcgtctacgtcttcaccgaccggccgcctcgtccgccgccgactggtgcttccgcctgcacggctggcctattatgccgccgttgttgggcgtctacgtcttcaccgaccggcttgccttcgccgccgccgactggtgtttccgcctgcacggctggcctttatgctgccgttgttgggcgtctacgtcttcaccgaccggcttgccttcgccgctgccgactggtgtttccgcctgcacggctggcctttatgccgcaattgttgggcgtctacgtcttcaccgaccggcttgccttcgccgccgccgactggtgtttccgcctgcacggctggcctttatgccgccgttgttgggcgtctacgtcttcaccgaccggccgcctcgtccgccgccgactggtgcttccgcctgcacgtctggcctattatgccgccgttgttgggcgtctacgtcgtcaccgaccggccacctcgaccgccgccgactggtgtttccgcctgcacggctggcctattattctgccgttgttgggcgtctacgtcttcaccgaccggcttgccttcgccgccgccgactggtgtttccgcctgcacggctggcctttatgccgccgttgttgggcgtctacgtcttcaccgaccggcttgccttcgccgccgccgactggtgtttccgcctgcatggctggcctttatgccgccgttgttgggcgtctacgtcttcaccgaccggccgcctcgaccgccgctgactggtgtcaccgcctgcacggctggcctgttataacgccaactgatgctatcttcttcacggctggctacatcgctgtcactactaataggcatcagtatcttcaacacaagctgcctacgtttgccatggctgccgactggtttcttcacttccatggctgcatgattctgccagtgttgattggcctattatgcagctgttgttgggcatctacatcttcatcgccggtcgtctcgtctgctgctgactagtgcccttacctctacgtctggtttatacagctaccactactgatggacatcatcatcttccgtcgccgactgattatgctgccgccgattggtgcttttatcttcacaactacgcgtcttcactaccggtttgcttctgttgccgccgacttgtgttcacttcattacggcaatacaactttgtcatcatggtggagcgacttcatctttattatcttcggcaccggcaaactctattgctgctacttcgcaagttttactacttcaccaaccacgacgtctttgtgaacctcgacatctcggcatgcaatgccatgatattttactacaacaagtgactctccaatattcaagatttctacttggacaccttcaacacatatcttcaatcaagcaatgactactcgacgacaagaagctataattctcgactctatgttcagttgtttctcaactaaccaaagagtcgggggctacacaaatataaggctcaaaatttgacaaattttatgtcaagctgaagaaatcaattaatcagccaatgagtcaactccaggagtcattatcttcatctttgcttcggaacagacattctacttcaacaacttcaaatatttcggtttagacgagttgggcaacaacatcaactctcctccaattatttgtcttcacggttggcctactacgcaactgccgatagaggatctcatcgttatcatcggctgctacatcgctattgactggatcaccgacatcgtcatcttcatcaacatcttgttaagcctcttcaacatagcctactctgctgccgttgatgggaaacttcgtcatcatagtcggctatctctgttgccgctaatcatcattaccgtcggatgcgtttgtcgccgccgattattttcttcatcttcatgattggtggatttcgccatcaccgttgatgcgcgtctacgtcttcatcgtcggtttgcttttgtcaccaccgactgttcttttgttgttgttgttgggcgcctacatcttcactgctagctgacctgactgttgccgactggtttctccgcctccatggttatgcaacttcattacctttgattggtgtcactgtttttactaccactgacatcttccgttacttctgatgagcaatttcgtcttcatgttggtcatttcatctccatgccgactgcgtcagctattgccaatagacaattttgactatgacagaaggacaagctatatgctcaggggctcatcaactcaagcgtgaggattatatctccaatttggacttgttccggatacattccacatggattcatagtcatgagtctattttctatgctcaaagactggaccaattattattccccgtaagggctatcaaccgaatacttgcgccagtcgggattcaattattatatatattttggagtatctcataagggataatcactcagatcagaagctattcatatgagctacacctggtctatatcacccggaagatttattactcgagagcatgttacatgcgtcatcctttaaagggtgtcgaaggcatattttttggtctaggcctaatatgtctgcagcccatattttcaggtgtggcctgtcacgttcttttagggacttaggcacttttcgcttaggccaaagtgcgcgtgatcaagtgcccaataccttaaaatccttttataccgcagttactcaactttttaggagttggtacaatgcatcttaaaaggtgtcaaacagtaaagctttatatagctggcccgctgacttttttatatataagtcaaggtgctgtttgggtttttaagcaattgattagatacaatatcattgcttttcgccacgtaagtgtgcatttttattgaccaatattatggcttaggctgattatatattgtggtcatttttcaggcggttggtaaatcctttatgagtttatttacttggattttataccacatatgccatatatttccgggtgtggtgaaaccatgtgtcttttagggacttaagcacatctgttaaagcagtgtgcgcatggcgtatgcccaatactttggaaatttctttattcacaatatataagcttctttatagctgttttgctatgtgaattttcaatgatgtaaccaactttaggttacactcatcatattttacaaagcagtcggtatatcactcggatcatgttattcagggattcacaccgcatatgctacatattaatatcaggtcgcttggttgactataattattaaaaccactcggttggttggattatttattccttgactatatgcttggtttgttcaattaaccacatagtcgggggctacacctattaggtgcatctagtcgatgcacctgactttatttttcagccctccacagtcttcgtatttggtaaaagtacttcggagaccatggcgaagatgattgaagcactcagctttggagtaatctagttcgagagaagattatcttttcgactgtgaaggtctcaggggctactgtggagattatgggtaccccatacctacatggcatagttatccgactggctataggggataacttatatctatggaatatgtaacagatcatgacttgggtattacgtttccctgtatattatgaaacggcctaaagtcctggtttgataagattgtaaagtagatttaggaaaccgataccccgtattggttaaggtttctatcttgtaaccctgccccccaacctatataaggagggcagggagcccctctaggggcatgatgagacaacctgatcgtcagatcaatacatactcggcggattcaaatccccaaacaggagtagggtattacctctcattgagagggcctgacctgtctaaatcctttgtctccacatccatccacttttaggttctcgtgcgctaccnccgttttattattgccgaattcatgtttcgacactatgtcatgacgatgatattagagtagtatctggtagtttaggcgtggtgtctagattacgggatatcattatttggagttatatattgcggatgagaggtgggccgctgatggtgacagctcagtacgggtattcctccacgccggtatataatcctaagttaatttcctagggagggtattcctccatatttagccccggttgtatggtcatgacgggctgtcgtaaggaactcggcagtcaggggtggcttctcgaagtaccaggaggacatcggatagagggtattagctagtatatcggttaactagaatgtatgtatactatgtatattagaagtataggaatagattttcttcctcttttctatctacttagcttagatgatatattatgagaatgagtagtgaatgattgtgtgtcactctacccttggattatcttaacccctgcttagaatatgatcatcacaagtaatgtataaattattagtcaatgttccctctacatgatcttctcacgagataaaataaatacgatacccttggaatactctcgggtgaaatgctacaatggtatatctatgcgcttgcggatgaactctgtaaccataatatatcagaagtatttctgcgccattgctgggtattatatttctagtaatgttattaagaaataccaataagcatttctggcgccattgccggggattatatttctagtaatgtcgttaagaaatatcaacaagcatttctggcgccgttgccggggaagattcataatagagattacttgaacttatactttatatttacctctgtataatcattttcctttgcaggctaaccttggttgttttcactttttgttgtgcaaacagggtagtgcatgactggtttcaacttgccggaaaacttcaaagaaaatccagaagctttcttccggagtgtcaggccacgagtcgctgctccgcagaaaactctaccgacagagaaatcagccgtaccagcgccaccgaccttcaagactatggcaaacaagactctccgcgaattcactgctccctctgctgacaatgtggccattgggccgcagatcaacatgggagacgtggatttcgacttgaagtccagcctcatcatgatggcgcaggctagcccgttctgtggcaagcctaatgaggatgccaatgctcatctgcaatagttcctggagatctgtagcaaacaagactctccgcgaattcgctgctccctctgctgacaatgtggccattgggccgcagatcaacatgggagacgtggatttcgacttgaagtccagcctcatcatgatggcgcaggctagcccattctgtggcaagcctaatgaggatgccaatgctcatctgcaatagttcctggagatctgtagcacgtacaccatcaagggcgtcagtccagacgccgttaggctaaggctgtttccgttctcccttctcgggagagcgaagcagtggttttatgccaaccgtgctgctgtcaacacctgggacaaatactctacggcattcctctcgaaattcttcccgatgggcaaaaccaatgcccttcgtagaaggattttaagtttccagcagacaagagatgagtctattcctgaagtatgggaacgactgcaggagtacatggccgcatgtcctcatcatgggatggacgactggctgatcctgcagaacttttacaatggactcaccccgatgtcccgcgatcaccttgacgcggcagctggaggagctttcttctctaaaacagttcaaggaaccattgatttaatagagaagatggtctccaatatgggttggagcgaggaacgactccagacccatcagcgaggcatgcacgccgtcaaggagacggagttacttgctgccaagctggacctcctcatgaaacgtttggacgaccacgagaaacggccacaaggcaccgtcaaggcgttggactcacacgttatgtgtgaggtctgcggcggcacgggtcattctgggaatgattgcctagaaacccgtgaggaggcgatgtagatgggcaacaacaacgggtaccgtccacaaggaggtcaggggtggaaccaaccacgcccatattatcaaggaggtaacaacaacagtaatttttctagccaggcctccttgaaggatctcgtttttgcgcaatctaaaaccactgatgcgttaagcaaaaagcttgcggccaatgataagatcctagataacattaatgtcaaattagatggctttgcttctgctttttaaaatcagctgagctttaacaaaatgatagaaacctagctagctcagttggcatccttagtccctgcaaatgaaactgggaggattccggggcaacccgactcctccattgaaaatgtcaaggcgatcacgatgaggggaggtaagtctactcgtgatccgccgtatcctaaccctgcaggaactagtgggatatcaaaagaagcgccatctaatgactcggctgacaaggaagttcaaccagaaaagtcagtgccgcaggagtattgtgacacacggttgctgccgttccctcaacggagtaggaaaccgtcggtggacgagcaattcgctcgttttgttaaagtaatctagaagatccacatcaacgtgccgttgttggacgctatgcaagtgccaacatacgcccgttatctcaaggatatactcaacaacaagagaccgctcctaacaacggaggtggtcaagctgatagaacaatgcagcaacttgatactccacaagctcctagaaaagaagaaagatccggggtgtcctacgatcatatgctcgatcggggcacaacaattcgaccaggccttgtgcgaccttggagctagtgtcagcgtcatgccgaaagacgtcttcgacaagctcaacttcacggtgttggcaccaacaccgatgcgccttcaactggctgactcgtcagtccgttacccagtagggatagcggaggatgtgccagtcaagatacgggatttcttcatcacggttgacttcgtggtactggacatggacacgggaaaagaaacgccggtcatcctggggcgtccgttccttagtaccgcagtagccaacattgacgtgggaacagggagtatccgttttcatattaacgggaaggaggaaaagtttgagtttcaaccgaggacagaacaatgctccgtggtcagaatcaagtacgggccaaacccgtagaatattcaagtggtcgaagtggagccacccaaaatggacagcctggtgaaattcatgcagaatttcctagagaaggaaataacgatgcccaagcaccgttattggaagacgccggtaaaaccacccataccggccaagaagttagagcagccggctcagaagaagccgtcttccgcaccaaagccgaagaaggtgtggaaggaaaagccaaagacgcccgctccatcacccccgaagatgggtggaactaaatcagaaggaggtatggtcttgcacgtcggactttaaatgacgcgagcttcgccaacaggtaaattggtatgtatccgcaaattttctttcaacaatttgaatttttgcatcaacatatgtttgaacttcaaaattgcatttatgaattttgaggaaattcttcaaatgaatctttcaaagcaaaccaaaataaaattttcaatgtaaatttgctgtgccacgaccacactgaccgttggaatccaacggccaaaagtggggccggttgggcccaccaggggttcggccgaaccagtgactggccaggccaacggtcggctgcctctctttttgaggcaatggttagtgggccccacaggtcagttttgatcgttgtgggtgcacttcttaagccaaccggccgggagagggaactccaccctgtttaaacacattttcattccctctccaaagtttgctctcaagttcaatcaagctttgatggtttccctcaaattcaaatacttagttgcatatatacaagttgcttgggtgaaactaaccggcgggtgaaattcttgtcattcctaattaacccccgccgagttagtccgttcttgttccattgtgcagaatgaggaggcgactgtctcgtctgttcaaggggtccggctcttcatcaagtcatcatgacgagtctagtactcgttcatcagcagatgtctcgatggaagatgccgaagctctgaggcgactcctaaacgacaccgacctcgaacttgtcagtgatcgggagagacaaacctactacatgctgagcgaccaggagtatgctcacacgcgagagtactcaccggagctgctaaaaaagataggtatggatgttgagtttcactctatttggaaagctgttgattggtagagatttgctgtggtagatgagcctggttctcgtctgcttactttgcaatttctgtacactttgaaagaaatagaagatggtatttcctctcgctttttccgtgaggagttcacacttacatggaaaggcttaagtacacttcttggttttcacgattcctgtaaaatcgatatccagaaaggaatttctgggttcgagaaaaataggttttaggaagatatttctggtggtccaatttgcaagaaacctaggacgaatgatatccataatcctacacttaggctcatgcacaaatggattgctatgactttgtttccttgaggtgatcttagacccattaggggagatgaattgattatcattgtcggtgacatggggccgggggtatcgtgactagaggcttgggtagccgcgatcactcacgtggcccgaccccctcgggggggtcgggcccgacggtgacgtggccacctctccctctgtctccccgaggggtcgggccgctcccatttcgcgcccagggctggggcaccccgaccccctgtggtgattggcgccacgtgtgtgggttaggtgagcacagcggcactcacctaaccgcatttatagcgggttagacgagcgcatcacgccgcattcaatgcggcgcagcgcatgcttatccggtctgtgaccagtcgcggtatgtgaccggtcacagaccggtcagatcgcgggttatgtggcaacaggcggcctgtcgcacgcctcaccccgtcccgtcggaatgatgagagcttcctggttctcgtctctagccggagctggcatgctgactcctggagttggtatgtcagtcccggtcagatccattccaggcttcagtgcaagcatggcaagaaaatcgctggccattgaatgaaggatgaaacgggcgtccaccgggagagctgacgaccggagcaggaggcgtgtgtactgcttgtcagaggtcatttccggctgtagattagccctcattgtaaaaagcatgtttcttttcttaggcagagagaggcccatgtggtgatccctaaccagataaaaaaaggaggctcaggcctaaggagagaaaaaagggggggaggtgagaggctggcgacttgatcggagagcctgaactctctctcgctctcgagctctctggctctggagctctcggttttccttcacacacagatccaccagaacacaggagtagggtattacgcttctcagcggcccgaacctgtctacgtggcccgtgtcttgtgcgctttttctcgctgacattcctcatatcgagggcgaagaacctcacttagcgcccccggccgaaccggcaaaggggggcctgcgcggtctcccggtgaggagccccacgctccgtcaatcatgtttgccacggttagaaaaattaaaattactcctgtgaaatgtatgataaggcaatggttagaaagtataaagttctctgctcctgttgagtgcacttctttgattacttggatagcaaaagggctaggggtcgttagcaaccaaattgcttttatctcagccgctcgtccgtgtattgatgaggcttatctagcgcaaggcaatattctgaaacatggagtagatggatctttgatttactttttacccagttgtacaaatgaaatcccgttgccaaccgtatagatgtatgaggcaggttgggcaccaaccgaggatgcacccggatggacctaagctccacgccatagcatcggagtctcaacttgggcaagtgccagtgaggaccggtggcatgcgcctcatgacatccaatggggggacaatcaacctcccagatcatgtggtgtgcctccatctctaagtgaatggtgctcaagttcctctcgttgggacttgggtgaaatcactaggagaatggacacccttgatgtgcagacaggggagatccagtacaacctcacggaacacatagctcaaacgtaagaatggcaacaatctgctgatgctcagttcaccacatcaacatgatgcagcaacagcacgatgacctacaagcgtactttcgctttcaggggttcaatccttatcaaggaccctgagcgaaagccaagcttggggggatatacctctccctccactaaggtaacttgtatcacattgtatatttccctttccaattgcatatttgctttccacttgcatcttataaaacttgaaaacaatataaaaatttgcaaaatagaaaataccaaaaagataggataggtttaagtcatgctaggtaagacaagctagttctcttcgttgaaatgatgaatagttgctctgttctatatctctgatatatgggttcttggtaaatgctctctcaaaggttaaatattagtagccaacaattatccgggaacctgaggtaaatgagctgcagttgctgatctaagtctaagttgttgcgagatatgagatagtaaatatgagttgctatgatcctgatactagtttgactttcattcaggatgttttgtttttcaaaatgataaattgagagttcctcatttgatataaattcctaccagagccaaaaatgtgctatcatgattaaaccatatacattttggttgcttgtcattccattgaactttgtcaaactcttgtgagttgtgtagataattctcatgctctatgatcaagatcatacacccacatatatgcacatgctaaactcctacactgggagctaagcaatattccattccatttccatattaccaccaaaataaattctccatactttcatatgttttcttctcctaaaaaaatccttttgaaaaagaaaaaaaaaagagagagggaaaggcatggttatgaaaaaaataaataataaaaataaagttatgctccattaagcatgagcatgacactgaaaaaaaaatgtagccatgccctctcctaatcaataaaagaatgattttttgggagaagaaagtaagcacaaaggagaagctttttctttattttcctttatataccatttccatcatataccacacacacatattgcatgatcttgatcttgagtatgtttagtcatttgctttagtctaagtttttatttagtaataaaggcgaatgcaagtatgccatgtttg

SEQ ID NO: 4691 - DNA, 900 bp, Oryza sativa
atcccgggggggcctgacaggcgctgacagcatttgaaccgggactaaagatgatctttagtcccgattggtaacacaaaccgggactaaagatcaaatatgcccgttacccttttgaaccgggactaaagatcatctttagccccggtttttattgcatccgggactattgtggaaatcggccgaccgacaaagatggtttctccaccggtgggagagctctacaagcggagggtgaggccgctcgacttcctgcacgccacgctcagggtgttcgtcttcctcgccctcgcgttcagcgacgccgggatccagacctgcctcttcccccaggagagcgcgacgtggagggaggctctggtcaacatgccgctcggcgtcggcttcgtcgccagcttcgtgttcatgatcttcccctccaccaggaagggcgttggctaccccagggaggctcaaactggcaccgagggcggcgccgacgccgacaaagatggcaaggccgagcctcccaagaccaccaccaacggcggctccggcggcgtcgacgcggaaggtagcaagcagaagaacaacgacgactgtcccaagaccaccaccaccaatgacggcagcggcggcggcgacggcgcgggcagcagcgtgcagaagaactctgccaaccaggttgttcccattcaaccctccactaaagagatatcgaacagggctgatgagaagatagctaatattgtgtgataattaagtgtgtgtctgcatgtgtgtacgtgccggcatgcatgcatgcatgatgtttgagcacgtgcatatatggtatatatgctcgtgtattttgtttgaataacgccaggccaggagggatgaaagagaaaatacgtagtgcaaataatatatgtaatggaa

SEQ ID NO: 4692 - DNA, 4497 bp, Oryza sativa
caaacacccccttaatcatctctaactaaatttgcttacttgcattatatattgagatggtgatgctaacaataaatattattaaagaataacagattgatgattttatctatgagaataataatgtcataatcatagaacatgattgtgatacttagcctgagatggccgatatctgaaacaacaatatagggtcagccgatatctggaatacctcacacaagtagggaattcagtgacgtgattctcagttaaaggtatcactggttgggaaaatagactaaaggaataagattataacaattattttaatacctctgaagagtgtatttgaaccactatatttagtatcttttattaatggatggctattaatatctacagtaataatgtttcatctaagaaaaagagtaaatatactaatcttgcttagtatgtgtaacatactcatattatttcttgctatttgatgtgcatagaaactagtcatgatgacatgtcaaagggggatggcgacagacaggcctaatggggagtgttgtcttctttagtcttcagtttaaattaagaggatatatagctgcttgccaggtgtagggaatagacctgatgacaacatggtggtcagtggaccagtggatgtatttaagccatgtagctggtgcaaaataaatgaagccattgctctagttttgcaaactctagttgggatagttagacattacatcttacctttgtatccttatggaacatatgtatatatataatccctttgtattcttatggaacatatgtatatatataatcagtatatatgcttataaggatacgacagactccaaaaaaaaatgagaaattttgggtcatgacaagctgcttatacaaaaggtgattggtttttattaaaaattacaaatggtgcaactctatgtcactatttaccatctcacagaagttgaacatgaaacaataattttatgtaggaaatgccaataagaagtaaaatgatcaattcgagaaaatcttataaaaatctcagttccttttcaccaaatttggaacacccgttatcgtagcattacataatttttaattgcttagatcctaatagccttctcacagtcctatacggtgttattagttcctccatatcttacatatataagggcactaaggtagcaatacataattgactatgttttttttccttaagatatactccctccgtttcacaatgtaatcattttaatattttccatatttatattggtgctaattaatctagacatattcattcaatatgaacgtgagaaatactagaatgacttacattgtaaaacggaggaagtactatggatctcacacatccgaaggaagcatggtctagatatgtctcttctctatctttatttgtatgatccaattagagggatgtcacgccccgaactagtcccgagcggaactagcccgtgacgctccaaattaacctgttaaccgataccagtcccaggaaacagtgctggtatcacaggaagacggaatatcacagcaacagatgtctctttattatagagtaggagtacagtcatgttgggctgcggacagatcccgagctcacaactgcattacaaaagggaagtggaagccaagacttggaccaaacatcacaggcgcgacttgggaactaggccgaaaccctaaaactcatcgtagccggcttgctcctggaagaactcctcgtcagcgggatccgcttcatcttcttcagcaactgggggggaattatttatatagagcaagggtgagtacaggagtactcagcaagccatgggaaataagtgtttaatgtaggcttcaaagaaaggctgttgtttttgcgattgattttatttaaactcttttctgaaacaactaagggagtgcttctcaaatgacacggatgagacagtgcgtctcgtccggtcggagtatgtgcaatgattcagtcttttgaattgatcaagattggcacccggccaaaagctttcaaacggccacccgggcctggctgatcccatcagccgcagattttccaaacatcaaacccattccacaacagcaaatttcacaaggcagtagtcaaacaaaaactacgctaggaatcacctcacatccgcccatgaccgtgggcacggctattcgaacagttttaataacctctgcagagggggtacactttacccacacgacattactaacccggatcatccagcccatgcagaacggccacgactagagaccttaaggctttcataacaaggcatttcgaaagccgacacagtttcaccatatgccaacgagaggggtcccagaccaacaccagattaggtcccagaccatactatgccaggaagcccaggggtcctccccgacaccaccccggcgaattcacatgtctcttggcatcatggctcccccgataagctagttactcagccaggggtgtcccattccacccatgtggtcgtacttgtcttatgttcggatgaaattccaaggaaacggtccttaagtgcaagagcgggaaaccgtacacccggtacgttcctcggtccgcgattttggaaattcatttagttcgcaagcaccgacccagctgtcgggttttccaagtcttttgtaaaacccaagttttacccaagaagtttctcagattttaagtttgaaggcgaccgtcgatacctgtgcagagtgcacgattaccgaggcgcaactaggtgtatacaagggaacatggtataacaattacaatggaagggtcaaatgcaacaaattaggtaggtccgccaatctgccttgcagacgggacaagcagattaagtgcgatcctatcaatgcataatatttttcaagcaatataattaagttcaaatataggctcaagatgttcaaaggtggcttgcctcgctcgagatcttgagcttgatcctcgaaatcctcgcactacgggtcttcgggctccgaaactacacgcgaaacgggacaactcagcaaacggcgaaaataaagccttattattgacctctaagcgtgccattagatagatctcgagatttgaggaattttggaagttgaacggagtcaaacggacttactgttgggaagatattgaatttctaagattattggatttttagtctaaaggaaaaggatttatttaaatcctttttgaaaaataaaagaaaagaaaagaaggagggacggaaattagacttccctcgggcggctagggcgcgacccgagagaatggggcggctcggccgaccttaatgggccggctggcccaagaaggcggcccaaggcgcgcgcgcgggcggggaggggagagagagagccggtgggccgggtccatcccgcgtggtcccgggtgggacccgcttgtcggcgactcggctcaccgtgagcgaggtgcacgcggggcgtgctagggtttggggagggaggcgcggcgcatgcgcgcggttcgcggaggacgcggtgcggcgggcccacgcgcagcctcacggctcgcggtggaccgcacgcgcgagggggcggagggaagcggcggaccggggtctacttgacccggtcgcggccgaggtggcgccgaggtggcgcctacgtggctgccacgcgggccggtgggaggtagacgacgacgccggccagaacggacggcggtcgacagcggcgagcggcggagcaaaccatggcgatacaggcgaaggcgagcacaccgggatgttgcgcaggacgaggggagacgagccaatggctcggattcgccgggggatgctcgacggcggcggattgcggcggcggcaaccggcggagagaaaagggggaaacggcgacgaggtcacgaggggccgattcctggcagtgagagcatctacgcggctacgggaatccaccccttgcgccggattaggaggaatcgcatcgagggaggccggcgacgagaggcgcttccgagctcgggcggcgacggcggcgagcacacggcgagcgacggcagcagtcggggcggcgccggctagctagggggggctacacatgctactaccgaaaactaaggggaagagatggattgaggagggagaacggggagatgcactaccgagatgaggcggggcgctgtgacaagaggccgacggcacgggagtgatctctccggcctcgggccgggaaagaggaagaaggcgagcgcccggagtccccttccgcgtccacgaacgcaccggctctcccggtgcttggcgatgaacggcggaggcgagacagaggggcgacaatggcgcggtggcggcgagcgaaacgggaggaggaatcgatgggagggcgccttggtttataggacgacgatgtcggtttggaaaccgaccttgggcggtcaaggcgcgagctggcgctcggcgctcgcggccaaaacggccacagaggcggatgacgtcggcggggaggggaaaaggaaaa

SEQ ID NO: 4693 - DNA, 13183 bp, Oryza sativa
gcatttaagaaggcgtgagtgggcgcaccacgccaccttaaatgcaacgtgtggtacgcctgaccggtcgaatgaccgatgggatcgggatagtgcgtctacgcactggttgcatgtcatgcggcctctgtcacgtcgtgatgatgagaggcttagccggagtcagtacatctcacctagtcaaagcagggtttccgtttccccgtgcaagtaaagacccagaagtcttcactcattaatgatgaatgacacggatgccccccgtgtcaggcagttggatttgacgggccccatgtcgtagcgcccgtgcgagtggcttccaagttaagcaacaagacatgcatttaatgtgaatgccctcgctctcccctaggcagttttctaggcccatgtggcagccccttgagatataaaaggaggtccaggcctggtgaggggagagatcgattcttgggcgaactcacactcgagtctgagcgacttaagtgatttgtaacttacactcaatcagccagacacataagtagggtattacgcttgcagcggcccgaacttgtataaaccacttttgtctcatcgttcctgaggggcccaaccccctctatgtcacaccttccatcgagtctttgattttcacccactgcccccggccgaactaacaagggggggcctcactgtccctcgcttgaggagtgcaccctccgacacacatgcaccttgtagattatatttgaaatatgagtataaatctataggagtatttatatgcttgtgtgtttgttgatgtaaaaacacgaggcctgggagatctgcttaactccagtgcaggtccaaaacttgcctttgggtgtgtgagcgtgccagttgatttgatcctgcaatcaacaagaaataaagacaaagaaaccacggttaaatccataaaagatagccgatcggctggatgctgatgacaaatcatttatctttgagccgatgtcatatatgcatcgatcggcagtcatgaataaataagaaagaactaaatctactcaatcggctgtagatattaacaatatataatccttatgtcgatatatacttaaatcaagtgattgggacatatcggtcaccatgccgagacagtataaatcacttagatcgaaatatataccaacaacaagactatctatgttcatagcatagccagtcagatagatctagcatgtatcggctaatactccgataccactctatattaagatattaatgcaagtagaatatatcaaacagaaagcctaatatacttttagcgcaacaggatcttaacataaagggcagatttaacatgtcaataaagcatataagataaatatagttaaataagataagatcggctgaaaccccaatacaaccctaattggcaaccaaagacaggctagagattgaaattctaatcacgacttataagatcaaactcaactgatgcagctataagtatgaaaagaaaggcagtatctagacaatcaaatcgttggatgttttatagagtggtagatatcctatataatctagatcaacatcagtatttaacctaatcggctgccttctattagcagatgttggccgattgtaggttatatgacgatattgctagagattacgtaagatatatgataactcgacgaattacataaacaagattagagtgtcataaagatagaagcactaatcccgagaacgcaagccgccataacaagttttacctcttgttgaagatcaaaactgatgcagctcaacccaaaagtaagaactcgtcgaaacaaaacgaaagtaaaatgggtggcgatgcgccgagattgtattgaacgtgtgttcgtttgattacatggggctcgggtctatttatacccgagaattacaaaatacgtccatatcggacacgactcttatctctaacaaactctaagataccataagtctttgcggtagacttttgcccaaacatatctctaaggaaattatataaaatatcctaattaatagatacaattgacttctcaggactctatccatgcgtggcaatcatcatgaagcacgtcaacctaaaccgacaacatatgctgtgtcatattgtcggattcggcttaatcggctaaccccgtccaactcgaactctgtcgatcctagtcgtagccgatttggactttagccgatcttcactctgtttccgggacaatctctatctcgatttccatctcgattcctccttcacatccgatatttggactaccaaatttggtcgttaacagtgttgcaacggtgtattcataataaactaaactttttatgggttcatgtgaccgagaaaagtaggcctcagcctcaaatgagggaaatatccaagtatggtcatcaactctcataactcaactaaaacattcgtgcatagttttttatgtattgttttgatcatttgtttctatagatttattacaataagattttttcgagaaaatattacagtaagacatagtgctaaatttataatattatgcatataatttttcatgcacaattttttatttcatattataagtcactttgaatttttcatgcacaatttttttaaaaatctataagttgctaaatcattctttaatcttaaaaaagtttgactacgaaaagctcaaagcaacttataatatgcacttttttgatgaacgtagtagagtactatgtatttactgtatacgtaagaaattaagatatatagacattgttatagatatgatgcattggagtgctctttttttcgagggaacgggtgggagtttatgcgattccactgtagaagaagagagttgatctaatttataaaaaaaatcggacccaaaagccttacaatggctcagttaatttgtgaaaaatcagcaaaaaccctggtattaacaaactgaacctaaacaaagcataaccatccaacaagggaaaagctcctaaaatgaagccttcaaggacacgccgacagaacggcaacatcgcccgaccctaacgaatttatggttttcatccggagaaatctcttgatgtggagttgaacaagggctccaataataacgccttcaagaaagtgaacggcgcccgagagcgtcgccgttgctagcatcggcaaacctgagtaaggctttcacctcgaagtcccatccaaacatagcgtccccaacggaagccaccaaataccaccaacacactggaggtgcctctcctatgcacacaaccacctgcacaccgttgacgacctactctacaaccggcctcgctagtacgtgcggaagccaccagagaggtgccggatctagacctacgtggtcagatcaggccgtccctcgcacagccttcgccgccggtctgggacgagaggccgccagcaccgggtagggaggagggctaggccgccggtcaccttagatctggagaaagggaggaagggaaaaaatagagagaaggaagaaggggaaaggaagaagcagggaggaaagggagggagcgtcgctgctaccggccatcgccgcaggtggcagcgttgccggtggcgtgaggccggcgaccgtgcgctggggaggttggggaggcgggctttgcctcccggatcactgagagaggtgacacaggagtccggcgtgacgcataggcattggagtgcttttaatgggcaacttttgttctttagtaaagcggctcgttgtataatgtttatctagatcatgatcatatttcattatctgcaaggcctacttgcgttggaaagttgcatgggaaaaaaaaaaaggcagaaatcgtgatcaatggaacttttgttgatgatggtccttcagtccttgcatgtggattttgtggtaccaatctgccagcagcacaacttttccttaggtttataaacggcttatatatagtaatatcgtcgattttaacttaggatcataagaatgtcgtgaaatgtacaggtgacgatcgaccatcctttaaagtgtggtggcatatatattaacaaatccaagtaaggtccattaaacaacacaacaattctcagtgattttgcaaaatatatacaataacctaccaattttataaaaagaaaggaaaaaaaagtgcaatgcgaacatagctttaattgtagatttgtaataatctggatgaaaagttaaaaattatacatctgaaaatgttgttttaaaagtataaacatatttaggattcacaaatagatgtcactaggtaattccccgcgctttactgcaggaattagcaattctcaatatattttttctcgacaaccagagtaaaaaagggaacacaaataatgaaatataagagtttattagtacttatcatgaaacaatcaaatgatacccgtgcttttatatgaaacatattgataattatatgttaaaaattataaaaataatagatagatttgttaaaatgttatgcaaatatttacaacatcatatataatttatttaattgtgggctataactttatagaaagtatagatttcagatgtataaacttaaaccttgaaatcttaaagcactttgattagtaaagatgataattgtagattggtcctgaaaaatacttctatataattatatttttaatgatctctatgaccaggcatgtgaataaaaatgtaatgataagacatcatacacattggagacaatgtcaatggaaacggcaaacaaaaaaaaagatctggtatatatgtgattagggggatcatcaatatcaatcaattttttaaactgcacgattgcatccaaaggtcacaggttaatttttttacgatcatcaaaagtaaagaatccccaccagtataaaaaaatattatcttcaaaagcattaaaataaatctaaaagagatcgtgaaaagaatatgaaacactgatgctatactagagttggaattaacttcacaacatatatatgaactcttttggatcctttcttttgtgaaagcaaaccctcatcggtacaactgagaaataattaagtgtgtagtaaaaaaagatgaaatgaagaacagaagagcaattaaatggagccttccattccttcgatcgatcaatcgatcgatgaggcatgttagctttgctagaagccgtgagcaatgcacgcctcccagaagagcctgtcactctcggcgtcgctgccgccggcggcggcgacatcatcctccgtcgccggcgcggcgcacttgccgtcgtccgcagccaccaccagctggtagcccgcgcagtactcccgcatccagcgctcccacgacaaagcctccacggagccagccgccgccgccccgccgcctccatcctgatcacccccgcagcacgactcggcgtcgccatcgtccgcagggcagctgccgcggtccaccgccgccgcgtccgactccgagtcgcccgtcgcctccatcaacgacgacgccatgctcggcggctgctcggagttcataccgacggggcgacacaggaggccgagagggagatcgttgtgtcgtggcgtggcgtggtgaggagaggcgttttgtagcgggcggggaggtaaaaacgtgaagaatgtgggcaaaggtcgcaaggaaatgagcgagcgacgggtcaaagattactgatgcgaagccgaagcagcagcggcagcaagaaaaaaatgggttttaaccgtgcggtggcgtggtaggctgctatctagttcatacttcatacacgtcgcgacttggttgcgcttgcgcgccctcctctctactttatgatatactccctctattttgtaatggatgaagccattgatttttgaacagatgtttatcatacaattcaaaaattttatgtaaatgtataagatataaatcattcttaaattactttaagttataaaacaattcacaacaaaataaattataattacataaatctttttactaagacgaatggttaaacctgtgaaaaaaaattaacggtattatctattaaaaacggagatagtaagattgctaaggctaggtcggctaataaaaggtcaagcagttaatttgttactaaagcctgtagccatggcagtgcatccattggccaaaaatgcgtggtagtattaattaatggatctgtgtcaaaagtctcatgccatatgcatttgaccaaagatagctctatcgatcgcttatacggtgtgtcgttgatgaagtcggattattctacatggtaccatttgttctagttcttccgtatatgtttgtcatccttgttagtcaacagttagttatgcacctagggtgagattgtgagtttgtttgtttcgttctccgcgtgacgtttcccgaactattaaatggtgtgttttttgcaaaactttttttataggaaagttactttaaaaaatcatattaatctatttttgaaatttaaaatagttaatactaaaaaaaagtctctttctttccccccacaaaagagtacttctatatttttttaccagcaatggcgctatattttcccaataaaaaacaatcaaatcgtttttatactgtgaattttaaatgttacaccgccgtaaatcactttacaaatttcaataattacaatctaaattttataatacaaattttataatgaaattaagactaaaagtaattgatcagaagaggagatagatgagatagaaacatgcttaattagatataacatacagagatactaatcactactacctccgtcccaaaataagtgcagccatgagttttcacgcctatctttgatcatctatcttatttgaaattttttcataattagcatttttgttgttatgaaatgataaaatatgaatagtactttactcatgacttatgttttaaaattttttcaaattttttttaaataagatgaacggttaaagttgggcgcgaaaaactatggctgcacttattttggaacggaggtagtaaaaaaaattgactgaatcaagtaaaatgtggcccgtgtttttgaaaacagaacatattgtcttaattaatgcctaaaataccgttatctgctttgtacaaccaaaattgtattccattttcctttttagttttgaaaaacaaacgagaatccatatatcacgatcagagaacactacaagaagacataattcatactatatattcatcttaccgatgtgcaggaaaaaaaaacaaatgagtaaatttccaaaactattgatgttttgaccaaactattacaacactaaagatttagggtgttgtactacaaaattatagaattagctcaaaatttatcaccaaactagaagtacagatctatagatttgggagtttaagtccagtgatagtttcattattattgaatatgttgttttgctatatatgcactctgcgttaaatatgtagttagtaataaattatcgctaaattcatagttatgatacaacatcttaattaagtatgcagttttgtagaattcagtctaaataaatctaaatttaaggatccaactatagggactaaattagcaaatagccaccgctagctacagcacaagttactatatatatatatatatatatatgctcttattaatctattatagttttattcaactacacaaaagttttcaaatctagaaatatattccacggttctagatgtcaagcacatggtactacacgactatagccaaagtcaataatgactactctaacaaacctgtatactaacataagtagtgtaggaacatatcacgtgcgtactctcactaattgcaagtataaggctgtgtttttctgaaattaggaagaagtttggggaaagttggtagtttaaaaaaaaaagttagaagtttatatgtgttggaaagttttgatgtgatgtgatgtgatggaaagttgggagttggagtgaagtttggtgtgaactaaacacaccctaagtcatcttatatttatgcatgataattgaggaaacaacacaactttgtaaccctttattcattctactgatttacttgtgagaacaagaacacattaacttattgaagttaatgtttttgaagaagagttgatgatcttaaagaaagacttacatttagaaaagagttagtgcaactaaaacaacttacactgggaaaaaaaaagatgaattgagctcatttcattactttgaaaagtggaatttcaaattaatttcagagaaattttgctacatgtcatccaaaatttgtgtaatatgctgatagatattaaaaaacatgctaaggctaaaaaacacctaaaaattggtaattacgagaggacatttcaagctcaattagagagaaaaattatttaaaaagataagaatgcttctgaaaccacaaatttctaacctgatcatgcagtgaaaattttgaaattatgcaactctcaatctaccatcacccaaagtacactagtagcgcacatcatacttcatctttactcttgcatcaagttagaatttctaaccccaagacattcttatctttctttttaaagaattcctctctctaattaggtcagaaatatcacaagttaccactttttggttgtcatatagccatgatacatttttttgatacccactagcatattacacatactttgaatgccctatatcataatttgtcttagtataatggtcacctaagaaactgccccgtttttttctattcttaattcattttttgctccttttctaggggtatacttctgctgatcgttttggagaaaaagggaatattaaataagattttctagtcaaacttttttcaaataaaattttctagtccaacttgctttgcgttgagatgcagactgactggacgtattgtccacatctagaacgtacaggacaatctagcacggattgtacatttctagaagctctaggacgtatgaactggtcttcctttgtctgcaaatataaaagacatatactccctccatccccataatacaggagattttgagtttttgtttatattatttgaccactcatcttattcaaaattttttaaattattatttattttttttggcttactttattatccaaagtactttaagcacaacttttcgttttttatatttgcacaaattttttgaataagacgtgtggtcaaacagtacaagcaaaaactcaaaactccttatattatgggacagagggagtagtatactgacgaacttaattatgcagggtctattctgcagattactgctaaaataaaccgttttaaattttgacaataccaaaattttagaaagttaacattattattaaggaaaaagtacgaattaccccccccgaactatcgtggtaggccgaattacccccctgaaccacaaaaccggacattttacaccttcaagtattcataccggataaattacccccttagcactattttgagtggttttgacttaagcttgcacacgtggcgccaacgtggcagtgcagtcagcaaataaaaaaaaatgttcgggcccacctgtcatcccttagactcaacaaattcctatcattcccctgggctctctctctctggcgaccggtggcggaggtgtacctcgttccggtggccgacggcggaggtggacctcgctcccggccgggacgggcggcggatggcggcgcgcgggaggctgtagcggggcgcgcgaggacgggcggtggacggcggcatgtggaggtgggtgcggcgaggatggccgacttgggcacgcgcttggacggccggctgtggcggtggaggtggaggcgcccgggcggctggtgtcagcggaccgggcggcgggtgacggcagcgcgcgggagcgggcggcgggcggcggacggcaacgcactggggcggtgtaacgccccgatttttgttcgggaattaaaaatcattaaataatgcattttctagaaactaaataaaagttaaagcaatttaatcaagtgaaatactgggagaaataaaattttactttaaaaatcattggccggaaatattttgtaatattctctgtgccctaaaatactctgtgaaattttccattaattttcggagctcgagtaataatttgaatagcacaaagtttatttaaccaatttaataaaaagaaaaacaattaaatctaccctccttcactttgggccacttccggcccaaagccctccttccctccccgcggcccgtcccctcccttcttccttccttcctccttgggccgtcgacccatcttccttcccctcgcgcaaaatctaaataacccccctgggttctcctccctctctccctccccgacaggtaggctcggcgaccccacctgtcaggccctcctcctaccttcggcttccaatgccgaagccgccatggccggcggttgctgcccacgtcccgccaaatccagcgccctcccgctcgcaccctcacacccaaaccgagtgaaaccagttcccctccaactcctccacattttcccccacttttccccaatttttggcgccaaatcgagtccccactccgcccacgttgagtcccacgtcaccggccggttgccgcccgatcccgcccctcttggccacgatttcaccctcccgagcctatataaaccctccccgtgctctcctcttccgtttccccctctttcccgagcccatcgcgccttctcccgctctctctgcacgagcccgagctctgccgctcaccgccgtgcttccagctgcatgccatcgcccctccagacgccgccgcgctgcgccgccaccaccgctagcctcgccgtcccgagctccaccccggcatccactttatttccctgaaccaccgccgtgatgccgtgtccacgcacagcccgagccgccggtgcttttgccgcctccggccgcctcttgctgccgctcccatcgccgctgcgccgcgcaaacaccgccgtcggcatcgccatgccttgccgcacactggcctttgcttggttttcccaaatcgccaccgcatctaccaccccaccgtgaacccgaggtcgccgccgtgactgtcgcctccggccacctcttgccgtcgtttccgacctcctcacggtgtgctgtcgcctccgtcggcttctccgtctggtgccgcacctcggccgccccatcgccctcgccttccaccgacggagtcctctccttcccgtcgaggtgagctactccccatgtcgccggctttcggccgagttttcccgccgcctcgcgcctcctcccttttccctaacccttccatcgtgctccccatgtcgtcccggtcgccgtccgcagcctcgtcgcccgttggccgccgttggagtgccgccgctatctcgcctccgtccggtgtcgtgccgcttggtgagcatccccttcctcctctcctttccgccacccttcgcgcgccctctcgcgccaccgctcgccgtcggtggccgttcaccgccgcgcatcgtgtctcggttgggccggctctaagccatgcccgtgctctgggccctcccctagtcccgctgacgtatggggcccgcctgtcggcgcgcccttcctctttgatgacgtcagccgtgccttttcccttgagaaaacaattaataattgtgcaataaatcgatattaattctagaaattcatttaaatggctcaaaacttctaaaattcatatctaattcattcgaactccgaattgagccattcaacttgcaaaattcatctaaaattaagctctacatgtttgtttacttttcatgtactgttttcttggtgtttattagagtttttcctcgttttgcgtgctagcatgtaggatccgtcgtttcggaagttcgcggtcgcgaggaaaagagttcggaagatcaaagtaaagaagcaaggcaagtcacacattccccttgagcatgttgatcccaatttacaaatgttttaccatttgcaaataaatatgcatgttttgctaattacatgggatcagagttttacctatctgctcgcttgtgccatgtttacttgatatccgtcctttgtcaacattgggtaataaattggctagctcatgttacttatgtgacctagctagaactatatgcttagccatgcttaattaccactagctcagttgatgggataattacaatattagacctttttagtatcagaatgagctgcgtgctcgagacatctggccatgcttcattgtcgtaattatccaactagaatgcgactgaatggtgggctgtgggtgcatggttatgctagtcgcacccatggcaattaaagaccggttcgtgggatgccctagaagaacttatcgtacttaccacaagccagcgtggtaacggctgggcttgtagtgtagctttcctctagccgacgtacccaggcgagggtgggcatgatggagttgggtcggccggggtgtccggttgatcggcttctggattcatcgcggcacgagaggagggctgcccattgtctgctgggggcgggggcgaaccctaaggtgtggtgcgatcggttagagggggttatgcgaagggtcctgtcacggcctctttccagtatgtcgtggtggcatgtcggcgcacggaaacgtgtcgtggggctgagtcttgtgggtacagttgtacacctctggccagagtaaaactattcgaatagccgtgcccgcagttacgggcggtcgaccagattcaccgtgattagtcccaccttaataaatcgactcaatgcactgtagttcaggtgggttggttgggcctgttcaacgtggtgtagcgttgatgagtggagatttaatgttactttaattactcaacagttttactgttttgctcaataaaatgttttacaaccgcctttatgcaaatagccacaaaccgtccttgtgttccccttgcacgtctgcatcattgatgtggcttgctgagtacggtggttgtactcagccttgctattattccccattttcagaagtattgtgcttctgagctgaagacgaagttagaagaccaaggctcagaccccagttgagttttgcctgtggagtggagctgaagccccgctaggatcgcctttttccgctgctgctgcttttgtttcggtgtgaggactaagtgcctcttctgtaagtattttacgct

SEQ ID NO: 4694 - DNA, 4473 bp, Oryza sativa
agggtttttctttttataaaataattttaactttgttaatttcataataatttttatttgtgctctgaaaattccactaaatttaatttacgcattttaggcttttaggatatttacaaaaatcctctaagccttatttgacttttaactttgcacattttaattgttggaggctttcacacggattttaattattctaggcataatctagaggatgtattttagagtcattttgggacgtgacaattgatttcatatttctcttgtggagcctatccttcagctagccttgcaaagagaggggaacgatgaagaacattaatatcattgtgagatcatggcaaaccgaagaatgcatgcggaatccaaagatcttttgaagcaacaacttccaaaactatagttcgtttgcttaattttcctttatacatgcctttccatgctgaagggcaatttttccactcccaatgcatgcaatctatggatccaagcattccaggaaaacttctctgctctccaagtgcaagtaatctagaagtgtcagcactagttggataacgcaagtactcgtctccgaaaatctcaacaatagctctcacaaaccttttcagactctctatagtggtactatttgcaatttgcagatattcatcttgagtgtcggctacgactccattggttatcattctaagtgtagcggtaatcttttgcaatggtgatagacccaaagcactagcatcatttccttttttgggctaccacatcattaactatatgcgcaagaaaagaggacgactcattccaaacctacgcaacaaaatgtgaattaatataagtggagaacaaaacaatatcaaccaaaatatgtaaattaattgcaagccttctccagaataagactaggtcatatgtaggatgctccaataagtagttgtggtgcaacctatcatggccggctcgacgattacgacgaataacttgacgatcaggaacaaaatcacctcgccatggagcattcgactgctcatattcatcttgcgcgactattgttgcagcaacgatgatttcatcactggatgaagatgattcatccaatagaacatgtctcaaaatgaagatcattgagtgatggaagaacaacgcacaataatgtggatggagcaaaaagatatgagtacctactttacattatgttcatgttatactgaatagacggctagcttatctgggaaaaactttggtgtgggtataatgtttgcttatgcaattactctatgtgtggagattatgggtaccccatacctacatggcatagttatccgactggctataggggataacttatatctatggaatatgtaacagatcatgacttgggtattacgtttccctgtatattatggaacggcctaaagtcctggtttgataagattgtaaagtagatttaggaaaccgataccgtattggttaaagtttctatcttgtaaccctgccccccaacctatataaggagggcagggagcccctctaggggcatgatgagacaacctgatcgtcagatcaatacatactcggcggattcaaatccccaaacaggagtagggtattacctctcattgagagggcctgaacctgtctaaatcctttgtctccacatccatccacttttaggtctcgtgcgctaccccgttttattattgccgaattcatgtttcgacagttggcgcgccaggtagggggtgcgtcgaattacctgtcgaaaagtgcgatggaatcaacttcagaagaaaccccgagatcaatctcatcaatttcgatggctcaaatcttcaatcgggtctaccgttgcaatttaatctctattagattaatttttaatcattgtttgatttcctgatattttgacgaatttcatatactggatgagatcgaaacacggccatcatcgtcgcctacttgggtgcccttgccgtgtccgagtgctcctctcttcctttccttgcagatggacgtgttgcaggagtggcacaggccgccaggattcgattcctgtttgcatgtatgatggttgatgggctccgccggctacctccgatgatggcatcatgccgaaagaacatcgagttagctgttagttgccggggcttatacatgttgcatggcacgtcgccggctatcactcatgatccagcctcactgctcgacttgagtttttcgtttcaatttgttatcaatatatattagattgatttctaatctcagattaatttcttactattttttgttgttgttcgcatataactacgcggcactattgaggcgattgatgctggtcatggactcgaggcgtctcagctttccggtcgatcggccgcgagtccactccgccggcttgtcctcgccaccgccattgctgattgcaacaacgacttcaccaccggcctgcctccgtcgccgccgactggtgttcccgtctgcatggctggcctattatgccgccgctgttgggcgtctacgacttcaccgccggcttgcctccgtcgccgctgagtggtgcctccgcctacacggctggcctattaagccgccgctgttgggcgtccacgacttcaccaccggcttgcatccgtcgccgccgagtggtgcctccgcctacacggctggcctattatgccgccgctgttgggcgtctacgacttcaccgccggtctgcctccgtcgccgccgattggtgcctccgcctacacggctggcctattatgccgccgctgttgggcgtctacgacttcaccgccggcctgcctccgtcgccgccgactggtgcctccgcctacacggctggcctattatgccgccgctgttgggcgtctacgacttcaccgccggcctgcctccgtcgccgccgagtggtgcctccgcctacacggctggcctattatgccgccgctgttgggcgtctacgtcctcaccgccggctcaccttcgtcgccgtcgactggtgtttccgcttacacggctggcctattatgccgccattagtgggcatcttcgctttcaccgtcgaccgccttcgtcgccgccgactggtgtcttcattgttattgatggacgactttgttcccacattggccacttctgccatcaccaaggggaatattacaaagctaagtcatcatttattttattctttatatgatatttttccttttcctctgcctcactacaccaattggtcttccattgagtagtgagtcgggggctacagatgttatatcatatttttcataatatttatcttgattgcttgcgacataatctgagtacaaaagtacctatcgagttatggagttctatcttcctatgctttccgtttggtttgccaatggatggttgcctttgggccgattcctagcacccgggggctcgttggatggaccgagtaacgcaaggtgctaagtattattcggaataaatcaaaagcatagagatgagataaatttattttctgctcttaataattgcaaaagtacccgagtagtaaattctgatccgtgaaactttgttccattaatgacgaactcatgtcactcatatgcatgtttgggaagtgcctaggccgactcccggtgcttgatggttatgactagtcggacagagtgtttaaacgtacagagtcatctgctcggggaaatcaaaattgacaagaggagaaatacatatttataaatattttaaaatacttgattttttctcgagtattatatttatatcagatactactcatcctatatgtttgttctgcaggatccagatccagatatgcataaaagggattcatggctttaagcttatctcttacgctccaggaatggatcagtcagaacatcaccgaccggcttgccttcgccgccgccgactggtgtttccgcctgcacggctggcctttatgccgccgttgttgggcgtctacgtcttcaccgaccggcttgccttcgccgctgccgactggtgtttccgcctgcacggctggcctttatgccgccattgttgggcgtctacgtcttcaccgaccggcttgccttcgccgccgccgactggtgtttccgcctgcacggctggcctttatgccgccgttgttgggcgactacgtcttcaccgaccggcttgccttcgccgccgccgactggtgtttccgcctgcacggctggcctttatgccgccgttgttgggcgtctacgtcttcaccgaccggccacctcgtccgccgccgactggtgtttccgcctgcacggctggcctattatgccggccgtgttgggcgtctacgtcttcaccgaccggcttgccttcgccgccgtcgactgggtgtttccgcctgcacggctggcctttatgctgcccgttgttgggcgtctacgtcttcaccgaccggcttgccttcgtcgctgccgactggtgttttccgctgcacgg

SEQ ID NO: 4695 - DNA, 10613 bp, Oryza sativa
ctacccctccatatctcatatggtgttttgtccttatttctgttaggaactctgtttaacacatgatttgaggtcaacaatgcctccccccaccatgccttaggcagtcccgcggtgtccaacatggcattcaccaagtcagtcagcgtgcgattcttcctttcagcaatcccattagactcgggagaatagggaggcgtcctctcatgtatgatgccatgttcctcacagaataagtcaaattcgttcgagaaaaactctccaccacgatcagacctaagcctttttatctttctgtcaagttgattttcaacttctgccttataaattttaaaatagtctagagcctcgtctttcgttttcaacaagtacacatagcaaaatctagtagcatcatcaatcaatgtcatgaaatatcgttttccaccatttgtcaacaccccattcatttcacaaagatctgaatgtaggagttctagtggtgccaagtttctctccttggcagccttgtgaggcttgcgaggttgcttcgattgcacacaactatggcacttagaacctttgacaatggaaaacttaggaattaaacacatgctggaaagccgagacatcaagccaaaattaatatgacataaacgtgaatgccaaacattagcctcatcatccacactgccacaaatatggttcacagacttattgcagaaatcagaaagggaaaaacagaacaggcctccgcactcataacctttaccaataaaatatccatgtttagacacgactactttattagactcaaaaaccaacttaaatccgtctctagtcagacgggagccactaacaagattcctgtcgatagaagggacatgctgcacgttcttcagctgcacgatctttcccgaagtaaacttcagatctaccgtgccaacaccatgaacagaagcatgtgacccattccccattaggtcggtggaaccccgtgcgacctgataagaagaaaacaatgagatgtcagcacaaacatgtacattggccccagtatcaacccaccaattagtagattgattaactaaaaaaacagtaggtaaattaccatacccgcttccatctccagtgttgccaatggtcacattagcagacttagaagtctgccctgcaggtgccttcatccccttgcgctgtggacacttcctagccagatgaccaacttggccacacacaaagcaagtcctctcatcctgattaggattgttgttgttgttcttctgcttcttgaagttggtggtctgctgagctttgtatttccccttgctcttgttctgggccttgtgcacaacattggcactggactgcccaccatcgcccttagacgcggcatctttttcccgagctttctcctcaacatcaagagacgctatcaacccctcaacgaagtattcctgtctcttgtgtttgagtgcagtaccgaaacttctccaagatgaaggtagttttgcaataatgcacccggccacaaatttgtcgggtaagacacacttaaggagttcgagttccttagccatggtttgtatctcatgagcctgttcgactacagaacggttgtcagccattttgtagtcatgaaactgctccatgatatacagatcattgctagcatcagtagcaccgaatttagtattcagtgcatcccacaactccttagcgtcggtcatatgcatatacacctcgaccagacgatcgccaagaacgctaagaatgcatcccacaaagagagtagtggcttcctcgaattgcttctgctgttcagcagtaagaactccttcaggtttgccagtactcacctagaagcatttcatagctgtcagccacagagtgaccctgatctgccatctcttaaaatgcacaccggtgaatttatccggcctcagtgcatcggcaaaaccagccatagtaaaatcacagtgcctatgataaggtttttggattgttgagattatagacatataatgatttaatctattccataaataaatcatgacattacagatgaaaactagcatgaacgcatcattagatctacacatgtaaactacacagtataacatgaacagatcaaatatgcgcaacatattgaacacgtaccgaggtgacggaaagaccggctgcttggtcgaaacttttcgcaagtgtctacgaaggcacgaaacacgcgagcgaagaggaaggcaagccgtcgcgaacgaacagggagcagtcgcgcgaagcgcttcccaaaaaccttattgccgccttctcccggtgcagaacgtcgaaggcagaggttccggagacctgctctcccgatcgccggtgcacgccggcgagcgggatggagtagtctacgagcgacggcgcagtacagagtaggaggcaaaccctagattgattttgtgtatgttacgtgaagacggcaggtcggtttatatagagaagggtcgcttgatcagggcgcccgcacgatctctactgcgcgtaaccgaaccggataagtcgcgcgtaacttatccggactccacgccgtttgcacgcaccggatctttcggaacgtttccaaaacaaaaacgaatccgaatttgcaacaaaacaaaactgcaaaaggaggctgcatctgcgcaagggtgaggagccaatttttcggaccattcgacgtacgcgtacgtcgtgcacgccctgccctgccctgccctgcccggccaggccaggcgagcgagcgcgcgcgtgtgtttcccctcttctctccaccacacatgcttcaagcgactaggagggcatcctcccttttaaggaggtccccctctcctagaataagcaaggtggtactaaactccacatgcatgccatcccatgaggtgggcttttgtgattttccaaagaattaatcttcgagtgggctaaggcccattcattaattccaacactttcttcagacaacaagttaaagcttcagcacataacaagaagagataaggtgatatgggatcaccttgtctaataccgtgagagggttcgaaaaaaatccaaatgctccccgttaaaataattgaataggaaactgaagtaacacatttcattatagttcttacccactaatcatgaaagcccaacttcctcatcattgcttccaaaaaattccattcgacgcgatcataggcctttgtcatgtcaagcttcaaagcgcaaaaagaatttttctttgtcctattggttttcatgtaatgcaagcattcataagccaccaaaatattatcagagattagacgggccaggtacaaaagcagattgctctatagagatgatatccggcagcactacctttagttgatttgcaatagtcttggatatatgggcggcgcggctcggcattgggccaggaggcggcccaggtgggaggggagggaagaggtgggccgggaggaggaggagaggcccgggggaggagggaaagagagggatgagagggagactttgggctgggctcggcccaaaggaggaggggattatttttaggttttctttttaataaactttcttaatagttgttgttgcttaataattacttccggtgctctgaaaattcaagtgaaacttgagggctcctttaagaccaaggagaatttaacaaaaattctccgggccacatttgaatttttcttgtacgtattttagtgtttgccaatttctttttgaattttcattaattctattattccttttagagaatgatttttatttcgggatgaatttatcaggacgtgacattgggcttcatgtttggcgaaatcgccctgcgccgctaacggagggccttcgccgcgtcggagccagtctcgaaggggatggagtggtagaaccacttcgccatccaatggcgatcccacttcgacatggcggcgttcaccggccgtagatcggagcgctcagagcgaacattaaagttcacgcttccgaacgccgttttcttcgtcctggccggggtgacaaccgtcttcgagttcacggtggcatagaacacgacgtcgaaaagctcagtgctcggttcgaacccggcggtccggcacgcccagtcgaagatggcgactcggacaagtgccgacaggctcagctagggaagctccacctggaagaggcgaaggatctccagcaacaaaacgttgcatgaaaaccgaaggcccgccccaaaaaatacggcaaaaaccaccgtccagttgtcgccgggtttcggcaccacggcctttcccgggaggaaggcctgcccctccaccagagggccggcgctgacaagcttcgccagctcatcgtcgtccacaagtgaagcccctagaaaggcggtggagtcgtcgtcgatccggccgggatcagggcctgtcgcggaagcggggttcggcttgcgaggtgccatggtgaaaggtgtgcgcggtggcgaaaagggagaacaaccgaaagatctaggaaatcaaggggcgccgtgaaaggaaaaaatggagaaggagagagcgctcgcagtgaaaataatgagagtgcggcggtgaaaaagggaaggggggaatatatagcccacccaagcgacggttcgcctccccgcccaatcataagccgccacatgtcacaagggtaggcgaaacgggaaattcccatcgatcgagccgcacagtgataagcccacaaagggaaagcccatcactgttcatttcggcccaggaaaaaataataaaaacggtttcgccgctcacaagaggcgaaacctacaaaacgttactaaccataaaaatacacgtacacacaatgcacgttttctctgcaggaatccataataggtttcggcaggagcgtcggtcgaaaaggggtgcctcataccataccacatggtttgcacggtctcagccgaagctcctatctcaccctttcctgtgagaggcttgttggcggtatgtcatgagactcttcgaccggtcctgccgaaaccatgcaactaatggagggttcaagcccaagacgtcgagtctatcggggcgaagcccccatggcgaagactatgaagcaaagatggcgaagggcgaagaatcgcactggtatcccacaaggttgaaggcattttgggcgaagtctatatggcgaagaaggtatggcgaaggcggatgacttcgccatagcaagccaaacttcaaggaggcccaagaggccgtctcagccgatcaagcccgggggccactgggccagcgttcgccagtcggcccattagaggcccatgtacctcaattacactatatacccatgtaaatgtccctttcataagggcaaccatgtaaattcccctattaaacctaaaccctaataggggaacctgtaatagggctataaatagacccctagggccatgtaaaagggggatcccaagaaaaattctcaatttaatacactttactgctttccaaccactgttgagtaaccacgtctttcgacgtatgcggttgtcgtttcgacaacagtacattacctcggttgagtgcgatccctcctttggaaagaacatggccaaggaaagaaacttctttcaacgaaaattcacatttggagtattttgcatagagttgatgttcacggagtttgtctaacaccaaacgcagatgatgggcatgctcttactcatttttagagtaaataaggatgtcatcgatgaataccaacccaaatttgacaagatgctccatgaaaattgtattcatcatattcatgaaagtagcacgagtattggtcaatccaaaggaaattacggtatactcaaataaaccgtagcgagaggtaaacaaagtttttggaatgtcctccggttcgattttcagttgaaaatcctaatcacagatcaatttcggagaagatacgagcaccggtcaattggtcgaaaagatcatcgattcttggaagaggatttttttatagtgatttcatttagaggacaataatccacacacattcgcatggtaccgtctttctttggagcgaacaacaacgttcatccctacagagaggagctaggacgaataaatccttaagctaattgttcattaatttgccttttaagttccaccaaatctttagaggatatacagtatggtcttttagctataggtgctgtcccaggaattaaatcaatcacaaactcgatgtcacggtcaagtggcattcctggtagttcatcagggaacacacatggatactcttttactatgggtactgatttgagctcgatgttgatagagaatgaagtgatggctgctgagaagtagtagcacgatcagatgtgaatgtgatatgtcgaccatcagtttttactaatgacataatatttttagtacaatctatggttccttgtttggacaaccaattcatacccaagatgacatctaagctaggatagtttaactgaatgaggttggctttgaacttcacccctctattagaatttcaacatcattacatactagattggttttaatggttgcaacgggagattgtactaacatggcattctttaataggttgactttcagattttgttggttcactaatctggtagatatgaaagaatgtgatgacccagagttgaaaagaacaagagtaggagcagagtgcacatgaaaagtacgcagcacgatgtcagatgtgtccgtagtctcctcaacggccacatgattgagtcggccccatccaataggttgagatggcttggctgcaatatgtccaccttgctgcccaccatgaccctgtgcgggaccatgtggctgcggttttgttccctgaagacgtggcactaatcgttcggtcttcggaaatggatagttattggaataatgaccaagtttcccgcagtacgttgtagcatttatgttagctacacgattctgatttccttgcgatgaggcaccacaggaatataattgaactgttgtcggagctgaatgatgggaaacagcaaactgtggcgtcggtggctgcgaagccacatagcggaccatcgtgggctgagaaaggcgcatcgggtagagctgctgctacttgcatcttttctggctacccacttccatttgcgatcctcaagaacttccttttcactggcttccacacgaagagccttgtcagccagagtcttcatgctagaaattttatgagcaaagagagcatgcttgagttccagattaagtcggtcgcggcatagctcaaatttcctagctttagtgggcatctctaaagttgcatagtgccctagatagttcaagcaatctagaaattccataaaggacatattcccatgcttcaagttgagaaactctttcttctacatttccatgagactggcatgtatatgagcaaatctaaatccctcctttgaaaacaacccagccgataagctcatcgggaggaataagagtcttgtatgactcccaccaagctgaggctgcaccctgaaggtaataggaagcataggaggctttctccacatttttgcatcggcagaggtcaagcttggattcactgccacagagccagtggatcagtagcagagaagagatgtggagggtgagtgcattgaacgttggcgagcttggattgtccttgttttgcatgattgaccatagcagcacccacattctcggcatttgctttcatcctttcaaatagccggttctgggtggctaagatatgtggtaaagaaagcttatcatcacattgatcaccttctgcgattcgacaacttcctctagcatgacctgatggctgagtgccagctcaggttagattagaagggattgtttcggagcaccgacctccggtttcccggacatggatcgagtattagtcatcctgcactcaaagtacaaatgagtacatgagcaagctaagcaagatatgacaaaacttgagatagccgaatagagtactagatttatgtttctattgtgcaggttttaaaggagtaaaatttcaactttacagaataataagttctgcacaacaagcatatcaattcaaaatggaagagcaatcacaaaagtttacataacttcacattgatttatcataggtttgcatacataaagatggatggtagtcacatagaaccacgtacaggacatggtgttacaaaatttgactactagaaggttcagatttagataatattacatagcactataggagggttacatttattcaaggatccctattacaagatctaagtgccttcagaaaacccagctggaggattgggtaccacagtggtaggggtcgccatggttagacggtagtgtcgaccattcctttcataaaatatgacagtccatgtaatgctggattaccaacaaatgtcgggtcagccatagtgcggttgttatgatgatatcccactcccatgtgtgccctacgatttacccataggaggtgccagtgtttcggtgagtggttgcataatggtgctcccataaataaaggcattatcataatacccttaatgacataatggttctacccgcctatcgagtgtggcaactctagtttgaagtctatcaagttaacttaatgtcaaagcgaggtacctatctaatgactggacaaaccctgaaagatgaaggagtggtgtgttaaggtcccctgggcgtccctctaaacctagatagtaactaaatgtggcattatctgttcatgctagaaagagatgaaaaagcctggatattcccgacatatggtgccgaaaatacacgataacttgttatgcaacttcgagtcttcgagcatagctgagggtgcatcccaaccataaccatagaaacaaagagttatttcttgggtccatctctcttggatgtatgattctgacttgtaaactctaagtgaagaccttcgctcagccgaaaagaaatggtactcccatgctcagtcctgattcctgagtacttgagcgctgctgttgtggatagcatcgtttttcttgtgcgaaaaaaatgcgtattgcatttgtgtgctgtattatgcggacatttaaatgtgaagaaaatgggtattatatttgtcttgattgaatatttgtgcgatactatatatgtagttaaaatgtgttctccgctaacagtttttctggtgttaaaaactgtccattagagtgtgctccaaaaatcagttctaggcagctgttaggtgctttgtggcgaattcccgccatgtgttgcttggtgtcgcggagccaaacaccctcaccagcgccatggcgatcgaattgcttcaccgtccatagctgttggcttgatacaagaagttgtttttccatgatgttacttcatactccctccgtttcacaatgtaaggctttctagcattgcccacatacatatagatgttaataaatataaacacatacatatgtctagattcattaacatctaaatgaatgtgggcaatgctagaaagtcttaccttgtgaaaggaggaagtaggtcagctaattaagtgataaaacctggattgaacaattatcgactcatattaatcatgtatagtgttggagtggtccaagaggacttgcttgcatggcaaaaatgatctaatattttcaatgaaaggtttctttttactcgattactcttttgtataggtactataacttttcattacctgtagctccacaaaggaggcatagaaaaataatcctatcaatatagatgcatgtttatatttgtcagtttgacagatatttatctcatcataagctgtagtgaaaagttcaataccatataaatttattgaagataatgtgcatgcatctcataaatataggcgctacactgcttattaatgaacaaacaacacgttttttctagacgaatatagtcatacagatgatgcaaactgctgcatcatgtcacgcaacgctgaaattgagttcattactacaaactgtatagcttcagtttttattaagcagacggcatcttcagagcctctgtcaccttcttcacgctcggcctctgcatcacatcatcgatccaagccttcacacgcggataggcttcgagcacagaagcatgggcagatgccagcaggtaataaaccgtcgggaaatggctgatatctgccaagctaatgaaatccccggctaagtacttggatttggacagctgcgcctcgtagacttcaagggctttcttcagcttctctaagctctcattgaccactccaatgtcagttgctccacccatgaacatggggacgatgaagcactggaagatgatcggcgacatcgcgccgtcgaaatggctcgactcgacttccagccaaacatccaccattgcagactcagagaggttgctctcccttagtaggtcagatccatgtttgcgaagtatgtactttgaaattgcgcgggactctgtgttaaaatgcagcttgtcatattggtggaagaacaatggatataagatgaaaatgacaagtcaaataattgtggcgaccgttgacaccaatggcatatgaggtttacaccagattgaactatagtgattaagtttgagctcagttattatcatatt

SEQ ID NO: 4696 - DNA, 5209 bp, Oryza sativa
aagtcaccaagaagagtttttctgaagaggaatgtgggcacggggaaagtgcccatataattgctaggctcctaaggcatagcagttatctttgggacccggttcttatccccacccgggagtaaatatcttttcccgctatttcgaaattctttttaaacccggttagggttaagaaccgggactaaagattatagcactgcatatgattttcgcttacatatgtgtttataaaatagaagttaatgcattaacattatttaaagtacaaagattaatgacaattacttcgaaaaattatttttgtctgtaataaatgaagtggataaatcgtaataagcaaatataattaataaaaattccaataatcatatatacttagcatatatatgaatgatattattatattggtaaaaactctaattaagatatgtatgtacatactgcatgatttaaaattaataaaaattgtaatcatcatatgtacttagcgtaggaattatattaaattacatgctaaaaactctaattaacatatgtaaatgccacatgcatgatttaaaccttttaaaaattcgaatagtcatatataagtagcatatgaaagatagtaaattaaattgtgaaaaactctaatatatgaatgatagttttaaaaatatgttaaatttaatacttttaaaaattctccagtcaattataattagcatatgaatgatagtaaattaaatgttaaaaactctaattaacatatgaaattgccacttgcgtgatttaaaacttttaaaaatcctctagtcaattataattagcatatgaatgctagtaaattaaatgttaaaaactctaattaacatacatatgaaattgccacctgtgtgatttaaaacttttcaaaattgtaagtatcacatataactagcatatacatgatttaaacttgttgaaacctctaataatcgtgcgtaattaacatatgccatacatcaattgatttatatggataatcaatacatccaaaatagtttacatcgtgtacacaataattacggcacgtactttctcctcactattgttccctccttgtgatcgctgcgtgagtaaggggtgtcttcatttgataggaagatgctagggtcaatcgtcaccgtgaaagggggttgcccatccaactgatcgtaatcctcgtcagtcttgtcctcaactctgacgatttttcttttgcctgggagaaccacttgacgcttaggctcatcaggccctctgcccttctttcctttgctagacatgtccttcacgaaaaagacttgcgttacatcattggcaaggacaaaaggttcgtccgagtatccaaccttgttaaggtcaacagttgtcatcccactgtcatcaatcattacgcctccaccagtcaacctaacccattggcaccggaacagaggaaccttgagaggaccatagtcaagttcccatatgtcctcgatggcaccgtaatatgtggcagttgttccatcgtgtcccatggcatcgacacgaacagcgctgttttggttcgtgctcttcatgtcttgggctctcgtgtagaatgtgtacccattgatctcatatccctggaatgtcgcgatcgacccagacggtcccctcgccaggaaggcaagttgttggttgatcgactcgttacccatgagatgttgtcgtagccacgcggggaaagtatcaatgtgatgccgtgtaatccatgcatcggacttaccgatgttcctggcgcgaactagagccaagtgctcctcgatgtaaggagctaccaatgaagagtgttgcagaacagtgaaatgggctttacggaataaattgttgtctaccgtcgttattgctttccttccgagagttccctttccccgtagtctcccttcatggcgtgattcaggtaccccgattgggcgaaggtcttcgataaattctacgcaaaattcgatgacctcctctgttccataacccttggcgatgcttgcctctggacgagcacggttacgaacatacttcttcagaacgcccatgtacctctcgaaaggaaacatgttgtgtaggtacataggcccgagaatacggatctctttcacaaggtgacaaagcagatgcgtcattatattgaaaaatgaaggtggaaatatcaactcaaaactgacgagacattgcaccacttcattctgaagggcttctaatctatctggatcgatgaccttctgcgaaattgcgttcatgaatgcacatagctttgttattgttgcccggacattgtctggaaggataccccttattacaactagtagcagttgtgtcatcaacacgtgacagtcatgagactttaggtttgtgaacttcttctccttcgtgcttattattcgcttgatattcgtggagtatccagacggtacctttatgctctccaagcattcaaacatactttccttctctgccttgctaagagtgtagctggctggactcaagtaatggcttcctttctcctttggttccgggtgaaggtcgccgcgttgttccatatgcttcagatcattacgtgcttccagtgtatctttcgactttccgtatacacctaggaagccaagaaggtttacgcaaaggttcttagtgaggtgcatcacgtcgattgcgtggcgtacgtccaagaattcccaatatggtaactcccaaaatatagagttctttttccacatcgccgcgtgaccatcttcgctctttatatgctggcttccaggcccctttccgaacactactttaagatctttaaccatagcaaacactgttttcccgctgcgatgtttaggtttcgtacggtggtcggccttatgttcgaagtgcttgcctttcttccgtaccgggtggtttgctgcaagaaatcgacgatgccccatgtatacaaccttcctacagtgcttaagatacgtactttctgtttcatccatacagtgagtgcaagccttgtaccccttgttggactgtccggataggttgctaagtgcaggccaatcgttgatggttacgaacagcagcgctcgtaggttaaactcctcctgtttgtcctcgtcccacacggggacaccttccttcttccacaactgtttaagatcttcgaccagtggtcttaggtacacgtcgatgtcgttaccaggttgcttggggccttgaataataatcggcatcattatgtacttcctcttcatgcatagccagggggggaggttgtagatacacatcgtaacgggccaagtgctatggccgctgctcatctctccaaaaggattcatgccatccgtactcaaaccaaaccgtatgtttcgtgcgtcctttccaaattctttaaattttctgtcgatgtttcgccactgcgaaccatcggcggggtgtctcagcatcccgtcctgttgacgctcttcagcgtgccatcgcaacattctagcattccccttgttcctgaacaaacgccttagccgtggtattatagggaaataccacatcaccttagcaggaattctcttctttgttagctgcccgtcaacttctcctggatcgtcccgtctaatcttgtatcgtagtgctttgcaaacagggcatgcttctaggttctcatactcctcaccacgatataggatacaatcgttcggacatgcgtgaatcttatgaacttccagtcctaacgggcagactatcttcttagcctcgtacgttgtctcgggcaatttgtttccccccggaagaatgttcttgacgagtttcaataaatcgccaaatgccttgtcactaaccccatttttgcctttcattgcaacaactccagagtggtatccaactttttgtgcccctgctcgcaacctgggtacaatgaagttctgtggtcctccaacatcttgtccaatttatgcgcctccttttcactttcgcagtcctccctggcgtcctgcaacatctgaccaagatcatccgcaacgtcgttaccatcagcagctatttcctcctcgcccgtttgatttccttcaaatccaacatactgagcaaagtccggaatattgtcatcttccacttcatcttcttccatttcaacaccttgctctccgtgggatgtccaacaattatagcttggcatgaaccccgactcaaacaagtggaaatgaatagtcctggatgcagaatactccttctgattcttacacttattgcatggacaacaaataaaacccctttgcctgttagcttcggccactctcaaaaaatagtgcacgccgtcaataaactctttggatcgcctgtcagcgtacatccattgccgatccatctacatgagtcaaaaaaaccgtacacaaataattattcttacaataatgacagtcatacaataattataagatatctttattcatacaaaaatcataaaatattacaccaaataattcttaaaaactatttgtaaagttttaaactaattttaatgtgttttacttcttttaattttcattttagtttgttttctattatttaagattaactttcactagagttttccttctcaactattttataaaaccttgtttagcaaatgaactaaatttctatatattctttcttccccacacacattttctctctcatcaacttacaactaaattttggagacaaaaaaagtgtgcaaaacataggtgcaaatgtagtatgacaaaaaaaaaacattggaggatgaagttgcaaaccttttaggcacctctgatttgtatgtaatcaccaaaataaattcaatagaaattttggcatgacctcccctcttttttgaagaaattttgaagcttgctcgggcagctggaggaggaagaagacatatatatatataggggtgggactttagtcccggttggtagcaccaaccggggctaaagatcaccgggatctttagccccggttggtgctaccaaccgggactaaagtcccacccctatatatatatatgtcttcttcctcctccagctgcccgagcaagcttcaaaatttcttcaaaaaagaggggaggtcatgccaaaatttctattgaatttattttggtgattacatacaaatcagaggtgcctaaaaggtttgcaacttcatcctccaatgttttttttttgtcatactacatttgcacctatgttttgcacacttt

SEQ ID NO: 4697 - DNA, 32765 bp, Oryza sativa
agagatccagagaaattgtttcagtacagagagccaggaggattaacctgtagcattatcacagcaacatggcacggaccactccaagctgatcagaaactattgactgaacaaaaaaaaatgtaaacgatcatttcatcaatcagttgggcagatatcaatgtacaagtcggtggaggagtcacacgataggcacaagcatcagaaaatgaaaaaaacactattttgtgaacaaagttcactggagcaatcggaataaaaagctggtgatcaatcagctaatgtcgtgataaagagggagggagagggagggaggagaggatcagtacctgcatcactggaagttggttgacttatcgccggtaagcaaaagggggttgattatagagcttgcctgtagggcttaggtcctcccgaccgtagctgccgccagggctcccttgagctgggatcccatcctatctctcctgtattggattgttgcctccctgtgcctggcaagacaatgaggacatggagttgacatccagttcaatcatcaatggattgaacaatacgggatagtattgttggcaggtcatctatgcacacaactttaattaagaatatatattgcacttaacaattaacattccattggagaaaaaaaatctggtaatgttttcactcaaaatctttaatgtataactttcatcattttcactttaatctggaattataatctaacctaaaactgctaaaatccaaacctgataatttatgagactaatggttcttgtcttcaagagaggctaacgacatttgagtttgtgagattgcaaacatcactaaacaattcaattatgaaccctatccccttagaatgcaattgaaggacctctgcactctttgatccagagaatagagggatacatatgtaatatgcgtctccctgcaccgcagaaaggggaaaacacactaataattgtgccatacttgacagttaatgggcaagacacaaaatgtgccattttcaaggtgacttccagctgatgttagctccatcacatcaactccaataagtaaaaaagtgcaaaatatcttcaagcctatcattggaattaaatctaaaaatatgttccataaaagaacttaatacttacgaggtaacgaaatagtgtagtaagatttgccaagctagatcaatggggatccacttgaatatgggaaaggcgagtgctttggttaatgacattgtggaacctataggctatgtataattttagtgtgggacccccggaccaaatcacattggacccctgatccaacccaatcaaataggcaaagcaagcaaccagaatgcaagacgcctgatggccgaatgctaattaatgccagatgcctgacggccaaacactaattgcaatctgcatcccacaacttaatttattaaactgatgaattgctttcagattaattaggggcattgggcattttgtttattcaattatgtgcactgccacaactgatgcttatcgtttacactataatcggtaatcggcagtcagccaagtccttaggtaattaactaataattgctttgtagaataaatttgtgtgatcagtagtccaccatgtttttagacatttcctgaggaagcatgactgatatgatacttgtgagatgcttagcaagcagaattcatagcaagtaaaattatctcctaaacaagagcaaataacatagcgagacgatagaaccaattgactaaacatttggggccccgtatcataagcaaccctgcccaaaccctaggtaaacaattttatgaccccaaaataataaaagcacaaaatctttattgtttgaggatttaggaagagaggatatcaccttaacctggagtctgtactgcgtagtgccgtaacccaccacagctccccggcgggcgcacgcgaggaggagccggccgacggcgagcccagaactccagaggccacgcgcgaggaggcggcggcggtggtggagaaggcgccagccgacggcgaacctggctcactggcggccgcgaggaggcggcaacggcggggtagggcgagcgtcgggcacgcgcgaggaggcggcggggtagggggcgcggctgcggcgggtgcgcgctcggagttggcggcggcgcctggcggtccggcgggcacgtgcgaggaggcggcgagcggctccgggaggcggcgacgggctagcgcacgggagagaagttttttttttcgatcgctgtatcgctataaccgctgctaatcgaacttggggatggctaattgcagaggttgatccaacttttgatataagccgttggatgaatagatctaaaagtcaggaaagataggtgtttgatgaacttgtgttttttatattagtatagataactactatatataactatgaacagagtctgaaatagagcagtggagtagccccccgctccatccattttcatttttctagaacacttgataggtaaaaccatttggttgagatgcattacagaacaatgtcaataataaaattcctcgcaaaaaaatgtcaataataaaataacaaatactggaaaatgaagcaacatttttgtaaaccagaatctagaacctaattttatgagatgtaaccttcatttagagttttagactaatctgatccacgtactgacgtacatccaatgaaccaaaccgaccataaaaattggatggtatcctcaattccccatcctcctgctttgattatccgacctgacgggctatagcgtggattgtatcaccatcctccagtttgagatcatccggagtttgcgagtcctgaacacgacggccctcgtaaattaaaacacacccatgcctgtacatacttgcaggctccctgcttaagcacaggtccatcaaaccctgcagcttgtcagtccttcgcagggtgtatgtgcgcttggccttcaccatggttaacaaatcgatggtcacgaacctgctcggtttgctcgccggaacgaggcggagctgatcgccgtcctccatctcgtaatccgcgggcgtctcctcgccgccgacctgcctgccaccgtacgtgaccgcccactcgccgttctgatcatcagttggcaccatggcgaagtagtaatcgatcaggcgctgcaactcgtcggtcctgcgcatggggcgggtgacgacgacgccgctgcggccgccatcgtcggtgctgcccttgatcgtgagggtgacgaaggtgctcggcttgctgaacagatggaaggtgatctcatcgccgtcgttcatgtcacatttctccggcgtctgatagaaactgatctccctgccgttgtacatgaaaacaccttccctgggcgctgtcgagggcaacatgtcaaagtagagacggaacagggtgcagatgacgtccaacctacgcatggtgtgtgtgacccggcggcctttgttgtccttcacggtgagggtgacgggcatggtcctagttccgtcggggaagaagctaacctcgtcgccgtcctccatgtcgtagtccgccggcgtccggttgccggtcacacaacggccgtagtgcatgaagacgccaccaccggcggcggcggcgacggcggcgcccttgcccttgtcggtcggcgtcaccatgtcgaggtagaaaccgatgaggacgcgcagcttgtccgtcctgcgcatcgtgcaggtgatcctgacaccttcgttgtccttgacccttagggtgatgagcgtgcttgcctcgacctcctctccggccgaagacatggctgatcgagatctcttcgacatggctgatctagaacacagaagccgatcgagatggagtatttgcctggattggttgagttttgagaaaaccttgaggattatgtagaatcaccatccggtacggtataatttgtggtataatttgtttctatagatttgtgcgcgcatgcatggcggaacgtgcacgcatatgcgggctaccgccaagcgcgcgtggagcagtttgctgcatgcgctgctctatcttctcctatattttctccagtgacgacgctagggtacgtacgtgcacaccagtgaaattggagttgtgcgttctgaatttcgtgtttttgaatttgagaatacgaagttagttcgagatatggttggactagagcgaactactggcaaaatgacatgtcagaactatcatctccgatgagcaacctgactgtatagtatagggagaggggaagatactacgaatattagacacgctgtattaagtcttaggagccggtatatataagagtacatgggaaggatataaggaaggattacagataagaaaagaatacatacaaatcaatcattcctaatacatctttaacaaccatatacttttatcactaacatgtacttgctactatgacatgcccctttcggttgccgcatgatatgcatgcatggcaattgatcaatcatgcttaaattaatgaggtccccccttcacaaacaaaagcaaataaatacttgcgttttcactgggctgggttgcccagcatgccaagaattataccgtccagtatttattgtgaccttcacatggtttcgggtgagtgcaatccatacgcgcataatagccactcaagtctcaatgcgccccatgatcataatcaaacaccgttcaatataatttacatggtatcgaatattaagcacaaaggatattgctgggactcacgcgtgccaatcaacttctgcatggcatgtgcccttcaaatcactcgaaggtggcgaccagatgtattatacattcagtaaacttgactcaaaaggcatgagctctacaacacctcaattcaataccatactcatgtctagcaagttctatagtcatagtgttgatgtaaaaacacgaggcctgggagatctgcttaactccaatgcaggtccaaaacttgcctttgggtgtatgagcgtgccagttgatttgatcctgcaatcaacaagaaacgaagacaaagaaaccgtggttaaatccataaacgatagccgatcagctaggtgccgatgacatatcatttatctttgagccgatatcatatttgcatcgatctgcaattattaacaagtaagaaagaactaaatctactcgatcggctgtagatattaacaatatataatccttacgttgatatatacttaaatcaagtgattgggatagatcggtcgccatgccgagacagtataaatcacttagatcgaaataaatattaacattgagagtatatatgttcatagcatagccgatcagatagatctagcttgtatcggctaatactccgataccactctatattaagatgttaaagcaaatagaatataccaaacagaagcctaatctacttaaatgcaacaagatcttaatataaagggcagatttaacatgtcaactaagcacataagacaaatatagtcaaatcaggtaagatcggctgaaaccccgatgctaccctaatcagcaaccaaaggcaggctagagattgagattctaatcacgactcataagatcaaactcaactgatacagctataagtatgaaaagaagaacaatatctagacaatcaagccgttggatgtgtcatagagtggtggatatcctatataatctaagtcaacatcggtatttaacctaatcggctgccttctactgacagatgttagctgattataggttagatagcgatattgccagagattatgtaagatatatgataactcgacgaattacataaacaagattagagtgtcatgaagatggaagcactaatcctgagaatgcaagccgtcataacaagttttacctcttgtcgaagatcgaaaccgatgcagctcaacccgaaagcaaaaactcgtcgaaacaaaacgaaagtaaaaagggtggcgatgcgccgagattgtattgaacgtgtgttagtttgattacatggggctcgaggcctatttatacccgagaattacaaaatatgtgtaacatacccaaagttctagactttaaaagtttcctgtcaaaatagttggaagctaacttttctatttttgagagccaaaaatttccattttaaacctaggtgaagttgatctaactcttgcatgaataaaatttgagaacaaattaaaactttttcatttataacctaggacaaaatgtaaacttctgtgtaagcatgcatactctcatatgcatactctcatagacatgtttgacttgagtccttcatatgcatttggattttcgatttgcatttcataataggtctcatgaatattaacgataaacaactaaaccattagggcttagtgctagctagaggaagttaaaataggaaccgtacaccttaaaatatatcaacatggttaatgtcaagcctcacaaaactaatttggtcatccatctgaagacatgtcatgaacatgaaagtgaacaaataaattaactcatatagggtatattctatcttaatcatctctataagcatcctcttaatttaatattaaagtaaacttatgcataaataggtaaggagcttacgacctatgtaaggtaaactgtaattctaccatatcaacatcacctcaggttaagaagagtccaaataaaacttttataagcatttacatgcatttaggaaaagggaaacacataaaagagataagcatcgctaattatctaaaataattcgtgcaagataaaatgatgggaaaatttatgtaagctctacttaatatatacaactcactgtaattttggtacaatttaataactaaatttgataccttaaataaacaagtcaaacttgtcaaataatagactaaatataattcttaatcagctaaaaccatacataactaaaatgtgcatttaactgcatggaagtgtataggggaaaatcatgaataaatataatttttccagaatttatcctctcagtttaggtcttctaaattcaaacaatgttctatcgagcccatcttctcctattttctgtgagcaatctatttataatttttaagtgcaaccaaagaaaatagaaactagctacattcatctaccttcagaaaaacccgcactaatttgtatgcttcacacgttaaaatattgagatataaagttggagggagagaattaatctgaaaatcgtccaaaaatcaatcaacacccagtttcttacccatccctcagactcccacctagcttacattgacctgggcccacatggcagcctctttggtttgaaccacaccctgtgcatctcctccatccaacacagtgacagctgagagagagagagagaccgagggcgccgaccggcactggacggcgtcgacgcgtggcctcgacgtggcagcgccgaaccgaggcttcacctccacccagctgcatcgcctcctccccattaccactcctgagccgagcaaaccgagggggagagctccagcttttctttttcatctcgaccttgtcgccggccgtgaagacgatggccgtcgccatcaccattgtgccgcggtcgtttcctcttctcttgcgttccattatcgcctctctacgccgattccatccctcttaagtttcatcccatttcatgcagtggtttggtgggaacgcaaacctcgccgacgatgctctggagcgcgcactgggcgccgccatcgggacatcgtcttcgttgccgtcgaaccggagcaagccgagccgagccaccgcaccatcaacatctcctcggtgtcctctcttaaatccctcatgaacccctgccagtggtgcagcgagcttggagatcggcatcgtcttccccaattccggccgtcaagctccaccttcgatttctccctctccggtgagtcacagttcaattcctcgggcataaagctttcctgagacctattcaacaccgtgtgtatgcatgcatggtagatcatcagccatatcaagccggcgtcgtcatcgagcgaggctccctgccgtcgccgagtcgttctgctcgtggtcatcgctatctggacctcgccaagtttcattggacgctcggtaagcatcctaggatcccatagaggcacatgcatcaatgctctagctccacatgcaccgtcacccgagaaccaccgccgctcgcgccgccgtcgccattaattccgatgaccaatgcttgcaaaaataccacctatagcctcgccttgaacccctttacattttatccttatgttgcacaccgagatctgccgccgtttgccaccggcgagctcgagaacgagctcggccatggctagctctgtgtctgctcaaaccaaggacctctgctgagaagagtcaaaactctaggtactagtttgtaaaacctacctcacacacagaacagtcacaggactgcgagttgatttcctaaaaccataggggcctttttgcatattggtctgagactgacctgtggatccaatctatttaaattctggaaaaatctaaatgaaatgcctaaagctttatattttcaacagaaaaacatgtaaacttgtaaaatctataacaaattgaaaacaactcattttagagcaaacttagtttctacagatccaccaacatgttctctaaaaacaaagtaaaataaaacatatacacactttacatcaaatgcctctaaaactattatctttaaaataactagttttacataagctgaagtttagaagtttatataaaattcatcttagatcctttttgagtatacccaagttctgtagaatcaccaaaacatatacttccaagttataaaataaaaatatatgcttattgtacaacaaaagcctctaatatttatgtaattaataaccaacatagagcagcctttaatttgtaaaatttgtagaaaattcatctttagtccaaatggagtgaaccaagtttttatagaaccagcaaatggtgagcttcaacatagtaaaataaaatatggcaccttctgtataggttattgctctaaactttaaatctataggataggtgctaatcacatagtaaggattaagcaatacgtatatataaatgtatataggaatacactaactataatgaaacccaactaaaacttgttgaaccagtgaaggcataagatccatccccttcctccaaaacttagtaccctttactcatataataatctctagattgatatattaagcttctagcatagaacatcccctagcttataaaatgtgaagtaaagtaatttgaactctaaaatttataaactaagattacattagttaaataaaatacttattttatacatcactagctagatgaggcaagttctgaacctaaacctctgaagccatgaacctatagaacactatacacctatgacacgctataacttgtaaaatacataaagaattcatattaactctaaaaattatgaaaccaaatgtgttaagtcttagaaaacacatatcttcacctcagcaaacataaacttaataagaatcatcttacaacagcatttcacaagcatttcacaatagtacctaagtaaatcctacactataccgacaaaacttctaaattcataactctcaaatgaaatgagataaaatagaaattctttcacctaaattcattttagacaagcacttatccactgtgcacaaataatgcattttagagcatttcggatttttcgcatatttcgatgtttaattgtataacgtgtactttgtatagatgattgcttaaatggtgaagaagtgatttaggtgctgacattttcctgattcaaggcaagttccacctccctctctttgatcactttgaacctatgttttggaggttattgaaaacgtttccaaatcttgcatgtcgattgtacactaacaaattaaaattgtgttaaaattgttagacaaactcctattatttgcattatcaccttaaccccacatatatccatatccatcattcctaaccttaggaacaatatgactataccactttatatataaattttggagtcactaggttactataatgcttagccatgcttagaatggtcttccttgtcattatgggctcattacaaatatgaaaattgattttgaaataatctggacagaactttaatacttgtgtttttgataaataaaatggtggaaaacatggattttaggtttgggcctcaagtggtgcacatatggtgattagttatgtaccgatagggggagagtgcgcccaaaccgacctaaggacttcactcaatgtcagttcatttcgttgagtcagttcatttcgtatacagtacaaccacatgtgctagtatgggatagcccaagcttagtaaattatttatggttcagccttacattctggtaggccggtgtgtatgagttcggataactcagaggaacttcctatttacctcgacgtggtagtttaggtgactaactctatctaatacaatggtattgtgccacgtgggtggggtcccgttgtgttcgccaccatggcgttaagtttaaggcgtgggcccaccacttaaacttaacggttctaggtcatataacgtgtatggcttaggatggagtaacacgtatcgtgctggtgtaaggctaaatcataaattttggaaaagctttgttgtgggtaataaattgggtacttatgtatcgcgtgccatgctcttgtatgattattattttgcatcatgtgggtaaagtgtacaaactctgcagagtaaaaactaatcaattagccgtgctcacggtcatgagcggcgtgtggatatgtattgagtataggcttgtgtttattcttctaaatgctaaaatttaccttcaaattatgatgagatttgagaatgatctcctggctgccatggaagccaatgaggtgcatatttatacatgattaatgcctactttgatgcccatatgctaagtacttaagtactagcttgctgaaatttattagtactagcttgctgaaatttatttgaaagcaaatctgatttggaaatgttttatacaaataaaacttgctttatgctaaaaagaaccatactatgcctttcttgattatatgtcttaattaatgtactgactcttgctgttgaattaacttttgcttgcaggttttagatttagtctttgagtgatgcaggtgattgactgcttcttctaggacttaaacttaatggggtaaacccctagtcggtgtgtttgaggattgggtagtcaagcttccgctgttctttatatttatttggccggtcggcctatgtaactatgaagtagttgtgatttagattattttcgtcttaagtgtatttttgctatgtattttcatgcttaagatgaaagtgtgaatctagtgcacatcttgggaactagatttacatgagtatgagttaagaatatttgagatgttgtagatctttaccatttttgtcaagtctgctgaatgtgtaacacatctggtcgccgcctttgagtggtttgatgggcatatctcagactgaagttgactggcaatgtctccaatattcttctctcgaggcgttggatgtttcattatgtttgtttgatgacttgaattattcacttcatctctcaaatataatgggaggtccggagagcctacgacaatatgtctatatcggacacgattcttatctctaacaaattttaagataccataagtctttgcggcacttttgcctaagcatatctttaaggaaattacataaaatatcctaattaatagatacaattaccttctcaggactctatccatacgtggcaatcatcatgaagcacatcaacctaacctgacaacgtatgccatgccatattgtcagattcggctcaatcggctaaccctgtccaactcggattctgccgaccctgatcacagccgattcatgctctgtctccgaaacaatcttggatttagattccgcttaaatcttaactctatctttgatactcagattacaaatttggtcgttaacacatagaacttgtcaagacactttcatctagcaattgatatctataaaagggagttctaacacatatataatataaagttcagatctattatacatatggccgaccggccaaatagttagtggtttagcggaagcattattctacccaaaataccttttatgcaaccgactagagtagaccctagttagaaccatcctaaaacttgaagttatcctcaacaaagcaatcctcatcgatgaagacctcgcctgcatccaagtctagaataacaagacaaaaatacaataacaatagcaagggtcaaaatgagattcaaaacatatgtacatgcatggctaaaataatggaaggtcaaaagtagttcaatttcagcattaagcaagttttgtttttcacaaatatttttaaaatcatgttttagaaaaaaaaagaaaatttcagcaagcatacatatatcattatggcatcttatacatagtaaaaatcatacatgtatataaacaacttggtgctctccaaagcaacaagtataatgaaccatttcgaatctcatttcatcatcaattcacaaaaggtttagttcataattaaagagagaacaagaggatttaaaacattattctatactcaatacatatccttatgccgctcataatcatgaggacgactaaatgattagtttttactctgcggagtttgtacactatacccacatgatgcgctatagtaatcatgtaaaaacatgctacaccgtactgaaatacccgatttactactcacaacatagccgttacattactcatgatttagctttacactagcatgataagtatgattccaccctaggcatatgacctagagtcattaggtggagtgcccacgccttaacctaacaccgtggcaacaaacacaagagttttccccacgaggcactatatcgttgtattggatagacttagatgcctaaattaccatatatgtaaataggtagttcatatgaactaccactaaaactaattcatactacttcggcctaccagaatgcaaggctaaataatgagaaattaacttagtgagctctggctaccccataataacacatgtggtcgtactgtaatcacaagtgactaacattgagttaagtccttagagtgtgtcgggcaaacactccccctatcggtacacaactaaacatcacatgtataccacttgctgcccaagactaaaatcattgattgattcattttggttcacaaataatcacatattaattttctgtccagaagtatttagaaatcaaactttcaaaattaaagagtgcctataatgataactacactagtctaggcatggctaagtatagtatgacaattgaacaggatcttaataactttttagcaaaaggacagtacactgtcatgtcaaaaaggtgacaatcagtaggttaatcaagtttcaaagaggggaatgcaagaatttggttttagctatcacatattaaattttcaaccatttatgtttgaaactaagtatgcaatttttcaatcaaaacatttaacctccagaacatgggagcaatatgatcaacgagggaggggaggtggcttgccttgctctggttctaccacctgttcagtctcgtggatttcttcaactatcgcctgattgtcgtctaaacatacaggtgaaaaccaaattacaaatatacacaaagattcagcatggtctacaatgactgctgtttttatggttaataagtactgtgatgacttgatttttagtgaaggaatttttattttatcatatcccatctgcaagatataaatattcaaagttgcaaactactaaattatggcctatatgcatttcgagttgttaagacataaaacttcaaagttctgtcaagctgaacatttttagattacagattataaaaatatgaacctaacaaaatttagtttgaaatttttagaactataatgaatttccaaagttatgtcaattttcagctcaaaagagagtgtttaattaatttttcctctaatttttcaaagcctaaatatcctcgtgttttagtttatttacaaataggtactaaccccacatgtgagtgacagattaaactgataaaacacccctggatgttttaaaagtttgcaaatccacgcccttgcgctaacagaacagggtagcagtgagatatgcggcgtcgcctccggcgaaagatgaggtttcagattgtgcaaccaaaatgtagagtgagaaggggttctaggcgaagctatcgacagctttcttgcaagctatggtggtctacatggatggcgttggcattggaagcggcttggctcagcatgcatgtgtgcatattgagttagaggcttgatctatgcggtaccaggctcgtatatggaacttggggcacctaggaagctaacccgaaggccagcaaagtctggcgaagtctcaatgaaaaagaaccgagctcatcggcggcggggctccacagtcgttgtcgatgatgcgtttctagtcttgatatggccaagggtagtgcacgcattggttaaaggtggcatggcatgtttctaagcaaaaggaatcgtgccgaagctcaccagagagcgagagggagatagatggcgttggcaatcggagatgaggaagaagaaaggaatcttccaacctagaccactttgttccgattccgtgcgggttcttggtcaccgtggggtagtgaagacaatggcgagacggtttggccggattcagactgtggtgaccgggcgacgtctgcaactccatggtagcgctcggagttcaccgttggaccgagttgacatggcgcgctttcctgaggattggctgcattgggttagagacagcatggagaggagattgcggaacacggcttaagcaagaacagaattctcacctgatgactatgagcggcggactcaaccttgctggtgccagagaagatggttttgtgcacgacgaaccctagatgatcttccctagtttcttcacgaaatgagcagagggtgagaagaggagagtggatgttggccagctaaatacagcggctgcgatggtttggtggacccagctgataggttgaaccaaatcgactgcggctttggaatgaataaatagaacgaaaccctaaatatgccgtatcggctgtaatactgtctcttttgtttttatcaatcactttaagacagtattatagaaatagctgatagaccaatatttagagcaaagatagataatgtattagctgttactccaatacaaatttatataaacaagtcaatctatataaatatatcaaataacaatcgatcacaaaatatgaggtttaatcgagaccaatctaacttgatgtatttatatagagtaatatatatgtatataagtggcaaatatacataaaacatatcacgaaacatgcactatcatgtatattaggtaagatcggctgaaactccgatactatccttagttatgattaattccaggttagtttttaaggttctagacaagactagggttgatgcaacttaaagtatgataaaaatcaatcaaggaattatccacttttcgggatggtagatatcttagctaatctaatctagtaagataatttagccgatagcagcataaaccctaaagcgagaatcggccgatacgactaaatcgagatactaaactagattaactaatatatatgatagcgatgatcacaataaaatactaatacatctaaagcgatgtaagagctccaatagtgcaagccattgagacaagttgcctcttgtcgagagatcgcagccgatgccccaacttgaagcaagaactcatcgaaagtaaaaagagaaaaggtggcaacgcactgaaagttgtatttattggattgtcatcccttattacaatgatctagggtttatacttataccccggaaacaaaacgtacctattatggacacgactcaaactttcctaaagataaaacaaacaaacaagtccacatggcagactcttactatatctctaattcaaattgacattaatatcttaattaatagatataattgtcttaaacgagctctatctctatatggaaaaatcagttatctcaatcgaggcccaaaccgagcccaagttgagtcgtatcggctgcttgccatatccgctcaatcggcgcagtctgttttggcaagattcaatctccttcaaacccaattcgatatccaactccaaatccgagactatcttgccaaattttgctgttaacaaatgctaaagcagcaacataaccttcatctacaatctccaaattgagtttctaaaaatcagagagtaacttcggttgatcaacttggacagaggtggtaatgtgatgtagctttcagctgagagcatctgctaccacattagctttttcgggatggtaatgaatgccaagattgtaatccttgatgagttctaactatcttctttgcctcagattcagatctaattgggtgaagaaatatttcaagctcttatgatcgatgaagatttcgcatcagttgcctattagataatgatgccaaatctttagagcatgaactacggccgctaattccaaatcatgggttggataattgacgtgaagcataagccaccactttgccctcttgcattaatataaaatcaagtccgtgtcgagatgcatcacagtaaatatgaaagctttcatgaatatctggcatcactagcactagggctgctttgagcctttttctcaattcatgaaggcttaattcgcatatctcagaccactcaaatttgtgttctcttttaaagagttgagtcaagggccttgtgattttagagaagtttttgatgaatcgatgataataatcagctaggccgagaaaacttgtgacttcgggaacgttctagtgttgtttccaattaaacacattttgtacatgttggcggtatgtcatgagacccttcgaccggtcctgctgaaaccgtgcaaccaatggagggttgaagctcaagacatcgagtctgtgggggcgaagcccacatggcgaagactatgaagcaaagatggcgaagggcgaagaatcacgctggtatcccacaaggtggaagacattttgggcgaagactatatggcgaagaaggtatggcgaaggcggatgacttcgccatagcaagccgaacttcaaggaggcccaagaggccgtctcagccaatcaagcccgggggccactgggccagcgttcgccagtcggcccattagaggcccatgtacctcaattacactatatacccatgtaaatgtccctttcataagggcaaccatgtaaattcccctgttaaacctaaaccctaataggggaacctgtaatagggctataaatagacccctaggccatgtaaaagggggatcccaagaaaaattctcaatttaatacactttactgctttccaaccactgttgagtactttcgacgtatgccgctgtcgtttcgacaacagctggcgccgaccgtggggacctccgagcgaaatcattgagagcgaatgccaccgaagagggtcgtgaagaagaaggtcgcaaagcgaaaggagaccgaagcaggagaggagatggccgccgaagaaggagcagagcctccgacgtccatgggcgaagctaggggagcaccatcggcttcggcaccggcgccgcaactgccaccttcggctcctgccgcttcgtccgggcagaggccaaacacggtcgacacggcgaaggcagccgcggcggcaagggcgctccagaccagggcggagatcctttcgacaagccagctgctggtgccccaagccgcttcatcacagccggcaacggcttcgaccgcgctcgccgctgcacaagtcaaccccaacctcgaagcacaaggcgaagccgacatggaggccatgcgacaaaacatgacgcaactccaagacatgctttgacaaatgcaagaacagcagtaggcatacgaggcagcgcggcaagccaaggtcgcttcggtcccaatcctctagtattcggcgggctacattccaccccaagtccacccacaagcatcaatccagccccttccgccacaagccatgcaagcgccagtgtacttcgccgggcagccttcggccgcaacaatacacccgaccccttatgtgcagccgcaggctcagccggtcactatccaagtacacccgccaccacctggccggccaaagtgcacccagttggttgccgtcgagccagcctggttcgagggtttcgccttggagtcaaggaccgcagttcgacttcatcaacactgctcaagcaccaaccattcgaccacaggaaccgacatcaggcttcggagcaaaccaagcgccaaaccaggtcgccatggcatggacccagccgtcgttcgacccatccatggcggcgcaccaagcgtccccgttcggagacgggccgccgaacactgtggcccaacctcacgcgcaagccatgacttcgcccttcgccacgccatagccgcagcaaggtgccgcgaacaaggcgggtggtgaaaagaggctaccattgagcgggagaatcaagatccgtccaatcccatcccagttcaagttcccacccgtcccacgctattcgggcgaaacagacccaaaagagttcctgtccatatacgagtccacgattgaagcctctcatggtgatgaaaataccaagacgaaggtaatacatctcgctctagacggcatcgcccgttcttggtacttcaatttaccagctaacagcatttactcatgggagcaattgcgcgatgtcttcgtccttaactttcgaggcacctacgaggagccgaagacgcagcaacatctactcggcattcactagaggccgggggagtcgataagggagtacatgcatcgcttctcgcaagcccgatgtcaagttcaggatataactaaggcgtccgtcatcaacgccgcttcggccgggctgctcgagggcgaactcacaagaaaaatcgccaacaaggagccgcagacgcttgagcacctacttcgcatcattaacgggtactcaaggggcgaagacgattccaagtgacagcaagcaatccaggccgagtatgataaagcctctgtcgccgctgcttaagcccaagtacaagcacaggtcgccgaaccggctcctttcgccattcgccagtctcagtcggcgacccaaggacaaccgccaaggccaagtcaagctcccatgacttggaggaaattcagaaccgaccgggcaggcaaggccatgatggctgtcgaacaagtttaagacctccgcaaggagttcgatgcccaacaggcaagcagccatcaacagcccgttcgcaagaaggtcagaaaagatctttactgcgccttccatggacgctctgtgcacaccaccgagcaatgccgaaacattcggcatcgtggcaacgcgcaagatccaaggccgcagcatggagcagctgccgaagcatctcgcgaagctattcaagaacaagcacccccggccgaacagcaccaaggtgtgcagtgcagagtaatccaagtgattacaaggactgacccgccgaatcaactgtcaaaagggcaaaagaagatgcagctgccaatggtgcacaacatcactttggcaagtgaaggggccccgcgatatttgaaccagcagatctcttttgggccagaagatgccgaaggagtgttgttcccacatcaagaccccctggtgatctcggccgaggtagctggcttcgaagttcggcgaatcatagtcgacggagaaaattcggccgacgtcatctttgccgaagcatatgccgagatggggttgcctaccctagccctcacccaagcaccggcctcgcttcatggttttggcggagaggcagttcaagtcctaggccaagcacaattggtggtagccttcggcacaggtgaaaacaggcgcgaagagcaaatactgttcgacgtcgtcgacatcccatacaactataatgccatctaaggccgcgcaaccttgaacaagttcgaagccatctcccaccataattacctcaagctcaagatgcctggccttgcaggagtgatcgtggcaaccttcagctacatcaaagggcgatttagccataatcaacagagcagtgcacaatgttgaggccgaactgcatgaccccctcatggcagggtgatcaaggtgcaggtcgacgatgccgatcccacaagacttgtatctctagggggcgacatgtgcgaaagagaagttgagaacatcctggaggtgctcaagaaaaacattgatatcttcgcctagggccccgacgaggtgggaggtgtttcgacagacatcatcatgcatcatctggcggtcaagccggatgccaagccaaggaaacagaagctgcgcaagatgtccgttgatcgccaagaagcagcgaaagccgaagtgcaaaagctgctcaaggctggggtgatccaggagatcgaccaccccgagtggctggcgaatccggtactggtgcggaaatcgaacagcaaatggcgcatgtgtgtcgacttcacagacctcaacaaggcatgcccaaaagacgatttccccttgccgcggatcgactagctcgtggattcgacagctggctgcgaactcatgagttttttggatgcgtactaaggctaccaccagatccacatgagtccggccgacatccccaagacagcattcgtcacaccattcggcaggggcaaccttcaccaagctagtgtacaaggtcctttacaagcagctggggtgaaatgtgcaggcttatgtcgacgatatcgtcataaaaagccgcaaggatttcgaccatgcgtctgacctgcaggaaaccttcgacaacttacgcgcggcgggtatgaaattatatcgtgagaagtgtgtttttggtgttcgcgcgggccagttgttgggttttcttgtttctgaatagggtatcgaggcgaaccacgagaaaatcgattccattcagcaaatgaagcccccgtcgagcgtacgcgaagtacaaaagctcgcaggccgaattgcggcactcagtcgattcctctcaaaagcagacgaaagaggcttgcccttcttcaagacccttcggggcgcgggaaagtttacctggacacccgaatgccaagcagcgttcgacgagctgaagcgatatctgcagagcccacccactttggtcagcccagcactaggaagcgaactgctactctacctagcggctttgccggtggcggtcagtgcagccctcgtccaagaaacagagtcaggccagaaaccagtgtattgaaatggaaaagcttgcttacgccctagtgatggcttcgcgcaagcttaaacactactttcaggcccacaaagtcacggtgccatcgcagtatcctttgggcgaagtgctccggggccaggaaattactggcaggctcaacaagtgggcggcggagttatcttccttcgacctgcatttcgtcgctcgcactgccatcaagtctcaagtcctagctaacttcgtggccgaatggacactggcattcgcccttgaacccgagcctgtcgaacaaccttgggtgatgtactccgacagctcgtggtcgcacaaaggggcgggtgctgcggcagtgctcacttcgccagggggcatgccgatccggtatgctgcaaggctgcagttcgacacaaccaacaacacggcagaatatgaagctatattgttgggcctaaaaaagacgaaagctttgggggttcggcgcttgctcatccgaactgactccaaattggtggcaagtcatgttgacaaatcctttgaggcaaaagaagaagggataaagaggtatctggaggctgttcgatctatggaaaagtgtttcgccggcataacggtcgaacacttacctagaggccagaacgaggaagcagacgccctagtgaaatctgctgcttgtggaggcccgcattcgccaggcatcttttttgaggtcctgtacgcaccaagtgtgcccatagagagcctggacatcatggcaatcgaccagacagagctgggtgaagacccagaagactggcgaacctcgttcgtaaagtacctcaagaacggctggctcccggaggatgaagcagaagcgaagcgcctacagctcagagccgcaaaatacaagctggtctcaggctagctatatcgctccagggtgctccaacccttgcttcgctgcatctcctttgccgaaggagaagaaatggcgaataaaatacaccaggggctctgcggcgcacaccaggccgcaaggacagttgcctccaaagtgtttcgacagggtgtgtatcggcccatcgtgctgaaagtttgtgttgagcaagctaagaagtgcaaaagctgtcagcggcatagccgaagccaaactgcaccccaatatgagctgcagcctatcgcaccaatctggcctttctccagatgggggctagacatcattggcccattccctatggcacgaaacgggtacaagttcgcgattgtagccatcgaatacttctcccaatggatcgaggccgaaccactcggcgcgatcacttcggtagcagtacaaaagttcgtatggaaaaacattatttgccgtttcggagtgccaaaggagatcatcactgacaacgacaagcaattcgattctgacaagttcagagagatgtgcgaggggctaaacctggaaatcaggttcgcttcggtcgcgcacccacagttaaatggggtggccgaacgcacaaatggtaaaatccttgaggcgcttaagaaaaggcttgagggggcagcgaagggtaagtggccgaacgaaatgctagttgttctataggcccttcggacgacccccacaaggccaaccaagttcagcccattcatgcttctctatggcgaccaagcaatgacctcaacagagttaggggctaattcaccaagggtgatgttctctagaggcgaagaggcgaagaggggcgcgaggtgtcgctcgaactcctagagggggtgagagtcgaagcactagaacacatgcgcaaatacgccacaaacacttcggcaaattacgacaaaaaagttcgaccgacagagctattgcctggccatctcgtcctaaggaaggagaacccggtggtggtcgggaagcttgaatcgaagcgggaagggccgtacctcatcaagcacatgtccaggacatgctcctttcgcctagcgatgctggaaggcgaagagttcgaccattcctggaacgcggcttcccttaagcgtttctatgtgtagcgcgggtggcacccaaatcgctaacttgtaaaaatgtacatactgttatgtaagcctttcggcactatgtaagcccttcggcacaaaaatgcaaaaaaagaggaaaatgaaaaaagaaaaaaaaactggatgtagggctattatccactctggaggcctgaaccagtataaaatatttgtgttttttgccttttttgtgtgaatgataatttgtggaaaaaccccaaggcaaacgcctgatcagcgaaaatgccagggggggcgaaacgaatcggccgaagcatcgctcgctgaacgttgaaactgtcacgaccggaaataacccaacgggcgttccttacgtgcgtgcattattccttgtcccaggaggcaaggtacaccaaaagttgatacagttcagagtttaacaagcggaagcgtaaatagttaatttattacatgggcggcgaaggcccagcacacacaaagacaaacgggaaacagcggaagactagggcgacgaccacaggcgcttgacggcaggcacgagctagacaccaaagccttcatcttccaggggctcctcttctgggtttgggaaaaattgtgcaagactgagtacaaccaccgtactcaacaagacacaaccacaagtgcaggataaatgcaagggagtacaagggggttataatataaagggttagggtttgcagtaaacagcattaaaagacacttagttgctcaaagctattttgtaaacacgattctagagctatacaatattattaatcaaggccgtgaacccacacgaacctgccttaacccaaggcctacgatgattcagaccgaactggcaacccgaccctgggtcccagctcgtcccaagccaacccaggccaaccattccacattttagttgttaagtaggttttaagaattaaaacactaacttgggtacattgctcggcttgcccataaccgagggcgcagctattcgaatagattatactctgatcagaggtgtacatctttacccacaagacacatcttcctcacgtgtaaccacgtgccacataccaccacggtatacggacggaagacgtgacatagtttccaacccatcctagccatagacaagagtaccgacccaaccccacctacggccggaacccccgggacaggtaggcaggactgagccccgagcagcaggacaccggccctgtgccatgacatctcgactaccgggccgcagctcgtgtagccttcatttgtcctagagatgtccatcgacccccgacttcgtccatctccattcgtgtacttttgtttataaccagactgagccacaaactaaaccttacccactagacatgtggaagtacggtagtgctttgcaacagaggcccgaagaccggcccttatatggccgaggtgctactatcaaaaccatgcaccccgagcccagcctaaaaccattttggggattttgaatagagggggaggtgtgaatccaattccacaataatccaacaattccatagtgtccaggtgataagagtattcccaaggtctagagttgtaaaaccacctaatgttgcctaattaaccagcgaagcagctacctaaaatcatactagtggtaccatgagtggagtgtccactagttggggttttgtttaatctagggtgaacaaggtaataataacaataacaataataaggtcataacaaaggtaactaggcatggctagataaaaacagtgataacgcgggaatttaagaaaagcgataatgcaataatttaaatcaaaataattttataaactgggattcaatatgctcaaggataatgtgacttgccttgctcgctttcccaaacgtcggcttcaacctccacgaagagcggatcttccgaagctgcagcgtctacacgaccaacggaaaggaaaaagcttttactctaataaactccatataacaagcaggaacaaagcacaaaaatgggttcttgacttcttaaggaaaaattagagacttgaacggtccaattccgagttcaaatggccaagttatggccatttgaagtttatatgctctttaaatgaatatttgcgaatttcttcatttaaattttaatttaaaaagggtttattgcgtcagccgaggggaaggggcgcgcggactgggtccacgggagtggggcccacgcagcagcctcacggtccacggtggaccgggtgcacccgggctcacactggccggcgccgtgggtcccacgcgtcagtcgcacctaaaggcgcgggcggctgacggccgggccccacgcggcagccactcggcgcgcccgagggcggccaagccggcgcagccggcgggaggcggcgcgcccgcgccccgatggtcgccgccggcgaccaccggcgtggcggagcggcggccgagagaggggaagggaagggggaaaagaagcggcggtccacggctcaccctaggtcgacggcgacgacgaaaaaggcggccggagcggaggaaggcggcggtgcggctcgggttgacggggtcgacggcgttccggcggtcggcgagcgaaacggaggggtggacgaggtcggcgaggatgcggcgaagccgaaggaggcggcgccgaggtgggaggtggtccggggcgacgacggcggcggaccggagctcggcaacgacggcggagagagagagcgacggcgcgagctcgattccggtgaggacgaagggcggcgaggggcggaaacggacggaggaggtgcggggagggtttaaatagagccggggcgagagagggtggccggggaagggaggaaaccggcgcgggaggtccggccgtcatcaatggcgccggcgagatttgcggggtcaaatccgcccgtttgaacgcgagagagagagggaaatttggggggaaagggagaggggatcacggggagtgatttccccctctctattgcacgcggagacggcgggaggcggcgggattcgcggcggcggcggcgctagggcgcgggccccacccgtcagcgagggtggcgggcaggcccgcccgtcagcggcgcgcgcgcggggagaagccgggtgggccgcggggagaggagagggagggggagggagatgggccgagccggcccaggagggagagggagggaaaggggactttttagagtttttctttttataaaatcattttaactttgtttattttttaataattattatttgtgctctgaaaattccactaaaatttatttacgcattttaggcttctaggaaatatacaaaaatcctctaagccttatttgacttttaactttgcacattttaattgttggaggctttcacacggattttaattattgtaggcataatttagaggatgtattttagagtcgttttgggacgtgacagaaaccgcaacagcttgtttcggaaaacaactaaccgaacaccgttacactcgatcaatatgaaaacacaagcgcacctttcagcgcagaatactacagatcgaaaacgaaagtcgaaagctaaaaagtcagcagacctatttcgctaatatacgcaaaggggccgacacattccgacctaacgaaagcacgaaaagtgacaatgcgaaaaatagcgaaaaggaaataaagcacatctatattaacttcgaataaataatcgaagaatacaagtcttacaacatggtacaagcaaagaaagcaatggctttacaacctagcttacagataaattacacctttgcccccacatcaatcctcactccctaaggaatggtttggcaaattgggttcgtcatcactactaatattatacatgaccctaagaggggaagggggcgaaacacagactagactataacgacgctaggagatcgcctcctgacgattggtcatctgatggtttcgccaaaagcgaaccatgttctccagaccttctgtatgaacatggtcgtagtcttccagggttcgcccggggtgcgcccgcatccagccgacaaccttcaaaaccttgtaactgttgctgtttattatcatctcatgataaacaagccgaaacggacatcgcaccttcggcaaacccttcactgccacgaacttcttgttcttgcttcgccaattcccaaaggggggccaaacgcacaattttcggtgaacaccctgctaaaacagtgcagaaagggcaaaaggcgaagtgcaaagttaaggctttgcaagaaacgtaaaagtcggcgaaaagagtaaacactctctagtatgcaaaaataatgcgaaaatgacgcaagcatatatgccaaaggcatcgaccataataactggctaaacttgggtcatccattccacatatccaaaaggccgttttcggctacaataagaaggggagagggccatcggccaaatttacattgttcgccctccgcggcaaacgccaaagaaaactacaaaatctaaagagaggacggagggcctcatacctctgggtgatcttgggcatcgcctccaccccctccgaccgctgcatcctccccttcgccctggtccgccgcctcagccttcgctagttgctcaagaagacgcgccttggcggtggatcggccgtccttctgccataactgttttcgccaggcgtgaagcgcgggcgaaatgtcctgtgcactgacctcccagtcccccttcgcatagttagggaactcggcgacgtgctcgtagccgaacggttgcagaaagcccatggtgaaggccgccgacacgcgtgcacagcaatcgccgtacgcagtggcgcagtccgagaccgcaccaccggcctgctaggttcactccgagaagtcgaaggtggaggcatcttcgccagggactcctcgcaccctcgcctccatgtcggaaagggcaaggcgaagtgtttggcacgccatcttcgcggactcggtggctttcgccatctcccgcacgaaccgctgcgactccttctcggcgctcgcctcagctttgctgacctctaggcaaagagcctccatcttcggcttggtgagattgtaataatcagtcagagcaggagaatgtgctcctttttaagttcagccttgaggcgctcaatctcagcattcgcctccctctccttctccagctcggcttggagtcgtttgttttcggccttcgtctctttgagggtgttagcgaggccctccatctccaagctcttgcatcccagttcgtcatccttggcccgaagacggttcttgaatccatcaagacgggcccgcatggttcgctctgtcgaacaatgagccacaagaatctgggtacaaaaatagagggggcgaagaggacgaacgtcagttatgagattgttttaaaaaaaaagaaaaacaagagaaaggaaagaaaaatgaacaacatacccgaactgccaaacttttgatggcagaacaaccttcgtcgaactcgttcagtttggtgaacaagctcgggttgccagccggcgagacaagattacttaccccctcgacgaaggggataagctctgcctgagtttcaaaatcaccaggggcgaagtggggcgccgcaagagaatacttcgaggcagatgtttcgacggcagcccccttcccctttggtatgacaagcggcgaagcaaccggctgacgcatagggcttccaaaaaccctagccgcggccttgacgacccggtcagcggaagccaaggtcccagcggcagcactacaccccgctccgccagtgtcaactatgacaacgggggcggtcgaaagacttaaacttcgaccagcgggcgaagtcagggttttgtccaaagactcgtcgtcgctgaaaacacgagcgatatcgacgagccctttctttttggcacacaaacacggtcaccacacgcacaagcgaacgactatcgacaccggtacacgggtaccggggtcgacaaccgcacaacgggcacgggtgacaccgaaaggacgaggagcgagaggacggatccttaccaccacgcaacgaggcgtgggaacgacgacggtgaacgggcgcggcggagacagctcggggacgacggaggcgaacggcgagggaacgactttggcggcgatccttggacaaaggcgagacgcggccggtgcaacgcttgacgacgcggaggcgaggacgaagacgacgacggggctgcggcacttgacggagtgaggacgacgaacgagaacggcttgatggagggacaaacgccacgacgaggaacgggcggccgaaggactctggcgaggcgggtggaggggttggcggcgacacggcggtgttccggcgaaacctaggagtggccggggaaggagacgatgctctgtcgcggcaaccggggcggctagaggtagtgggtggcggcaatgccaccggttgttggcggggacgcgcctccggtggtctgcacgcgaaacggaggcgacgccggtggaggggaagcagctgcgacgccgagggaggagacggcgcggccggccggcgcacgggcgaggtggtaggggcggctggagagtggccggcaccgaggaaagagaaggaggaggcggggagaggtggtgcggccacgggggagctcgggaaggggctaaaacgatagaacggagcgagggtgttccattttataggatgggggagcgagccgaccacgggagaaggtggaatggaggcggaaatggcggccggcggccatggaaggtggccgggaatggcgcggccgttccgggcgattgggggcacgaatcaagggggaaaacgggggaaatcaaagaggaatcaatggggattaaaaccccccaattaatttggaaagagccggcttgaatggggtggatttggaggagggaacgagctagggttcacgagagagagtgaggaggccgggcggctggaggaaggagacgacgaccggcacgtgggccccacgcgggcgcgcggtcagcgcgcgtgcaatgcgcgtgcgcacgcggctcgggtggctttttttttttgagaagaaagtcggtaatttcattcatgagaagtcagatttacatgcatcgcaataaaacctggagggtttagaagccacacatgacgcccctcactcaatgtacatgcaaacttagccaagttatgagcatctacatttagatcccgactttcatgatgaaattctactctaacaaagtgatggcttcttatgttgatgtcattaaggactgccaaatatctgcattttggtattgtcgcaatacccctgataacttcttgacagtctgaagcaatacagacctttaggatgttgcagtccatggcgatagcaagtccttcattacaagcaagagcttctagtgtagttggatcagacatcccttcccaaaccatagcactagctgccagaaatttaccagatgtgtcacgacaaatagctccaagagctcctttgttgcttgatcgagaaacagctccatcatcattaatcttcatgcaactttcaggaggtggtatccaactggttgttttagtacaaactagaggtctcaacctgtacatgcattggattattaatgatttccaaatcagccagatatgattcaataaagccccagattgttaaagggctttgataaaaatcatcatacaaagctttgcatcgagaatgccaaattgcccagcatataacaatcaattttaccataagctcaggtgttagattttcttgcatatgaaacaaccattctctggggtctttaatatttgtgattgcaataaggtctgttatatcattatccactagagcccacacccacttggccatggtgcattggagaattgcatgatcccaagtatcctgtgctgcaccacatattttacatatatctgctgtactcatgtttcgctgttttcgcaagttttctgttggaatggaattttgtgacagtctccaggcaaaaatcttcagtttggaaggaacgttgattccccataaagatttccaagacttagcaatggcactgaaatcggagacactagctttgttgtctaaccaattctctctttgcaattttgtttgaaccagcattcgataagcagatttcacagagaagattccagacctctcataatgccacgcccaagaatcaggttgtcttgttgagcctagtggaatatttaagataacttccttgtccatgtctagaaagaacttgtccagtaagtcatgtctccattttccggaggaagcatcaataagttcactgaccttcaccggtgggtgagattcttaggccctgattggtcgaagcatccaatctcttggaatccaattatcatcccagataaaagtatcttttccacttccaatccttcgaataattcctagtttaagaatttcacgaccttcaataatagcacgccaagtatgtgatggcctacttcccaaaccagcattcaggaagtcaccatttgaaaaatagacagctttcaaaactcttgctgctagtgaattaggatactgcaagattctccacccttgcttggcaagcaatactagattgaaaatatttatgtccctaaatcccattccaccaagaaacttaggcacagtcatcttgtcccatgctacccaattggttttccttgaaccttgtttacttgcccaccaaaatttccggattaaagaatttatatggttgcaaaggcccatgggtaaacggaaacaactcattgaataagttgggatggcttgaactattgatttaataaggacttctttacctccaactgaaagtgttttctccatccatccctgcactcttttccacactctgtccttcaagtatttaaattttccttccttggctctacccacatcgttggcaaacccaaatagcgatctgttatagattcattagtcattccaacctttcgtttgatgtcctcacggatggccatatcacacttcttgctgaagaaaatgcaggacttagaaaagttgaccagttgtccggaagctgcacaatagttagttaaaactctactcactgcatctgcacaaacactagtagctttgaatagtaacaagctatcatcagcaaacaaaaggtggcttataattggagctgtggtagttatttgaaccccttgcaatctcttgtttgcttcctctttctgttgagattatagacatataatgatttaatctattccataaataaatcatgacattacagatgaaaactagcatgaacgcatcattagatctacacatgtaaactacacagtataacatgaatagatcaaatatgcg

SEQ ID NO: 4698 - DNA, 6357 bp, Oryza sativa
aatcaacccccttatgcttaccggcgataagtcaaccaacttccagtgatgcaggaactgatcctctcctccctccctctccctccctctttatcacgacattagctgattgatcaccagctttttattccgattgctccagtgaactttgttcacaaaatagtgtttttttcattttctgatgcttgtgcctatcgtgtgactcctccaccgacttgaacattgatatctgcccaactgattgatgaaatgatcgtttacatttttttttgttcagtcaatagtttctgatcagcttggagtggtccgtgccatgttgctgtgataatgctacaggttaatcctcctggctctctgtactgaaacaatttctctggatctctttcccttttgttttggaccttatacaacctgctgttggctaataatgacattcatgaataatagatcatgttaaagctgtttgcatggtctgctgttgtcaaatagttttatgcagtcacaactcttattaaatgatcaagttgacttcaagcattgggctaaaaactaagattatgtaagttaaataacatataagccgtcatcttcaatttaagtgatattgtgtcaatcttctgatcaactgtttacatcttcggattatatagattcatgtcacctgtgtatgtcttcggaattatctatgtttatgttactgtgtatgtcttcagatttatatatatttaggtcacctgtgtatatcttgagatatttcgtaattgcatattattacagatggcaaagatgtttaattctatttttttattggatatccttcagcgatatgccctgcccggccttgtcagctaatatgcaatatcagttttatgcccttgacatggcatacattcctccaggctgcactcacttacacttttactgtagattgataggttaatgttccattgtcaaggtgaaccaatcagctaatgatggttcatatagttataatttgagtgcaactatgtatccactatgatgtagaattgtgggtatttgcaatttaaaaggtatgccacttaggaatcgacactcaggcacatgcacctaggcttgatgggtaagtctggccaatttacatatggggaacacaaattaatttaatcagttattccaatttattcttctttgtttctatgcactgcaatgccaatttgagtgcctatcttgtcatgctattcagcataatgtcttggcaggctatgcatatgttcatgcttatatatgcagcattcatataagtacggattaattggattgcttgctttgtctaatgcagcctcaccatttaatttgtggcgagcaccttaattccatcttgccattatcgagggagtatatcatatgcacctaattctgtatatagagtatttattgactagggtcttggaaatttttgaattgctgtcagatgtaagttcctcagattgatgatttgattactttcacagctaataccattgatcatagctaaacaccacttatagaagtttaatggatttttatctaaaaagggaaaaaaggaaattaataactgaaactgcatagtagtactatgatctctgaacaaagaaatttgctgagtttcctagcagctgctgggtgcattttcctcttgttatgtgtgcctaaccttgcatccattaaatttcaaaagtgcaaatagagaattattgcatgcattccttttatatcaaagattgggatgaaatttccagcttaatcctgacagccgcaatgtgtcttgagcaaaaggaagcaaggctgcaactgaaacacggtgaatagtaaataaaaatctcgcttttaggaaaaaaaaggtgagtcgtgcacaagtgctgtaatctggttttggcaaatttttatcgagatatactactccgtcgctttgtttacacaataaacctgaactctaggtgtagcagcttgaagcattaaaaaataagatggcagcaaacagatgtttgctttattggatttaatacttggatattccactgtgcttcccaaattgagctgaataaatagcttgacgaattgttctcttaacatgtctcagttgtcctttgtatcaaatgagcagcataatccattcatggattgttcttttccactggtgatacagatagttacttctaatgtttcatggaaaagttcgagctacagaaatttcttaagcaagcttacggattgtttctgatgagtttagcaactctatggaaacaagcataagtgcttctcatctgaccagttccaagagagaagtagccaagtaggtagaacaatcccaaaactgcaaacttattttactgtatatatatactttcctttttagcattttctgtaaagtcccagttctgtattgcagttggcatggttgtgttcatcggaatattgaatgtcaaatcgaaaggaggcgccaacctatagctatcaacaacatggacaccatggttcagattcataaatttggggatcatggatgtctaggttcagaaatttttggattttaggcaacaaattttgtagaatttccaatttagaaaaacacattttgcatttcgttataatgtaataaaataccaatttacgtttatttgatgaattatcaaagcaacgcttacaatacttttatttttatcggtgcatgtgagctacaatgtattaatatatatagttgtgcatcaacaatggatgtgttgttctccaatatacttcgcttagtatatatatcgacatgccttgtatgtgcacgctcactagtagccctaaaaaggccacatgtttgtgcttcatcatatatcatcacataattattcctgaacattgcgccactgtctccacaactttgagaggcacatcaaatttatctgcaactttcctagactactatgcaacaccggtggattggtcttcgccaacaactctaaattaattgtgatatttaagtcatctggttactttctcccgtttgaacctgaattagacaaatcataaattttacatgcaaagttcagtacatattcactataaagtcagtactagagtaaaatcaaaacttgagcaaaaacaggattttaggtccaggtactgaattggacttaaattccatgtctcaaaactaattaaatcagaaaaaaaaattcataacttgacaacttgaacttgagtattcctgaaaattactactactcatgaactagagttttagttttgctctatgaactgtagcaatcagacaaatagagggcttaccaccggtatcaatcccacctctatgtaccatagctccagccccatcctgatctgacgcttctatataacaaaaagaaagttaattcattcatgtacttgtaaaaatatccagttattttgggggaaacattttcagaacaaacaagtacaacttctgatttaatgattctgaacaagaactactgcattttcagatttcagaactgaagttaaaattcaggacaaatacaagtacaacttaagattttagatttcagaacaagcacaactatattttcagatttcagaacaagcactagtacaaattcagatttgatctcttcagttcattttcatgtttcagaactaacgctcgaaaattggttttgttaatatactaggactgatttcagaacttaaatcacaactcagtttcagtacttgaatttcagaaatcatttgcacttgaatttcaaaaataaattcagaacttcagtttttagaaggtatttaggatttcaggacattgctagaattgagatggacagcaacatcagatcttgggaagaggatcctctgatgttactgttcactatgattgacatgtgagctccaccactctcgggcccacatgtcaaccaccaaatcagtaggaagttatgtcaggggatctcaatcccaaatctttaactagaatactcctacagtcactacaacttcagtcgctgcagtttcagtactagagcaaaatttaaaacatgacaacttaaattcaggcacctaaatttcagtaggtttagcttaaattgaggagttgttcattaactagattatgtactgaatcagagcttagcttctgatttcaatgatttcgaaacaaaatttcgaacctgtgattcacaacttcaaattcagaacttcgaatttagaactagcattgtgcatttaccgtactcaacagcaatgaaaccagtatgattaacagctcctccctctccagtccttgttcgccacgacacgtcttacttgactgtaaagtctaccacccgaagacagtgtactagtctatgtacgtgttggactcgttcttctccaggcttccctcgctctctttaatctgccaccatcaacaaattaactctgcactgtgcacacatatgtaagaatcctactattatcctttccccgtttccgaccaggctttccacagaaagcagagtagcgaagcacatgtcgccggtgaaggtgttcggctcggcgccgttcacgaacgtggcgcgggtgctgctctgcctggaggaggtcggcgccgactacgagatcgtcgacgtcgacttcggtgacagggagcacaagggccccgaccacctcgccagaaacgtatgtgtgcgcagagacaaggattcatttctttcttgctttcgactaattcattaaaagagacaaattattgccgagttgcaacttgattttgtcgctggtgtttcatcagccgtttgggcaagttccggcgttccaggatggagacctgatgctcttcggtgagtaatatacacatttgaactatcgagcaaaaagcattctcagtttctcacgaattcgcctcaaaataaaattattcaatctttgtgttcaaagagtcccgtgcgatttgccggtacatactgcggaagcacagggcgacggacgaggccaacctgctgcgggaaggcgacccctccgagtcggcggtggtggacgcgtggctggacgtggaggcgctccggtacgagccctcggtgcacgccgtgttcgtccagcggcgcgtcgtcccggcgctgggcggggagcccgacgagcgggtcatcgccgagagcgtcgcgcggctgagggagacgctcgccgtgtacgaggcacggctggaggccacgcgcgggtacctcgccggcggcgaggtgagcctcgccgacctgagccacttcccgtacacgcgctacttcatggagatgccgtacgaggtgccggtgttcggcgcgtaccctcgcgtgacggcgtggtgggagcgcctgctgacgaggccgtcggtcaggaaggtggccgccatgatgagcggcggcgagggttgatacgtgtgctgatgcttgctactgttttctttttcttaaaaaaagagaatcatactctctcattcccataatataaggcatggtcaaaattgacacggtcttcaaaactaatctttatcctataatttctcatatattataaggtttgtagtaacaaaatataaccatatgaaagaaaattcaaatgtcaattcaatgataaattttttagcaagtaaattcatattgtactaaatattggtcaaaatgtttgaaagtgaaatcttgaaatacgtgggtgtcttatattttaaaatagagggagtaatggagagcgtttatatttctggcctctgcacaggatgcttggtacagtattgtctattgtttgtcataatgactactctcttcgttttttaaaatatagcaatttttagatggatgagatatattctaattaatactatgaatctagacaggggctagctaagatatatctcatccaatcaaaagttgttatattttgggatggagatggtgcttattactatgtatacatgaattatgtccttgtgattaagacagtgtgtatacctttgcgatactggatatgttttccatatccttgagttttcacttaattcttttcgtgtgactaagtttcatgtcaaatttttgttttgcccttctacatatgctcattatgttagttgacttcgagagttcgagtgggttattaacattttagaagtgatgagctgatgatattgtatctcgcttataatcataggtgcatgctagcctctgtgaaattagaggtatgtccgtgcaaatttagccgagacacatgtacaatacgaaaaacaaggatctatctcaaaatatggcgacatatttttaggtaaaatataacaaatataattatagtttaaatctagtgtaattacatattaaatttaagggcttacatatatatttatattgtaagtgtctaaat

SEQ ID NO: 4699 - DNA, 9774 bp, Oryza sativa
gccgccgcgctgccggagctcgcgctcgcgcccgcggagaaggcggcggacgcgatcaccatcgccgccggcgaggtcgacaagaagccgtacgcccacgacaacggcgtcgtggcgagatcgagagaagcccagaacggcgggaagccgccgtcgacgccatcggacgggcaggccgtcccgccgccgccacagccccaccggaaggcgcgccgttgctggtcgccggagctgcaccgccgcttcgtcaatgctcttcagatcctcggcggcgcccaaggtacagtacacctacacatgtaactcgatcaagatcgaacaccatgattacatgccgtaccaaagatgaaaagacaacaaacaaattaatcttgagcttgcgtttttgttttgttctttgcaaattaaagtggcgaccccgaagcagattcgcgagctgatgaaggttgatggattgaccaatgatgaggtgaaaagccatctccaggtagggtaattatcatctcatcatgcaattcatccatctcacgtacgttcttaattaaatactgtttaaattgatcattgactacaagacagtatgattaactgattgctagacatgaatgccataatgagcattttgatctgaatttttttttgtttgggcagaagtacaggttgcacacaagacggccgatgccgtcgccggcgccgccgacggcagcgacgccgcagctggtggtgctgggaggcatctgggtgccgccggagtacgcgacgcaggcggcggggccggccatctacggcgcgcacccggcgacgcagccgcactacacggcggcggtggcggcgcaggagtactaccaccaccaccaccaccacctgcagcaccaccccgccgccgccgccctggtgcaccaccgcgccgtagccccgcccccgccgctgccgcctcagcagcagctggcccctccctacagcgccaagtcgtcggcgtcggcgaggctcgggtccccggactccgacggccgtggcagcggcggcggcggcggcgccgccgcctccggagccggaagggacatgtccgagagcatcgaggaggaaggcgagggcgaggagcgggaggacgacgacgacgacgacgagatggcggcgaccaacaacgcccacgccgtcgacggcgacgacgacaacgacgagatcaacaccaccaccaccacgagcgcgggagcgattaactactaattaatcaaccaaaccaaccaatcaaatcaccacgcgtcgtaattaattactcattagtaataatactagctagtagcttaattaatcgcgctaatccgggagattaattagcgtcacctggaaaaagggaaaagtgattttttgttggcgcgcgcgcgcggagaacgggagccgagccgagccgagccgaccagagaaggagcaggagcttgagcttgtctcactcgttgatgtgatgcatatgtatggaactatggatcgatggataatgtgagggctttactttgcttttgcttttgctggtttttttttctccctcttgtttttcttccttttttgggactctcagctgttcctgatttaataatccggtagtactagtagtaaatatcaaaattatgtgatggtggagagattaaatatgagctagatgtaattgtttgggagattatgtttgttgttgttgttaagttgagaattgtgaagagccaccaataatgcataatgcagggtttgcttctgcaattaatgtgattatatgtgaatggttctaattaatagtagttgttatgttttggtatgcacaaatatagcatatgacattaaattttccaatgggataatgatatgcttggtggtaccaaggctgtgttcagaacctttgttccaacttctcttctcgtttttcgcgcccacgtttttctaaactgttaataggtgtattttttcaaaaaatttctatacgaaattgcttaaaaaatcatattaatcatttttttaaaaaaaatagtaaatacttaattaatcatgcgctaatggaccgttccgtttttcgtgtgcacagcttgtgctgggaacatagggttctgaacgcagcctaagtactccatccggcaaagattacttgatatttccgacagctaaaatccattaagcgcaagttattttgtttgtccgaaacgtcatatagtattatcgtccagggaatatattgcagctttaccgctgtagaagcaatcctgacactttgaaaagcaacagccgcatcgattttcaggaatttttgcgatggctattcagattcttgatgttttataaaagtctactggtcaaagttaatttagttctttattaattcttcgcataaataacacccttttcaccatattttgactataggagaatatttttggagacaaacatatcaactcggttgactcttttatttgcaagaactttgattattacacttttaaaaatgaactttgatgattacgcagtattacagcggttttagcctgcaatcaactgcaggcccatgaatacagttttagctatactagtgatggaccattatgggccaggccgtatttaacagccgtctcagaaaaggaataagtttatcatgacttcctcactctcgctcctgattgaattgcttccctcaaccgtaaaaccaggtataatacatctaccatcttcgaaaaccggttcaaattgacttctttgttggttttagaaacggtttctactgacgtggtatgttggcagcatcaacaggtagagcccacgtgtcagggctctcctttattcccctccttctctccctacagtgggagactgctttgtccccaccctcttctcttcctgcattgggagactactttgtcgccatggcccaggtcaacgaggcactcgaggaccaggcgcaggtggtggccttgtcggcgtgtacgacggccataatagccccaaggcggtgtagttgatcaacaagaggctctcctcccacatcgaaggaatcatccaagcgactatggtggcgagccaaacctagaaaggtgcagtgatggtgacgaggtaggagatgagaagagggtggcgacgcaagggttccaattgcatcctccaacatgtctcgtctctgctaccgtctatgacgagagagggtaccaccttcctcggctcgtcagtccgacttgccaccaccaaagccctctccggagtccagttcgccaccaccaccgtcctcttgctgttgaaaggtcggagaggaagaaaaggggagaaaggtgggttagcaaatgaggtaagttattgacatgtgggtcccaagcgctcaatcaacgagtcatccgtggtcaacctaccgtgctaggtgaaattgcttcccaaactattaaatgagtcgatttgcactaattttttttaagtcggagaagacattatacccgttgttacaattgagggagacgattcaataagaatcaagaaatgagagagagaatataatttatttcccaagaaaaacacatgcatatactactatttctgggccgaaacgagttgagcatgatgccctcatcccacctgtccgatcaaataacaacgctttatattcggcaccgaaagattgagaggaaaactaacatttttcgcgggtacgtttttcaaatgatttaacagtacgtttttattaaaaaattaaaaaactatattaatatatcttttaaaatttgaatacgctaactactcatcatttacgatcttctcacatcctctcctctcaaacaaactagattcgtcgctgcaacccaacggtctccgtactccggcgagccgccgtcccgctccagacgcggcgcggccgtctcctccggcgccggccaagatcgaggtggatagcaacactgcaacacacataactctagaagtaattaaatatctctctccacggccacgtgcggccatgtgacggcgcgacgtccctctcgtggcctcagccgccctgacatggcacgggcttccccgtgcggcgagcggccggccggccgcgatgcccgccgcggcggccgcgcgcgccacctgcgtcgcttcgtcaactcccccatcctcacctcgctgtaaccctcacagttgcgagataatctccgaaatgccactgctcgtttgtaccgagacgatcctctcacagtggcaatcctgtgataagtcactctgatcaggggcattctcggtgatcaagggtgtaaccctctgtttctgggtcacttcgtcgcaaagtcaacccccaatactatactagaacccttgattgattcgatgatgcagaaggggaattaaggtgtggaaaaagataatgcgggggaagcatccatccatcagtgttgttcagtggtggtagattagattccagctgatccaatctggtccgggaattttttctagatctgacaccacattctggtcaaattcagagatccatgctgctctagtctgtactagagccgtccttggtgaacagttcttcgacactcacctcactctcatcgaggtctcccagcttgaggagcactgaagaaatttctatgttgaggtcagtgatctgatcatctgatcatgcaagctgaacaggattagttagatatgctgcagaaattttattagattttttgcattcttctgcaagtgttactgcatagttgtgttcatccaagttgatactgatctgatcatgcaagctgaaaaggattagttttactgcattgttgtgttcatccaagttgccaagaagtgtgaagattttgatgtcaatcactcacttggtcaaatttgatccaaagcagcgttgctaaattcatctgagttcagattgcgagtttgtgacattgggtttggttttgcgcagcaatggtgtcaagaagtctgcagcttgtcggcgcgttgctgctgccgctgctcgccgtcgtgtcgtcgtttgatccgttccaccgtgatgcgaaccccatgggcggcggcgccgggcagggccccttcatcccccacgagtacgtccgcttcgccgacgtgaagcggcagtgcaagtccgtgctctcctccgcggcggagctcacgttcgacgccaaccgcgccaacggcctcatgccggagctgtccttcgtcaagggtgactggaagcacgacggcgacggcgacggcggcggcggcgcgccgctgctgccattcgacggcaccgacgtggcggaggacgccgccgccggggcggcgcgcgacccgctgccgctcgcgtcgttctcgctcacgcacgtcgacgcggcgcggcgcgggaggacggcgctgaacgtgagcggcgtgctcggcgtcgccatctcccgcaacggcaccgggccggagatggggccgtacgtgtcgccggagttcaaggtgtggcccgggaacaccgagctgaaggtgctgctcgagggggtgtacaccgagaacgacgacggcgagagcgtgctgtgcatggtcggcgacgccgtcctgccggcgcgcggcggcgacgccgccaacccgtggggctgggccaagcactccgaccgcgacaggttccagccgccgatcaccaaggacggcaacatcctcctcgtgctccgctaccccaagacgctgacgctgacgacgcgcgccgtccacggcgagctcacgagcaccaatggcaagacccacgccgcctacttcgacgccgtgcacctgctgtcgcagctcggcgcctactccaactaccagttcggctccgaggagctcgtcggcacggcgtgcaagccccacccgtaccgcgacgacgtcctcgccggcggcggcggggacagggggctgtacaagggcacctccttctgcggcatcctcgacaggttcacgtcggaggacgtgctcgccgtcgtgccgaactggaggtgcaacacgacggacgacgcgctctgccggcggctggggccgttcgagacggacaaggcggtggacgccaccgacggcgggttcgccggcgtcaggatcgtgatgcaggaggtccggtgcgagccgaggaccgacggcggcgagatctcggcgagggtgtcggcggtgttccgcgccgtcccgccgtgggagcacgcgtacacggcggcgaagcgcagcgggctcggcggcgcgacgatgtccgccgagggcgtgtggcgcgcgtcctccggccagctctgcatggtggcgtgcctcggcgtcggcgccaaggcgtgccactcccgcgtgtgcctctacctgcagaccaccttctccgccactcgccgcagcatcacggtgggccagatcaccagcatcggcggcggtgccgcccacttcccgccgctgacgttccagcggacggtgcacccgatggagctgtggagccggttcggcgtcaccggcggcgagccgctgagcttggcgtacagctacaccaagaccaagcaggccggcgagttcctccggcgaagcgagccgttcgacttcggcaccgtcatcgccaagtcgctgctgagctacccgaggaaatccggcgacgccgccgacgagacgacgagcctctccaacctcgccgaggagctcacgctccacgtcgccgccgtgccggatccgttcccacgcggacgattcgagcggccattccttcagcttgaggtgctctcgctcggatcgctcgtcggccgggcctcgccggcgacgtttccggggacgccagctgcggtagggcaaagcatggcatcatcatcgtcgtcgacgacgacgaagctggatgcgacggctatcctcaacgtgtcggcggagctgacgatctccggcgacgcgtacgtgaacgtgtcgacgctgtccttggaaggcgtgtacaacccggtggatggccggatgtacctcatcggctgccggagaatccaggcgccgtggcgagccttctcggcgatgggcggcgtcgaggaaggcatggactgctcgatcgaggtgagggtggagtacccgccgacgacggcgcggtggctgatcaacccgacggcgaaggtgcacatcgcgagcacgcgcggcggcggcgacgacccgctgcggttcaacgcgacggcgctccagacgctgccgatcctgtaccgggaacagcggcaggacatcctgtcgcggcggagcgtggaggggatcctccgcgtcgtgacgctggcggcggcgatcgccgccgagttcagccagctcatgtacatcaagtcccacaccgacgtgatgccgtacgtgtcggtggtgatgctgggcgtccaggcagtcggctacagcgtgccgctcatcaccggcgcggaggcgctgttcgcgcgcatcgccgcgtcgagcggcgacggcggcgcgacgccgccgccgtcgtacgaggtggacaagagccagctctactggaccatcgactgcgtcgtcaagatcctcatcctcgccgcgttcctcctcacgctccggctggtgcagaaggtgtggcgctcccgcatccgcctcctcacccgctcgccgctggagccagggcgcgtgcccagcgacaagaaggtcctcgtctacacctccggcgcgcacctcgtcggcttcgcggtggtcctcgcggcgcactacgtgagcgtgctggcgcggccggtgaggtcggaggcgtcgtacatggacgcgcgcggcgaggcgcacgcgctccgggagtgggcggtgacgctggaggagtacatcgggctcgcccaggacatgttcctgctgccgcaggtgatcgggaacgtggtgtggcggatcaactgccggccgctgaagacggggtactacgccggcttgacggcggtgaggctgctgccgcacgtgtacgactacgtgagggcgccggcgatcaacccctacttcgcggaggagtacgagttcgtgaacaccagcctcgacttctactccaggtccggcgacgtcgccatcccgctcgccgccgtcgcgctcgccgcggcggtgtacgtgcagcagcggtggaactacaagatcatcagcaagacggtgaagacgcagcagaagaagctgcagcacctcgggtcgcgggtgtacgagcgactgccgtccatgtcgtcggccaacttcgaggccgagctcgtcgccggcgtcaacgagggcgtcggccatggcctccgccgcgacgccagcttgagctagctagctacactgctacacctcatcgatcaatcgcctctcttaattactcagtagtcttctcttgttgctttcttaggtttttatgatgttcttcttcttcttcttcttcttcttcttcttcttcttcttcttctttatttcttcttaattagatcttcagattcttcttatgatatccaaatgtactctactacaagttcaataaagttttagtttcttatagctctttgttcacatttctgcacttcttgtgtgtgtgttcagcttatgtgacacaaagtgttcgtgctgacaaattactttccgatattgcgtgctcttggtgaacacattccaagtttccaataggtaactagacaatgatattatttgattattatagattgtcaacgatgctaagatgattaattagcagtcttcttgtttgacaattctgtcaagcaagcttgcttgctagttagttaattactacactgatttgtgcttaacttctgccaagtgaataactgaatataatgcacctagttgttggttggtgtttaaacaaattaagcattctacctacatgtaggtgaatgagagtgtcagctcgagtgatatctcttgctcctgctcctgatgctggatagccactgctgcctctgttgctccactgtaggaggacacctgcagctgatcggagctgccgcctccgccggcgccggcgccggctaaacgctgaaaacaatttcaagaagagaaacaaatgaagaaaattacagtgaccagttatgttgcttttttaaaagacaaaaacactttttactatcataactagtactagaacaatgtgatcttgacattttattattattccttttgctgttgctgttgttcagttcgatacagatagcatgcagtacagaccagcacactgtcatgcatagcactgaaaaggaccatagcagaaaacagagtttttcttttcttggcaattaacaacagagttactaaaagcccatctttttgcttatacttacacttatcaaccaaaatttaaattttcaactttatgattttggagtttttttttcatcgaaatttattttttattatttacttttcactaagaacacgtatataaaagttttattcacaaattattttttatttgcaaatataacgtcaaacgatgggggccttaggtcaagagataaaagaaaatgatgaggaaataaaccaaattggtgtgccaaattcaagaactaaacacaaaatatatgttcttgtgtccaaaatgaatgcaaaagagaagacaagagatcgatgaactcaaattaacacacacgctctgacctcgtcgtggcggcgcgagacgttgccgtcgtcgtcgacgaggtagccggcctcggcgcagagcgcccggaggacgtcgttctggtcggcgtgcttgggcagcgcgtacccggcgccggcgcgcaggccggcgtagatcctcgtcgccacctgccgccgccgccgctcccgctgccggttgttctcccgctcccgcgccgtcgggtgccgcagcgacgtcgtcaccccgccgtcacgccg

SEQ ID NO: 4700 - DNA, 12474 bp, Oryza sativa
atcccttatattttgggacggaggaagtaactagtagcctatcattattagcattatatgtagtttgggtcctaaactatattagttctatgggttggattacatatacatcttgcccttgtggatttggcatggtgtaatatgctaacagaatctaatatgctaacccatcatgactacttgactagaagcatagaaatgaaaaggcaaaagatgaagaatgaacctgttatgtgtatttggcagctatctcacgcatcaggctttcaggagctgcaaaagcagattatcagaaagatgaaggtgtattagctaagtaggtccacaaaaaacattcgacataataaggtatatgatatataagttaaaagagcacaataccttcaataccacctgtgaaatgctcaaactgacccatggcttgtctgacaaacatctctacaccgctgacaactttaatcccacattcttctgcttctcgtagaagccgggtaactttcggggcatataccgcatcaaatacaacatcatagaagcttaatgctttctgcgaaaacaatggaatttataacaaatattgaggcagcactgagcagacagctatatcaagataatctcaaatgtaacaagagagtatgctgaggttaattctaaaggtggtaatagagcttccaagtatgctgttctggaatataacatggtgcatgcatgagcaagatacctttgggataggggtgccgtccacattggggtacattcccaatgatgtcgcattagcaaggatcatcccttcttcaggcctgaaagtttcaagctcggctaatctcagggcatgaccacccactgcagcagcaagacttactgctttttctgaagaactcaagaaaattatcaattacatgatgtactgaaatacgatcaattttgagctttataaccagatgcctcatatccagtttgaaacaagaattgatggaacaaaaattacaaaaaagatatacatattttatttgctaacttaagaatagttgatgtgatcagcatagactgctactgttgattgcaagtgcagaaagagttgtccaaataactacacaaagaaatactagtatttttggggtggcttatgcaatgcactttgacatgactgttccatgaacagtagcagtctattcgagcatagttgacatttagtactagaatgataatgcaagtgtagtatattcagtaaacaaggtactctaccgttttcaaaatacagggcttatttaggacgagaatactaagaaatgtatgaaataaagagaaagaagataaaatgagcatactacccatacttaaattgattcgaaattcgtattcaagaagaaaaaaaatcaaaataagagagtacttagcgagagcattgttcaatctattcgacatagatgacatttagcagtagaatgataatgttagggagaaatgtgccaaatagggacacagaagatatatcatagtaaaatcacatgcaggctttatatttcgagagaaattttgtgaaaaatataggcaccatcttttcaaaatggagtaattacccatcttggataataaaaaatgcatgcgttagtaatacaagatcacaaaagttagacaatattctgcatccccgcaaaatatatatattgtgcatacatttggttgagatcacttgccagagtaacaaaacatgaatgcttatggccataactgaaagacccactatgtcggagacaatagtgctagcgtgctacaagcctctgggaatccagtagtaaatatgcttattcaaccagtgacattaatcattccactccaactttactcaaaattggatgtacaataagaaacaaatgaccaaattccagtgagttctactcctaccttagagaaagttaatgtcctaagtctaatgccaagaatgcctgatcagacgaatttttcttgtgtttttttctgttatggattgaatttacaaatttgatcttaacgtgaaaacagttgacaagaaaatatcctgaggcttatatacaggatgtcaacttaaggatcaataaagagggagttgatgtggaaaatagaatagttgtataggctactaccaggacacaagttctaaaatgaaagaaatgcaaagcatcctgagcagtaaccacccttttagatagagataggaaatagctaactagtcaatctaatccaatctctgactaaacagccatcgtgaacaacgatgcagttactgttgacctgcagtaccgcagaccctaggcaggcctattgctgctttggaccttaatgggctgcacatgacattcacccttcgcgtgggtactgttcacgtgtgcaatgctgctggcctagagtcattgaccagtgtttctatctggccctagtgggctccacatgactgataaaaacatggataataaaaatgagttaatatatcttcccagattgcatgcattaatcattggctgagggagtgaggagcatagttcagaactttatatcacaaaatgaattctttatgatttgcacatgatgatagaattaggtaggcacagaaattgcataattacagacaaagaatatttggctcagaaacacaatcttaccgtaggtacgatttgctactacaactcttgcacccttctcctttgccccataagcaattgccttaccagctccaccagcacctacaacaacaacaagcctgccagccaaaggtgagatggcagcatcctttgatcctgggcctgtgaaacataatttatcagatatttttccatgactcccaaaaaagagtaaaaaaattgctccagaattacgattataaaaacctcctatgccatcctcaatagcagaaattgctccaatgtagtcagtattgtagcccactagtttgccatctggtctcctaattatggtgtttatggcaccgattgactgcagattgaagaaaatatcaaaggtcaaagaaatctgaaaatggtaattaaatgaagcaattagatcaagtgtaccacatcaaggtaccttagcaactgggtcatgttcatggcaacactgtacagcgtccactttgaaaggaagagagcaactgcattacatttagtcatatagcatgaactcagatttgttcttgtgaaataccccctccagtcgggaaaacaaaacatgttattttgcatatgcatcaagtcaaatctctactccctccatcccaaatatagctacctttagcattcaaatgtcatcccaaaatatagctatttctccaccgacttcctcacctcaaccagtcacgaccaccatctcatttaatttcttcacctactttctcatctcaactaatcacaatcatccctcactttactttaattttctccttaatatccgtgtccaactataaaagtccttatattttgggacagagggagtaacgctttgtgcatttctatatatacataaatacatccatatatacatttaaatatgtattatattggaacatgggaatcatatttgtagatttgtctaaaaaagtgcttccattatattagaattttattgtaaacaatagaaatattgaaattgaaacgagtcgtcagagttgcatcttagagaccactgtatattccaaattgatatttttcatgccaggaggggagtatgctaacaaaagtctttccacgaaaatgatttgttgcattcagagtttcagacaactggcctcttgtttacccccaaactaaaatgtctattttgggctctctcccagattgtgcagagctatgcacagtaagtactctgtaaaagtttggatataaagagaagtgagaaaaaaaacacagtaacaaaccaatacagagggtcagatattgcatatcccaacagtgttgtacctttgtctctttggctgaagaccagagctcagatcctactaattgtggattgggtgggttgtttgtgtgaatttttcactttgatttctgggatttgaacatgtgacctgtgggttatctgccaatagatgactgttctaagcaactattcacctcccttgcgatcaaagaactgagaggaaaaatacagatagctaggttttcccattaaaactaacaaccattaggtgacgtttgtatgaataaggtaaagtgtctaaagaagaatccagattgggagtatccctcgtgtatgactcagaaaaatctagtccatccaaacgtttcaaattccaagcaatccaatagaatagctatgtaattttttctatcctctgaaattagtacctgaatcctgaaaaatccggagatgaatatgtgctgagaaatcgagcaaggtcatctgccaaaagtggaagataaacagcattgtatccaatagattgaagacatttattgtgcaaaattgggctcttgctctgttttactgggttggcaataagaccaagaacctttgtatcaggtcctatacgccttatattataaatgtccaacagttctttgacggttggctgcccaggtgctgatatctttgtagcatcaagagtcccaaaggttagatatcctccaaacttgggggataacacccttgacattaaacctttttcgcccatcactagtccaatcataggcacctgtcatttctactggtcagtcaaatggaagttaatacaacatggtacaaattaggaaaagaagagcataaaagtacaatttagacatactacaacattatccatactgttgtctacctcctactccctccggcacaaaacatagctacttatgcctttttttggagggattaaggttgaggtgggaaatggttgtggttggttgagatgagaaagtagttgaagaaatttaatgaggagtggttgtgattggttgagatggggaagtaggttgagatgagacaaatttgaatgatagaagtagccatattttgagaccgagggagtaataaataacaccaaacatgatgacataagaataagctaacaaacgagcacagctttgccaatgagcttagttttcttcttaaaattctcctaaacacataaagttttaaaagcttaattggtccgatatttcaatttgcatcctctctgcaagcgaccaattttatcactattcacatcctctgtgcaagcaaccaattttatcacaatggtaagtaatgattttctattaaaaattaatgatattatttgctttcactggtaaatagggagatttgaatatggaaagtacagtataacagaagggactgaaaaaaaagtttaatactacaggttagattggtgaaattctcatacagcttaactgaagtacaatatgtgaaatgcaatttcctaaaagccaatatgctaaaattaaattgcaagtcctaatgttttcattaaaaaaaatgacttccaaaccataggagctaggaagcatttcatacaaagtttgaggaatgtttactggcctgagctagggatcattagacagaacgatttccgtgtgaagtaatttaaaaacagcatgaatctaaaaggaatgcagtagtggtatcaagatgtacaggatgattatacaggataggtgacgcaagtttccagatggaagagtgaaaatgtatcttggattttatacaatgacacttacttggcagtgcaccatcacttggaacattcgtgacacatcagcaatgtcactagcagttgttgcgattttcactatgtcagatccaactgcttgtattctagccacaagatctgcaagctcctcgcaggacggagtactttcataattgtgtgatgagacaataagtttacacttctctggcttactgccagaaataaagctgataaatttgtcagcaacctacaaaaaaaaggaaagttggttacaattgtgtgcatgtattccaaatcgtgaactcaaataaatgaggcatatgggtgtacatggcttgataattgaggaagagtaaattattttagagtgttttgctaaatgtttgtcttaatccagttataaacaggccttgtattgtgttccagaacatatgacataagacgtgatagaataacaactgaaaaaaaaatctgcctgcaagattattagttagagctaccttgtattattttcattttctgggctagtcttactgtctcagacagttaggcgttccttttttctgttgtgagacgttttatttgttagtttgctcctttgttaatacaaagatgcacaaatctttcgtgatttacctaaaacaactggaaaacatgaactgtgcaactttaactctatttaataaataccaaaaaaattacaatttcattccagagaagcttagaggaaatcacaggacactaaccacaaattgagcataagaaggatgtattgagcattcattatcaattataggacatttttcaattaaatttcctcatctggagttatcttttagtgtgatagccaaatggcagctaaacactgaagtatataaaagaatgattggcaaatggattccatctgaagttaatggtatgattaatctactggtgagcaataaaattgaatattaaaagcaatagagatactaacatagtatcatttagaatgaatgaacaagtgcccatataggcacctccacctgtgaagctataatgtgcttttccaaatttaccgagaactcattttcaaagttatgtgcagtacatacacaccacattttcatgctcaaatcatttgtattgtggagaacagaaaaatgggggaaatgattatgtatattgcacaatgtccagtgcatgcatttacaaaaacacaaacaaaaaaaaataaagtagagcagcaaggtttaaatatgaaatttcttgtgtgtattacattacatgtattttcagaagttttttacacagtgtatcatgcactttcacaaatggtgggcactaatcaatttgaaacgctaaggatgcttacactattactgcatactaattgggaacagcgtaacagtttaacacatttatggaaacaaaccttcaattcaatatcaacatagtctacgcctaactccattgctaaacggagtgcttcaaatcttgtagcatcatcaccatcgtactggcctccttcccaattgggtctgcaaaaaaaacaatcagatacgtcatttatgcaaagcatagtgttgtaaactagtatacataagttagacaagtatgaccaactactacaaagtgggttgcaacattgtgaatataaaaaagtactcacgttggaaaaagctacaaaataaatcaactaaagctcacaaaatgaaaagataaatataaggatgggagaagcatataccttttatgtatattttttttacagatcctataatataaatattcatttctacaagtatagaaagctaattaatggccacagatacgctcaatcagtttaagtgtttaaccaaacgccggcttttacgaaaataagaaatgattgtgccacgtctcaatcagaagtgaacgaacagataaaaaaccttttaggttcttgggtttagttcttttcagattatttaccagattgttgaaatggattatttgctcaacacttcaaaaaatacattttctccaaaaaaatatactcctgatgtattgcttagaccacttgttttaagttatttgttaagtaaatttatcaaaatattttatttctccctatcatcaagtagattatccgcagcaacaatctgctcaataatctgtttcgaactgagccttggatggactcttttcttacgttatggtcatacttgaataaagtatttacaaatctacaaactgagtcagacaatatggcaaaagatgtgtctcaattttgggtacaatattatgcaggaatgaatttaggtttatacttttgctagttttaaccttccacaaaatttaaggatgtgttatcacaaattcataatagctccataatccaaaaaagaaacacatggatctaaactttctccaaatagttttctagatttagtagagttaacttttcaccaggttgttgcatgaggcaccagggtatcaatgcagtgtgaacccagcagcattccagcaatgacatgctaactgaaaaggtgggcagcattccattcaattccttgagatattgactagctcagcatgagattaagagatatgtgtgcttcactattatatgtttgctatgggatacgtccagtttgcccagtttacattcataaatatccagattggaccctctgctctaaaaccggttatttaaacccttaactttccgagtcatcaaagtattgagccatatgagtaagccaaatcatgccatgaatcaacaagttaactgaaatcaaaaggcatttctctgattctcgccctctcttttgtctcttttccttatctcctctctagtggatcatgcatcaatttgctggtttaatgcagatcaaaatgccatgtagcaagccaatatggaaaaacttgtggaattagcacctgtaagagaattccagaatatatagatttacatgtatagcgaattaacacgctctatacatgtactccctccattcttttttgagatgtccttttagcatgtacgtcttctcatctatgatcatgtgttcagtttgctgtccatgtattcaatgagccgtagtcaacccctttagctcgacatatctcaccttgaggacacctagggaccagcctagacatcgtggcgtcctggtgccccccatgtgccatgattgcatggcaaccatgtcattgacaactattggagtcatagatccatcaaaatggccaaggtctctgatacagtagttggaggactaaatagttgtctatagagcaaacaatagtgttgtgtttatgcaaaacccctgtaggtgggttggtctgtgatatacagtggttagcccatgcaatgcttttggattgctcagctaggttatggccttggttagtttgtatttggccctttactttgtggggaacctcaacaggctgatcatccccctttgtgcccctagtctgaccaaatgttaccatcaagcttgctacgaggatgatacttcttgatagttggtgtaacacttcaattggcaggtcataaacatcgttaaaaggaacatttttatataacaactcaacagatatgaagggaatatttaaagtcctaatgtcaaattaacccacttactatgaataaaataatatatctgcaaaaaaacatctaaagttgacaactaatgaactcagctggtgcacattatattgcaccagtattaaattctccacgagtttatcattatagtattgcttttacaatgtatagaaactaggatagtacacaaaggaaaaatatggaaaaaaaagaattggattatgataacacgataggcagtcattttcaaggttctaaaactcagcagctagtattcattcaatcacctcactgtggaatgcatatacaggaaccagccttgtacttggcattatactcaattttcaatttaaagtttgaatttatacatgatgtttatatggtatcagaacaaaaaaaaaatgttgcatcttttctatttatgtaggcttcaaaagctatccatagtaaaaaaacgcaagctgccaggtagaatgatcaaaagggggaatcacgacaataacgacatgaataataggagtcaatcatgtaattctaaatcagcgagtagaaataggactagtttgcatcaacagttcataacgacatgttaaatcagaatgtgtgatcagaaatcagcaagacagatcaaaacctgacaaaagttgattgcaagttttttgtgccacaaacttgttaactgacctggaacgcactaactacataaattaccgaacaaatggaccagttaaacctgttagcatactcgttttgcaatatactcctaaggaacaatcactcaatgaatcatccaaatctatcaacataccttttcaaaagaaaacatatcaattcgtgagttgaattaaaaaaaaaaaaactcgactggcgggggaatgacttccccatggcttttcattaagaagaagcctcaaccaaaccggtcgagaaaagccacgaaccctggccccccacacgcggactcaccccctatggatcagtccgtaacctgtgctttgaggcccctgctccctatacgagggcccgccataggtcaattcttaacacgtgtttttatgagaggccagtgagtgactttttttaactaggcctgaaattcgcttcatggggagtgaaacccaggacctacacgtgctacttgagcattattcattaggctacaggtccttccgtgagttgaataaaaaaaaactgtggaaggcatatgatgcaagtactcatttaatcaaaacattggatagctttctagaatattgatgttgtttctgtttattttatgtggtactgagaatttaatagttagtcaaagattaattgtgtcatgtgctctctttgggacagaataaatgcctccgctccagataacttgtttatatctagtcttgacatggctttaggtttcaaaccatggttatgctatgaatagcatgcgtacatggactccacttggagaacaaatattccatgttctaggcaacatatgctatgtggtcactcttttggatatgcaactgtcattagtgtgtgtattaaaattaacgtgaaatgtacagatttcaacttcaaattcactatcccctccgtcacataatataaggcatccaagaattcaaactttgtcccaaaatatctgcttcctccactcaaccacctctcacttaatttccacccaatctaacccccaaacaccttcctgctcccccccccccccaacagataccccctcatttaatgatgggcattatagtctttttcattcatccttaatctctccacaaaaaaaaaactagaatcccttatattatgggacagagggaatatatgttaagaccaaaagaataactgacaaatggcatgattgaagccatgacagacacagcagtcgtattcacagagaacatagcatctctatttattctaataaatttttaactgaagttgaaaaaattgacatgactgacatggctgcaatcatgcctgacatggtgcttgcgcagcggcctgcaagtttgctaacaattgcctgtgagccaacagtctccaaggacattaccctatcctcagcaccacaacctatcgtcaatatagttggtagtacatgaggatgaggtttgtatcttagagatggtgttaggtttgtaggtgagatttaaataagcaatgaataatcaatctatccctctaaggctgcgttcgttgcctctagttcccaacttccctttctcgttttccgcgcgcacgcttttcaaactgcttaacggtgcgttttttacaaaaaaatttctatatgaaagttgcttaaaaaatcatattaatccatttttgaaaaaaaaatagtaaatacttaattaatcacccggtaatcgctgctccgttctccgtgccagggattaattaagtctcccctgttcctccatgcaccatgtctcccctactacctcgacgaactaaaggtcgacgataatcaactgagattaaacattcacgagaatatacttgcaaatattaaggatcaacggcacaaagttgcaaatatccacctgccgaggggcatttctgcaatttttcacatcttccacggacttatctgtaattgttcacctccaccatttgtggatactcaattgttgttaatttttgttatgatcgggcggcctaaacggcgcggcgtcaaaaacaagctgattctaacggagaacacaaaatgcagttggctatgactagatgttgacccaaaatccatcccaaaaacgggggcgacgccacccaaaacaaagcaggaatcagctgaaaagcatcgaacattgcaagcgcacgagaacacacgtgaaagcatctgcgcacgcgctgcggatataccgggaaatggacgcagaatctggagcccgcctcctgagagaaggggtagagggcgagaggagagggggatctcaccggtaggtgacgagggcagggagagggcagccacggagcaggctcgggaggtgctcccgcgggcggaacccctcgatgaagtcgagccggatctcgacgaggtcggcgccggcggccgcggccgccgccgcgtcggcctgcatcgcctccaccgtgcgcgacaccagcggcacgcacaggagcgtcatctctcccctcgtccttcgccggcgagcgagcgagcgatcggcaagcagtgggggtgggttggtcaggctgggtctagcctggtggcgggcgggcgcaggtggaggggaggggtgggtggggg

SEQ ID NO: 4701 - DNA, 17071 bp, Oryza sativa
actaaagatatctttagtcccggttgttctcaacaaccgggagtaaagatccgggggtatatatattctcggtgcgccctcgtcttcttcaccaacacttagacgttttcggccgatcgatctctctcggcctctctccttcgccgccactgcctagggcaaatccccgcgccgacgccgccgtatctcgccgtcgtctcgagctcgtcgtcctcgccgcctcctccgctgccgccgcatctctggggtgagagccgccgccgccagatctcccttcatgcatctcgatctctccgatctcgatctctctccgtcgcgccgcccgccacgagacgccgcgccacgacgatgacgcgccacgacgacgacgcgccacgccgccgccttcgccgccgcgcaacgccgccgccgcatgccaacgccacgccgccgccgccgtcgccacgccgccgccgccttcgccgccgcgcgcgcaatgccgccgccgccacgccacgctgccgccgccacggccccgcaacgccacgccgccgccgccgtcgccacgccgccgccacgccgccgcgccaaccgccgccccgatgccgccacaccgccgttaacgaacgagaacgagaacgatcgaacgaacgagagcgagaacgaacacgtcaacgtacgttgccgcgagaatgtgaacgagaacgagaacgatcgaacgaacgagagcgagaacgagaacgatcgaacgaagacaagcgagaacgagggaacgaacgtgaacgagcgaacgaacgaggacgaacgttaacgtgaaatgcaatatatatatatatatatatatatatatatatatatatatatatatatatatatatgttactttgcatttatcctaatacatctttttgtatcttgcagaaaagacgtgttgtcggagtcgtccgtcaagcctgagtggaagagctagccctagaaggaattggagcaggcaagtgacgtaataatataaatgattgttatatttgtaatgcaattaattaagattattagacctagccctagaaggaattggagcaggcaagtgacgtaataatataaatgattgttatatttgtaatgcaattaattaagattattagacctgtaattagacttatcatataagattgtgtagtgttctaatattatttgagttttaatataagattattttattgcaaattagacttagtatgacattattgactacggaattggtgcgactcctagcaattgactattgtagtcttaattagacttagcatatacgcacgaaacacttagcatacatgactattttagtcttagcatgtaatattatttgagttttaatataagattactttatttgtaattagacttagtatgtaattattgactacggaattggtgcgacaagtagcaattgactattgtagtcttaattagacttagcatatacgcacgaaacacttagcatatacatgactattttagtcttagcatgtaatattatttgagttttaatataagattattttatttgtaattagacttagtatataattatttactagctagggttgtataatatacgtcacctagacttagcttatatcacgatttgtaattagacttagcacgtaaggttgtgtagggttctaatgtacgacatttacacttagcatacatgacttagattgttaaaacataaatgtctcgtgacttagcagatgtttcttgtatcaacagatggctgaccgcgatgaggaacagatattgtacgatacaatcgcggagggaagcagccagtactggaatgaagaagaggggaacgaggatccaaaccagtacttgaacgaggaagggaacgtggagagggatgcggaggggaaccagcaggggcacgtggaaagggatgtggaggggaaccaggaggaggaggctagtggtagtcaaccctccgttggacagaagagggcacgcgggcaacgaggtgtagcgaacaagcttgagggtcggcacatcataacggaagtggaagaagatggacatcctagtgccccggccgaagccgccaagaactatgtacgtcacagcggttgggttgtgcgggataacgtgcctgtcagtacggtgtactggcgaagaacaagggcacgcggagatcatgagagctttgtcccagattcggagaaagagatgctgtggaccacaatgctcgagacattcacccttcctgcgggtacagaggacaaagtgaaaaggtggactctgaagaaaatggcagaacagtttcagagcttcaagggagatctgtacaagaagtatatactgaaggggcagacaccgaacttcgacacattcccaaagctaagggatcactgggacgagttcgttgcatataagacaggtgaacaagggcaggcgatgatggaaagaaacaaagaaaatgccgccaagaagaagtaccatcaccacttggggtcaggaggctatagcgtcgcgatgccgaagtgggagcagatggaggctagcttgattgagaggggtatcgaaccggcaacagccaattggccggaacgatcgaagttctggtactatgctcacgatggaacgctcaacccagctgatggctcactggtcttcggcgatcagatacgagaggctgcgcgacgactaacagatgcagtggaagcctcctctcagggcacgttccgaccagacagagatagggacgagctgacactcgccctgcagactccagagcatccaggacgaacacgagggaaatgggtgattccttggaagattggtttcaaggaggacatccacacgtacaggagtcggatgaggagcaagagagataccgaggcgaagattgcagacctagagttccgggtatcgagctacgaactcaacatgcaagaggaggtggcaaggaaggttgatgaacgcatggccgcacatcggtcccatgatccccagccgaccattcctcctgcaatggtgagcccgtcaggaaaccgtagcagctgcgcctcaacggggcaggtaggatcacagagcatggacgccatgcaaacacaggacgaatcgacctgtcccgttgatgacatcactcagcggacaccatgtgagctgcatattcctttcaagaacttatcaataaaggtaagatttagccattccgctagttgctgcttatatatgttgattactaataaataatctctcacaacatgaaggtggcgtcgggcatggccatcccaacggacccttcaggtacttaccactgcaggccgattccagcaggatactcgaaggtcgaagttgagttggtcgaaggcgcgtacgaggacctcgagctggattaccctggaggagacggtgagacgcatctacgagacacatgccatgccattattctatggcgcaggcggtacatcatcctccctgggcgacaagcggcgtctcgtgcaccatctcctccggctccgccatctcctcctcaggatcctgcaccgtctcctcctcatgctccgccagcaccgtctccacctcaggctccagcatcgactcctcctcaggatcctgcaccgactcctcctcgtgctcctacacctactcccccgcaagctcctcttccggcaccttcaaagtcaggggccccccagctccaccgcctgcccacacaagggcaacgaagaaggcgaaagttgacgccgccaagaacaaggacccggggtacgattgcacgcaagaggagcttgacgcttacgttgcatcagaagtcaagagacaattcaagcctcgaagtccagaaaagaagattcctatagaccccagtgtcaggaacttcttcaggggtatgtctgcatctgtcaaggaggccatcaagctatcggactatgagcgaacgctgaagaaagcatcttctggaaagtccaaaccagtccctcagcttggagagcaaccaaaccaggagatcgagccgttggtgaccggtaaagaaatgacgatagaacaatttattactgacaccggtctaactacggatcaattgctaggagtcgcaccaatcgaaaaggcggaagtgaaatacatgtacgaactcggtaaaccgcttgtcaagcctgagctgctgcagtccctacccacacaaatgtacaagttccatcagctgtacatggagatgagcgccaccggtagagagatgatcggagcgaggatcagggacacggacttcttgcaaggagatgacattctctggatcaatttcaggggaatctacgaactataccagctggacgccctcgacgtctctattatgagttgctggattttgtaagtatatcgttcagttagatttcttactatacgtctcctttaactaattaggtcattgtatataagtagactatagaaaataatatactcccttttatcgttgtagaatggagattcaaagggcccgacggcggagggttttcgatactggattcatcgaccctcggaaagtaaacgtcgcaatgctcgaccaatatccaaaagaaacagaggacaatctcgtccatctcctgaaggcgcagcattacaagacgttcatactgttgccatacaacacagagttagtttaattttactgtcttcctacataccaaatttcattcccgtacgaacttgctaagtgtttcatatgtaatgcatcccacgcacattgcagattccactgggtgcttttactcttcgacctggaggcctgcaccgtcaacgtatatgactcaatggataaaaaagagtctacgtttgacaaggttttcgaacttatagacaggtaccgtcataagttcctttgttaattaagaaaatcttgttatgttaattgctactacgaatcatagctttaaactccatgtagggcttggtatcggttccgtcatttggtccgcggcaaatggagagaaagacttaggcggaagttcaaatttcctgtgagtacacatgatcaacatttatatttctccgattcaaatacatacaagtgtatattaattagatctctcgttgtttgtcatttatttgtagtgcgcaaagcaaaagcagggaactaacttgtgcggctattacgtgtgcgagtattgccactgccttgcagaccaaatcatcaccacaagagagctcgatgtacgtacaaataaattcaaaatttcattacgtagcgatttcttgtttaattactaatcaatttcatacattcatatagtttattcgcatgagggataacctgaccacacacaaggaatttatcgcggcggttcaagaacaactcatgggattcatcaacgaagaaatccttgatcccaagggtgaattctactacgacggaaacacaattcaccggtccttagcttctgagctagcagcgagtactactacgtcgaaatcgtagctagctaggacatataatggattgtaattaatacatgactacatatgtttctatatgcatgtgtacacattttctataatgtaaatatattttggtcatatatatatctatatacatatgcatttgcataacatatatatgtataaatacatatatattatgcatgtatatacatataatataatataatatatatatatatacatatatatatatgtatgcatatatatgtattgaaacatatatatgcatggtttaaccgggagtaccaatatccatgcaaaaaaaaaaaaggtcagctcgatctttagtcccagttatttcacccgggactaaagatagcgatctttagtcccggattggtactcccggtttggaaaccgggactaaagggggttacgaaccgggactacaaagggtttctccaccagtgtcctctgggtcgaaatccacgaagtaaacttcccagctatcgtcgtcgtcggcggcggcggtggcggcgccgttgctgggacggcgcggcttctcgtagttgaaggggacgaagccgcccttgccggtgtcttcgtcggcggggaaggctagcccgtagtacggccggcccttcctgtcgatgatgctgtcggtgaaggaaagcagcgcgcagatcgcgcagcagaaggcgatgaggccgccggagatgtagcggttgatggccaggcacctgccgtggttggtgaaggacggcgccagcgcctggaacgccagcgtggtgcccgtggggaggagcttcaccaggttggccgtcgtcgacagcgtcttgtcgacgtagtcgctgttgttcttcttgccaccgccatcggcatcggcatcggcgccgggcgcctgagccggcttcttcttcttgtcatcgtttgtcgggttagtggtggtcgacgacgcaccttttgagccctgggcgccgttcgtgcccatgaattttggccgtgcgcgctgctagagagaattgacagggatcgaggtgttggtgtgttgtgcagtcacaagaacgtgcgaccgcttcgtttctgcatggttgcatgtatatggtacaccccgcatttataggcagccacccaccggggggcagtgaaccagatgccaaaagcgggaaaggccaaagtgacatcgtgcgcatatatgtgcctaattggcccctggcaaacattctacttcaagtagcttgtctacagggtaatggcatcgatggtaagcatatatccgccacacgatatattgatcatcttttcatcatatgctttgcttgcttaattagccctagaaattgcatacctgctttagttcgaccttggatctcattgtacaggaacataccacgcgagctccataaagtgtgcttgcacatatctggcatatattatgaatatataataataacagctagccacgtacgcatgtgtttagtacaatatatcatctctggaaaaggtggatttgctatttccgtcaaaatctcacatctataaatcaaaagaattactccatccgttctaaaatataagcatttatgactaacacgatcttcgagatactattttgaccaacaatatctataaaagtaaaatatttcaaataagaagagttgcatattacgatattttgtttaataagaaatctagtaacatcaattttacatggttgatctttttttattttttttctattaatagtcaaagttaaaaatgtttgacttgtcattatgctaaaaatgcatatattttaggacggagagagtagtatatatattcttgcgagcaattttatagtacttgaggaggtaccactttttctattgtaatttggtaccttttggtatctaggtactaggaggtaccaaattttaccctaaatttttggtagcttatggtacctccacagggaatgtaaaattactatggttcgtaaaatccatctatgatatggtattttacacagtaatcgtgatctctatcaaaactacagacactaagaagggaatctctcccttgtgcccgaaacacatggtaattaaatagtgaaaaacactcggtaattgtcactaccacatatcctcacatctattatctatgatgggcttaagtgcgccgctacatatcacgtgtctataacgagtgacattcaagccattagggattagcactgatctataacgactccagttatatggagttgttacatatgtcatctaccaactttgtaacagtttaagttgaggagccgttacaaacgagcccctcatgattgtaatggctttccattatgagccattagaaatggttgcacctcatctgtaatagctcctgtaggagccgttacagatgtatctcctatccgtaatggttccacacattaggagtagttctagatgacttttaggccggtctagctaaccccaacttaaataaaagaaaaacctggccagcccctcccttgcctcacttctccttttcccctccctccatccccatctccgtcaccgacaccaccccccctccccccagcactctcctcccgaacgacagcagccagtcatcgtgttggcgggcctctccttcctctcctcttcctattttgaaacaggcctaccgtactactacctcatgaactctctctctctctctctctctctccacattgaaaggaagcaagtaaaggcaatggtgatgaccggcaacgactgcagctccccgtagctcaggatggtggatctaccagcgaaagatcctaacgacggtggtgggctagcctcggtaccatcagagttgacggtggtaggcctcgggaccgcaagatctggcagtagcaggcagctttggtgagcctcagcaagtggaggactcggcggcgatgatgaaggggagggtgacgacgacgtcgaccacaccgccacagggatccagcgctggtgagtctccttcatcatcaccaccaagtccataccagtgctggtgaagcgcctcccccagttgctcgaccaccgtggcggctcgggcgtggtaactcagacgacgacgatgtaagttcaagtgcaattggattagttttggtgactaatgccaaatccaattatatgatactattatcttttatatataaacatttattttgcatagtctcaattaatatgaaaaataaaaatgatgagaggtacgtgttaaattcctcgtgttctaaattatctctctaatggttcccaaatagggtgaggaactctaaatattttatattggattgtcatccatcaccaaaaaggaaatgatcatattttatattggattgtcatccaacaccaaaacggaaatgatcaaaagatctatggtcaataatgtgtaaatgttgttctggtgatttatgacaaaccaggttactgtgacttacttttttccatgagttggcaaataggttgttctcggatgtcatatgagttgggatagaaatgtatccattgatggttgactttaatctcaataaggatgaaacacatcgaaatcaagctatactctctttacacatgctttcttttcttgtataggataaactcccatggattcatcaaaaattatgcatacacctatttcactcgaaatattttgtatgcatatattttgggggaagtatatcttatattttattatgcatgtgtgtgatccaagttaatcaattttatttaattgagatctttacatttgtgtatatgtgtgagtatatgacatttgtggtgttgttgattttcatcaatttattcatatcattttatatgcgatcggttggtcaacaagtggaggttgactaccagatcattgggactaacagttttattgagttgaatgaaagaaatagataccaagaaatgaaaataatgttgatgctcaagtgagatcaagtcactgttggtatttcttaacgacgttactagaaatataattcccagcaatggcgcagaaatacttctggtatattatggttacagagttcatccgcaagcacacgaatataccattatagcatttcacccgagagtattccaagggtatcgtatttattttatcacgtggaaagatcatgtagagagaactcaactaataatttatatattacttgtgataatcatattctaagcaggggttatgataatccaagggtagagtgacacacaagcttttctacttatcctcataataaataatctaagctaggtggaaagaaaagagaaagagaatctattcctatacttctaatatacatagtatacatacattctagttaactgatatactagctaataccatttatccgatgccttcctggtacttcgagaagccacccctgactgtcgagttctttacgacagcccgtcatgaccatccaaccggggctaaatacagaggaataccctccccaggaaattaactaaggattatatataggcacggaggaatactcgtactgagctgtcaccatcagcggcccacctctcatccgcaatatataaccccaaataatgatatcccgtaatctagacaccacgtctaaattaccagatactactctaatatcatcgtcatgatatagaataattgcataagcaaacactatacctgcaccaaagcatatcccagataagctagcagtatattcagtataacatgaacataatataaagaaggtactcatatactcggaaaatatttcaataccagaaatgtatctagaagagtattctaatgaaagtacaaagcttacaaaagaggaaaggaaagctactagagccatacccgaactcttccgaaggcttccagactcctgattcctattctaattctattccaccagctagatactactaaactaaacttgagaggaatgagagagctcttgcttgaggtgtgtgagtgaagtgaggagaggagctccttaaataggctgccaatgacggttgtggtagttggaatggtcggaattgccctccaaccgttattggggagtgatccatgccgtccagccaaaacctggatccaacagcgtcaagggaggttcggcccaacctcccctgataatatctaacatatttatgtattgcaagcatcactagttctcctttattttgataatattgatggtcgaaactgatcgataatgaccatcaacagtcacgtatgtctcaagatgaagagctgaaacatgggaatcatgtgttgatccacatcaacagtgattgatatcgtcataagttgaaaggcatcaagtggctggaagaaatgaatgtgaccaaacatcataataaatgaatgtgactaaacagagtggtatgcgttgtccagctaagtccacaagaagaagcacaaggcaaaggtataatgaaactaagcatcctttttcaaatcctttaccggtctcggtgtttttaattaaaatctggattgagtataggaatgttgtactggtaagatgaatacaaatgtgtttgcttaagttctcaaaatgatttatctttggacaattgtttatgatggatttgatagccctataaccaacctttacatggaatccaagatcatcaaaatcaaactctggagtaaaaagttcttatatttttatcttagcaacatcacactatccgacctctatcggactgtctaatccatttgagtattcgtgggaggaacttggttctcagtctggcttgccatttaaaatcggagtttcctatgttgggatcaaagtatccgatctagttagttttatagacctgcgatagaatttttgactgttagaggcctaactccgaggtaggagtaagtcatgcctgattttccttcagggatttaaaaatcatttaataatttatttctagaatttatattaaaataaaaagaaatttacaagtgaagttaattcagaaaataacatttcctttaataaatcatgattgggaatatttttctcgtattatccatgccctaaaataattaatataattttctcagaattttcagagatcaacatcaaattttaatagcacaaagtccatttcagagaatatttaaattgaaaaaccaattaaaagtcctcatttccaggtgggccatcatttccgacccactcctcatcgcacgtgaccaatagtagtctggcccacccgctcctccttcttcccctctctctcgcagtcgcaggtcgctcaacatctctctttgtttctctttccccatggcccagtcttatttgctagcccaactcctaactcagcacgccccctccttttggggtcaccaacctgtcagcccatctcacccacacccgattcagcctttcctcccacctcccacgccgggcatgcttggcttgcctttcctcctctcaatgataggtaggaccgaggcccacctgtcaggctcatttcctaccactagccgaagtcgacgaccgctgtagctcccacgtacccacctgatccacgagccccgctccttccctcactctcaaacaacgcaaatttggtcatcgccatattcacacccacatccccctctctcccgacaaaaataggcgctgacttgagcccacaccctgcccacatcgccacctacatctactgacggttaccgcagctcccaccttgttcatggcccctcaagcctataaaagggaccactagacatccccccccacacacacaccttcacgagctcgccgcaccaaatattgtgttccccatgctgcgtcctcgctccgtcgcttgttgccatcctctgtccaatgctcaccgccgccccatgccacttgtgtcaaaagctttgccatgtcgaggagtgtctcaaccgcctattcctcgaagccaaccgctgccccgaatggcttattcctcatggaggagagctctgtcacaccccaattttcttttggggtttaaaaatcattaaataaatcattcctagaatttatattaaaatttaaagcaatttacaagtgaaattaatgggccgtccacgcgtgctagtcatccgccatgcggttgcagcccctgcgcatctccatgcgcccagagagaaggccccgccaccaccacagtcgggtgagccttccgttgccgccagccgtcacagcccttccgccattgttgctcgtgctgacctccttgccactggctgctacagcatcccgttgccaccaaccgccagggcctcccccgtagacgtccgtgtaggcctcccactgctgatgctccaccgctccagcaactccggccaaattcagcgtggatgttccgtatccaccagtgggactagggcatcgggtctggctgcgcaggatccagatttggctattgatgccccactccctcctcaagcttggatgccttggccaccatccaaatcatctgatgggggccctctcaccgctcctcgccggatcaggacgagcagggcctggatctaggcggcatcacctcttcatccttccttgagagagaggggaaagccctgatgccgccatcctcatggtcggccgactttgccgacgtgccactcgagcagcggcaaggtgggaggaggaagaaggagaagcggcggcggtgtttttcggtcgcttcttgtgtcgctctagggaggaagcgacacgagcgaagggctccagggtggtgatggttctagatggtgcaatcggtcgaggaaacatgaataatgaaatgtagggaatgaaggggattctaaaggagagagttattttaccatggtgaagcaggggcgaaatgtggccgatcacagtggcggtggagaaaaaataggactgcatgctcctggatgccaattaggtgttcaacagaatgtccagtacttgtcgcagaatggtggagccgagctagtgtaagggaaggttgggcaactgtggcgatggtcttttggaagcttggggtgtaggtggatgaaggaaaagagagatgaggcagctaggtggtggtggttaggaaggtgaccatggatgctcgcttgagtttgagctcggtttgggccgagacacggagagtttgggaatttggtatttgtaggctacgaaggcttgcttgagaagatgtggaatggggaggcaacgagacggtgggttccacttgtcggtgacggataggaagcttctggattggattgatggtgaggtggcgtggttgtggtggtgaacaaggagtgttgggtgtccgcttcttggtgttcgatgcaatccattggcgccgaggagggggttggctactcgaccacagattcactgagcggcgggatggacggtgtggcgagatggcgattcttggtgttcgccgttgagtcggcttatccggtgctgtagcaaggtcaagcggggctgaacagtgacagaggcgctagacttctgtgcagaggaggagacggcgccagaaggaggtcgcgcgtggtgttttgggtcaacgatctcgcagcggcagtatggctgagcgggtccgcgcggtggcagtgatgcgggaccagcgacgagacacaatgctgaggcagggccggccgaggtgaggaggcgcggtgatttttctacggagcggagggtgctgctcagtgagatggatattcggtagtggcggcatgctgatctgttgtgttgatgtttggtcagtgatgtgctgtggcagcggggccggggatgagactcgatgacgaggcgagggagtcaaaggaagaacatcagcgagggggatatgggtggtgattggtgcagcacatggggaagggcgatgcagcttggcacgtcacacagtcgggttcgacctgtgttgacgcgaaaaacacacactggcctgggagatctgcttagctccagtacagtccaaaggttgataggatgcgggcgtgccagtcaatttgaccctgcaactgacaagatatacaaatagcagatcaatgagccgatcggctgacaagccaatggagtaattccagccgatatcgatagggttttgagctattggcaatatatccaatgtagataatgatataaaggcagttggctgatgatgatgcaatataacaataatataatccagtagaaaaaccaatcggctaacaatatgatatcatagaacaagtactgatccgatggttaaagcatacatcggctagaggtccgatatcataaaatccacgagattagataaatcaatgaaacctctgttgtcatcggctaaatccaacttatatgtatatgcaatccttataagccaatgcaacgtccaaaaaacttatcggctagtatcctgataaaacactagcatgaacctaaccgatttatattatcaacaatctagtaggtcgaacctaaccgatgcagcacaagattgtatatgataatctaatactcgatgagccaatagatctgtctaatgtgatggatagaacaaatctatttacaacagcattgtgattgtagagatatgtcggctaagacagaagatcagacctaaccgagacagttccaactaaaccgatgtgtctctaaacataatgcaattagagatagaattgagatatcaggtaggcaaatatatcaaccaaaccagagcgatccaagagatcgaagcgatgcagccttgaacaacaccaacgtagccaatagattcactagggccggcggaacgtaggacttaccccttcgccggagattgaactgaaccgatgcagccccgcgtcaggtgccaaattccgccggatgataagtaaaaacctcgggaaagagggtggcgatgcgccgagagtagtattgatcgagagatgatttacaatgacctcgggtgtacatatttatacccatgggtagatactagtccttataggacaagaaagaaatttttctaaagataaaaggaaaacataaagtccttataagacactaaacacactttcctaaagataaaaagaaactaacaaactattcctaattaatagataacttggcatgccgcatcctccttgaactcggtcacttctggataagcttcatttgataaattaattttcttaaccgaatatagcaggaatccaactattgataatgtgataattctcctaggggcttaccaaattttggcgttaacaacttggtgcgaaagatggtggcacagcgcgatgctggctcgagctcggccgagaggagcggtgcggggtcggccgagagaaacggcgcagtggggcatagcgtggactggcccgttgcgtgcgacactgctggcgcgacgcggagctgcccggtcgcattgcgtggtgcaacatgctccgtgggatcaatgagttggacgaatggcgttgcacaagttcagtagtgtgcagcagccacgattcggggaggtgcatcgtgcggtgtccgcgtgcctacacgataagatctatagccttgtcttttaatccctttcttaatcaccaagcagtccgcatgggcctagggcactcggcccaccccatgcttcacggcccaaggccttgccgtgtgtacctgggtaccatgtaccgcacaacatgaaacaagtgaaatcaaagttgacggagcgtggggctcctcaccgggagaccgcgcgggcccccctttgccggttcggccaggggcgctgggtgaggttctaagcccttgatctgtggaatggttcgcgagagagcaaatgcgcaagacacgggcgatgtagacaggttcgggccgctgagaagcgtaataccctactcctgtgttctggtggatctgtgtatgaaggagttacaaagagctggagagcaagagagttcaaactctagagaccctctccctactctttttccccagtcccctctacgagctcaggtcttctccagtctttttgtccgtcccctctcttggtaggcatggtcctccttttatatctcaaggggataccacatacaccatttctacctaccattcttttgggtggggacccatcctactttgaccaaaacttggctcgtacctttgcctgacaccgggataaccctgtcctccctcattaatgggcggagatttgcaatggctgttgtccgaatgaccctccgatgggatgggtcataccaacctccactccgccggaagcaggtgcaacgtggaagcacggttgtttgccgatgacgcgaccggcgtcagaccagtcacagaccggtcattcttgtccaccacgtgtcagtttagcatgctacacgtctgcccttcttcatacaatgacttccttgcaatggttgcgatgaagcctggaatgtatctggccggggctgacgtgccaactccaggagttcccacgccggctccggctagggacgagtgcctggaggctctcatcattccgacgggacggggcgaggcgtgtgtcaggccgcctgttgccccctaacccgcgatctgaccggtctgtgaccggtcacacactgtgaccgatcacggaccggatgagtgtgctgcgctacattaaatgcggcgtggggcgctcgtccaacccgcaataaacgcggttaggtgagcgccgctgtgctcacctaacccacacacgtggcgccaaaccctcagggg

SEQ ID NO: 4702 - DNA, 28732 bp, Oryza sativa
tactccattagatggagggatgccgatcaaaccacaaagcaggacctgtatcatttatgtactactatgagaaaaggagcatgccacaattttggactgataatgaagtcagaacacaggatagatgcagggtgtacattagaccagaaagcagaatctgtatcctatctgccattgccttgtagattgcagtagtgccataatcacgcaaaaaaaattcagatattacggatgttggaatttaattttctaagaaatgcaggtgtattttcaatcatacccattcaattggtgtaacaaatacaaactctactttaaaatatataagaacatttcttattcaaaagactatactaagagaaacttaagaagggtcgccataagcagataaattgtatcataaaaacatgccacacaccatgaatccgaggaccaaaatgtcataatggtaggcagagggtttcttcaagttaaactctttttgttgcgccaattgtgaagccacgctatgatcaaagaagtaaagtcctgcaaccatcaaagccggcagaatggcagcaaatatgtatgctggaggaactgaaaacagatcctgaaaataaaaaaagagaagatattattaatgatgccatgcaaaataagctgtgcgaaacttctaaaattgaagaccataaatattcacatctccagtatcacaagcaagtttgactaattacttttgctaccgtccaatgttgcagtgaactcgactcccagggaagtggactgaacagcctcctaggaactcctgaaggaacatcctttggtaacgtgtacgagaatgctgtccaaacaatcaccataagtgggacaccataatcagcaatgaagcctctgagccaccctgcaagtgtcaactcaaacgcacaatgatcagtgcacatacatgtgcttctcaatggttacaaattataatcatggagccatttacatactgatgtagcatacatagtagtttttttttttttttgaaataaagcaaaagctttgccatgtatatattagtagagaagatagtagtaatttcttgtttttgtttctaaatgttaaaactttcaaagagaaaaaaaactgtgcagcaactatccacataatataaaggaataagaatctgtcaatataagttcattaaaaaaaagaatctgtcaatataaaggctacaaaacaccatctcaagccaagccgtctactcaagaaggaaaaaaggagcccatatggtctggtccaaagctgagaggctcacaacacaagcttgtagcccagcacaacctaagcctgatctaaagcaggcccagtccaaacttcaacacagctaaagaaatgtttggcataaatctaacggttggatggatgattaatggaacagttgttgctaatttgattacccagagttcggtttgctctcaaaattggattcatgagataaaaataagatgaaaaagtgaccaaccttgaccatacacccatgaccttgcccttcttgaccttaatgcagtgtataacagcccaattgaaaagataacaccaagcaggccgttgacatacagccactggaattgatatataggtgaactatggtctgcatctctaggcaccttgaattcctctataattccctgcaatagataggccctggtctaaatattttcttccaagatagaaagaactgagcttattagatatagcatactttaatggcttgttgcaggaacagaacagtaatcaacatcccaaaaagttctcctgcaacccttgtaaacctgctaataacattagaagcattgaacattgccagaagaaacaacatgagcgcagtccagatgcagaccctgtcaacagtaggcaaatcaggagagcattaactttttttctgaaaagctaacgtgatagtattcagattcagttgttaccatccagcccatgctaaatacagtcgttcccccagagcttgctggttcttggcaaagttgtagagatacgtgtacatgattatagttggctctgcaactccaactatcaacagaggctgccctccaagaatggaatggatgatgccacatattgcagtagatgccagtgtttctactgtggtgagtataccatctgaaatgaaccacttttcttttgttagagatgtaattaaatactaagaacaataactcaagaaatagcacgactgtagcatagactcatagtggtaagaaggtaagcatttacttgtttctctgctcagttgcgctccgaaggcgatgactgggagggcagaggcaaagaagatatacatggtaggtgccaatatcctaacaatgcatcaacataagcaattcagaaatgaaattaacaagcaacaaaagcagggaatacacactcaatgaattaactgtttgaaacaaaaatcaacctgaagccagagcggaatccagcaacccagtcatgcttgtaccaagctactcggccttcgatatcagcgacgactcccttaaagggagtccttagtagatccatcagctgtacttagctcgagactaaacagaagctgcaatagtaattaaaattcagaaacagtacataaatattacatggattttcaagacacatatttttttgactgaattcaagacacacatattggcatataaaaacatcagaagccccatgtcgtctacaaaatttgcaaactcgggtcaaggcgtcaagctacctcaagacgagtcaaatcgagagaaacctcgaaacaaacttatagccatcaaaatatcagacgtgtgcttaattgcttggtgtgttacttatataacatgcacggtttgaagtataaatatttattttgcgtgtactacgtacaccgcaacataattttccgaacttttgtattcggaggagacgaatatagattttcaacatacactttctacgaagattttaccaaggtgcaaactagttcgacacttgcagcacaactttttagcgtcagtgccacaaaccacttcaaaattgtcgtcaggtaaggtaaccgcggctagctagcttacaaacatgtccgagtacaaccgtacgatccaacacctcctctcatccctcatgcgtggtggggctcggtttaagccagatacatggaaaaccaatggcacgcagtaaaaaaaaaaaaaagcgcaacgctacacctactaattttttcttactaaaattttgatcatttgatttaggtagatagaagttaaaaaaaattaaatgcacacatagcatgacacaaccgtgttactaagagtttagtaagaaaaagttagtgaatatagcctttttcgaaaagaaaattcgaaacacaagttactcatcaattaataggcgataaaaaaattcagaaaacagaaaaaaaaactcgagaagcagacatccaaactgcaaactcgcaaagttttgacagaacaacttgtagtagatccatttgcaagcaaccccacaaaccacatcccggcagccgccgcaccttgcgaacaaacaaacgtagcgttcctcgaagaaatttgccaccgaaatcgatcaaaaaaaaaaacagccatggaaaaaacccaaacaaatcccccccaaacccagcgcaaacaccggcaggcatgcaacgcacagccaccaccaccagtccaccaccaccaccaacgcgaccaaaacccaaacccaaacccaaacctcgcagttcagttcagttcgaaatagagcggacacagtgcgaaactccaaacaccatcactcacatcagtcgtcgagcaaatcgatggcgcgcgtggcggcggcggcggcaatgctggccgctcgacggcgcgggagcgaaaccctagagttggagggtggtggcggagacgcgggtttctgcgccgccgcggcgggggagggggtatttataatcgagggcgaatcgaatggacgccgcggagaagaagagaggaggagaagccgcggcggccaggaaaacgaacacgtttacctagaataaaaataataaataaataaataaattcctccattattttctagtactacgtcgtcactctctgacatgtgggcccatgtctgacatgtggaggaccacaaagagatacgcgtggggcccactagcgatgacgtggcggggatgggaggctctgccgcgcatggtagcagtagccgtgacaaggttgaagggtcagcggcttgtggcccgggggtgtatgtgtggctgcaggtggggccggatggtggtgacgcgtcatcgtccacccaggcatccactgttgcagggcgccgccacgtacgccgcggcccaagggacacaccaccgccagccaccgcgcatgtggttctcggtttctcgtcaaattaactgatgacaagctaaattggaagttttcaaaaacatgcaaagttttttcttgagtaaagtgtatagccggtccctaaacttatacgactgtgttatttgagtccccaaactctcaaaatgtatattcaaatcccaaaacttgttaaattgtgtcaatccgatcccaaactaccatgacacctccaggatcctacatggcatgccacccggacaatgatgtggcagcatcacaaattctacaccaactgacaagtgggccccaataaaaaactttttttaatatccttttttgttcattcccatcatgtcctttcttcgtttctcctcttttcttcctactgcattgaccgtagccatggcctctggtcgagctgtctttttgatggcatgaacagaggtgcgtccgtgggcaagaaggcaccggcgcagcagccgcgtcgacggaggcgctgcaacgtgtgggtagcggcgccagcgcagtgatggacgcggttatgtcctgggcatcgaggagactctggccgggagcggcgcgactgcgtgtggctcggcacgtttaccggtgaggccgaggcggggcatgcctacgatgttgcggcacagtagttccgcagccgtgacgcagtcgccaacttccgcccctcgtcaagtctgacccgaaggctgccgtcgagctctgtttcttcgcctcccggtcaaaggccgaggtcatcgacatgctccgcaagcacacctacctcaaggagctcgttgttgaaacaagtgtgccttcacctccatctctcatcacctgttcgacaagacaatgatcccgaagcaaccaaaccccgaagaggccgcgtcgccgcctgccgccgccgtcggtactggtgttgcgcatggtacacggcctgctcaagaacggcggcagtggcgttgtcatcgccgcgagggtggcgaggttggtttgccgttgcgctcgtcggcagcggagccgttctggccgaagcttagggttattgccgctgacttagacttcggaattcgtcgccatcgtcgatccttgtccaaaattgaggtcttcctcatcttctctatgccaaactccccccttcccctctcctccccgagccgtcctgctatcggagctcaccagcaaggtacccgtgtgctgcggtgccgcctacctgtttggccgccattgtgtcagcacggtgcaccgccgctgggcgtccctgcccaagccgagaacacctccggctccaagtcgacgccctgatgctcctaggcagccgtgcccagtcggaagctcaccggagcgccgctacttcgcatgcccccgccgcttgtacaacaaaaaaaaaagagaagagaaaggacaaaaaagtgaaaggagaaagagaaaagggaggaaaaaagagtttttaagtgggtcctatttgtcagtcaatgtagaggtattgatgaggccacatcagtgtccgtgtggcatgccacatcagcgccgtgtaggatgctggaatggtggtggctatgttggaccgaaatgacatactttagcaagttttatgacttgaatctgtattttttgagttcggggacccagatgggacgacgtcacaagtttagagaccgggagtgtagtttactctttttttatttagaaaaaatattggaaaataaaatttatttgaactttttaaagaatatttctatataattttttttttattaaaaaacttatcctaaactaatttaggaagcgtgcttatgacaaagcagcttagcgaagattatgtttaaaacacatcctaatcaaacaactggtacgataaattctgacactggtggagaaaccatctttcgtcggtcggccgaattccacaatagtcccggatgcaataaaaatcggggctaaagatgatctttagtcccggttcaaaagggtaacgggcatatttgatcttaacaccaaccgggactaaagatgatctttagtcccggttcaaatgctgtcagggcctgtcaggccccccgggatctttagtcccggttggtagatcgtaactttagtcccggttggtaataccaaccgggactaaagtctcacccctatatatatgtcttcttcctcctccagctgcctgagcaagcttcaaaatttcttcaaaaaagaggggaggtcatgctaaaatttctagtgaatttattttggtgattacatacaaatcggaggtgcctaaaaggtttgcaacttcatcctccaatatttttttgtcatattacatttgcagctatgttttgcatacttttttgtctccaaaaattagttgtaagttgatgagggagaaaatttgtgtggggaagaaagaatatatagaaatttagttgatttgctaaagaaagttttataaaatagttgagaaggaaaactatagtgaaaattaatcttgaatactagaaaacaaactaaaatgaaaattaaaagaagtaaaacacattaaaattagtttaaaactttagaaatagtaaataagaattatttggtgtaatattttatgatttttgtatgaataaagatatgtcattattgtatgactgttgaaacagtttgtaattatcttataattattgtatgactgttattattgtaagaataattatttttgtatgattttttttcgactcatgtagatggatcggcaatggatgtacgctgaccggcggtccaaagagtttattgatggcgtgcactattttttgagagtggccgaagctaacaggcaaaggggttttatttgttgtccatgcaataagtgtaagaatcagaaggagtattctgcatccaggactattcatttccacttgtttgagtcgggggttcatgccaagctataactgttggacatcccacggagagcaaggtgttgaaatggaagaagatgaagtggaagacgacaatattccgaactttgctcagtacgttggatttgaaggaaatcaaacgggcgaggaggaaagggatgctgatggtaacgacgttgcggatgattttggtcagatgttgcaggacgccaaggaggactgcgaaagtgaaaagggggcccataaattggacaagatgttagaggaccacagaacttcgttgtacccaggttgcgagcaggggcacaaaaagttggataccactctggagttcttgcaatggaaggcaaaaaatggggttagtgacaaggcattttgcgatttattgaaactcgtcaagaacattcttccgaagggaaacaaattgcccgagacaacgtacgaggctaagaagatagtctgcccgctaggactggaagttcagaagattcacgcatgtccgaatgattgtatcctatatcgtggtgaggagtatgagaacctagaagcatgccctgtttgcaaagcactacgatacaagattagacgagacgatccaggagaagttgacgggcagctaacaaagaagacaattcctgctaaggtgatgtggtatttccctataataccacggctaaggcgtttgttcaggaacaaggggaatgctagaatgatgcgatggcacgctgaagagcgtcaacaggacgggatgctgagacaccccgccgatggttcgcaatggcgaaacatcgacagaaaatttaaagaatttggaaaggacgcacgaaacatacggtttggtttgagtacggatggcatgaatccttttggagagatgagcagcggccatagcacttggcccgttacgatgtgtatctccaatctcccccctggctatgcatgaagaggaagtacataatgatgccgattattattcaaggccccaagcaacctggtaacgacatcgatgtgtacctaagaccactggtcgaagatcttaagctgttgtggaagaaggaaggtgtccccgtatgggacgaggacaaacaggaggagtttaacatacgagcgctgctgttcgtaaccatcaatgattggcctgcacttagcaacctatccggacagtccaacaaggggtacaaggcttgcacacactgtatggatgaaacagaaagtacgtatcttaagcactgtaggaaggttgtatacatgggtcatcgtcgattcctcgcagcaaaccacccggtacggaagaaaggcaagcacttcgaacataaggctaaccaccgtatgaagcctaaacattgcagcgggaaaacaatgtttgctatggttaaagatcttaaagtagtgttcggaaaggggcctagaagccagcctatagagagcgaagatggtcacgcggcgatgtggaaaaagaactctatattttgggagttaccctattaggaattcttggacgtacgccacgcacatcggtcccatgatccccagccgaccattcctcctgcaatggtgagcccgtcaggaaaccgtagcagctgcgcctcaacggggcaggtaggatcacagagcatggacgccatacaaacccaggacgaatccacctgccctgttgatgacatcactcagcggacaccatgtgagctgcatattcctttcaagaacttatcaataaaggtaagctcgtagtttatatattttagatttggccattccgctagttgctgcttatatatgttgattactaataaataacctctcaccacatgatggtggcatcgggcatggccatcccaacggacccttcaggtacttaccactgcaggccgattccagcaggatactccaaggtcgaagttgagttggtcgaaggcgcgtacgaggacctcgagctggattaccctggaggagacagtgatacgcatctatgagacacaagccatgccattattctatggcgcaggcggtacatcatcctccctgggcgacaagcggcgtctcgtgcaccatctcctccggctccgccatctcctcctcaggatcctgcaccgtctcctcctcatgctccaacaccgtctccacctcagactcctgcaccgactcctcctcaggctcctgcaccgactcctcctcgggctcctacaccgactcctccgcaagctcctcttccggcaccttcaaagtcaagggccccccaagctccaccgcctgcccacacaagggcaacgaagaaggcgaaagttgacgccgccaagaacaaggacccagggtacgattgcacgcaagaggagcttgacgcttacgtggcatcagaagtcaagagacaattcaagcctcgaagtccagaaaagaagattcctatagacccgagtgtcaggaagttctttaggggtatgtctgcacctgccaaggaggccattaagctatcggactatgagcgaacgctgaagaaagcatcttctggaaagtccaaaccagtccctcagcttggagagcaaccaaaccaggagatcgagccgttggtgaccggtgaagaaatgacgatagaagaatttattactgacaccagtctaactacggatcaattgctaggagtcgcaccaatcgaaaaggcggaagtgaaatacatgtacgaactcggtaaaccgcttgtcaagcctgagctgctgcagtccctacccacacaaatgtacaagttccatcagctgtacatggagatgagcgccaccggtagagagatgatcggagcgaggatcagggacacggacttcttgcaaggagatgacattctctggatcaatttcaagggaatctacgaactataccagctggacgctctcgacgtctctattatgagttgctggattttgtaagtatatcgttcagttagatttcttactacgtctcctttaattaattaggtccttgtatataagtagactatagaaaataatatattctcttttatcgttgtagaatggagattcaaagggcccgacggcggggggttttcgatactggattcatcgaccctcggaaagtaaacatcgcaatgctcgaccaatatccgcaagccacagaggacaatctcgtccatctcctgaaggcgcagcattacaagacgttcatactgttgccgtacaacacagagttagtttaattttactgtcttcctataccaaatttcattcccgtacgaacttgctaagtgtttcatatgtaatgcatcccacgcacattgcagattccactgggtgcttttactcttcgacctgtcggcctacaccgtcaacgtatatgactcaatggataaaaaaagagtctacgtttgacaaggttttcgaacttatggacaggtattgtcataagttcctctgttaattaagaaaatcttgttatgttaattgctactacgaatcatagctttaaactccatgtagggcttggtatcggttccgtcatttggtccgcggcaaatggagagaaagacttaggcggaagtttaaatttcctgtgagtacacatgctctacatttatattgctccgattcaaatatatacaagtgtatattaattagatctctcgtcgtttgtcatttatttgtagtgcggaaagcaaaagcagggaactaacttgtgctgctattacgtgtgtgagtattgccactgccttgcagaccaaatcatcaccacaagagagctcgatgtacgtacaaataaattcaaaatttcattacgtatcgatttcttgtttaattactaatcaatttcatacattcatatagtttattcgtatgagggataacctgaccacacacaaggaatttatcgtggcggttcaagaacaacttatgggattcatcaacgaacaagtccttgatcccaagggtgaattctactacgacggaaacacaattcataggtccttagcttctgagctagcgactactacgtcgaaatcgtagctagctaggacatataatggattgtaattaatacatgactacatatgtttctatatgcatgtgtacacattttctataatgtaaatatattttggtcacacacacacatatatatatatatatgtatacatatatatatatatatatatatatatatatatatatatatatgtatatatatatatatatatatgtatatatatatatatatatatgcatatatatatataaaccctacagcaacagagccatgaaaaaaaaggtcagctcgatttttagtcccggttggtatatctttagtcccagttatttcatccgggactaaagatagcgatctttagtcccggattggtagtcccggtttgaaaaccgggactacaaagggtttctccaccagtgtgaagtccaaccaatatccactttcggtcttgctatgagcttgacgaataaaattttaatatatacttttatttttaacgttttgcttttatatacatgcatagaaaagagttgtgaaaatatatctctaccctagaatggagatgcgggatcaaggcagtgcttcccgcgcagcgtccgcgtggcaccgttgctcccgcggaacgtccgtgcggaaccgtcgttcccgcacgcaattcctcgctcccgcgcgaccggcgcggtccagcgcgctcatgacgcgcggccggtgcggcaaacaagcacatatgcatggatgtgcatatgttgcatacatgcatgcattcacgttgcatgcagcgatgacggcgcggcggttccgcgtttccaggctgcgggatcgataggttccgcactgctgttttgcgcgaccgctggttccacaacccttatgcggtagagatatatttgtgcaaaatttcatcgcattggtatataaacacaaaataacgaagaaaaagatatattgtgaaattttttcctgggcttgaccaccatagacaaacggtgaatctatgccgaatgcgcttacttagctgcttccacgaaagttgccacatgatgccaatttttagcaacccagccaaagactaagaacttgtttggagtgaagctaattattttccaaccaaaattttagcggcctaaatagtattgcattgatgtttagtttgcttttttttccctcactaatataaatttatggtaccaaattttgtagtcgcagaaattatcaagattttagcaccatcaaaaaaatattaacaggggaaaatttagctccaaatcaaacaagtgaaaaaaaaaactttgtgccacactaccacacccctacagtgagagtgtgttcttagttcagcatcacctctacaacgtattctctccgtccataaataatcaatctaatttcaaatatgatatatcatattactacgaatctggataaaaatatactccctccttccctaaatatttgacgccgttgatttttttaaatatgtttgaccgttcgtcttattcaaaaacttttgtaaaatgtgtaaaactatatgtatacataaaagtatatttaacaataaataaaatgatagaaaaagaattaacaattacttaaattttttgaataagacgaacggtcaaatatttttaaaaaagtcaacggcgtcaaatattttaggatggaggtagtatgatactagcttgattttttttatgagtcaagtcaaaggaagtacttgtatttggaataaccccgagcggtagctgatttgaacacggaaagctgtgaaggtcaattagaagaaggccctatgtgcttgtctcggcagaataagattcacttgtccccatctccagatgacctgatcttcgcttggttgttccaaccgaaatccttgcagccaatcaaatgcccagaaaaaaactgggatattattaccgggaccgtcaaaacttcccagaagatagtattgtattcttaacccaagaacgatcggagtggccggcacaaattactgtagtggaattccggaagcttatgttgacacattgtcaatttgttgataacaaacaattactaggttttaatatattttttggaagatgtaaaacggctgtggattgatgcagaggtccaaaaatatcattctcgtttttcaaaaccggaaagtatttttctacccatcgagacgtcactgaaaataactactcaaatgtatggttgcaatcaaccaaaaaaacacccaagaaatgctaacttcggctatagggacttgatatcccacggtatccacaccctatagaggatcttagctatagcaactagctcatcatcttaagaccacaaccttttttttcctctgctattatctaaaattctaaaatttttgtttttgaaggatcacattttgatactttctggtagaagtgaacgaaggacttcaagccaagaaaaatgaagtgacctctaaaattgaagggacaagacttgctcctgaattgtactttatgtttttttttctttctgtggccggtaatcacttgtaattcaagcctgtaataaggcacaagagagcaactgcgtgctggccttttgtgaggttttcagttcgaattttgcatatttcagcgacagctagctggagttgtcagttaccattcgccagtaactattgtcagtcaccattcgccagtaacggctcaaattgcaaactatactctgattaattgtatatctaatgactgattaattgtgtaccttctctggactttctggtccctcgatgaatattcagtgggtacgaaagctctccccgcccggttatcctttcaggaaaagaatgtcatcgggtggacaaatcaaaacctaacctcttcgatcggatgaaaccttagccaaatgttttgttggccacaccttagctgattagctgagatcgaaaaaaaatctattacctatacctatactaatcaaacttcctgagagctcccggttaaaagaatatatgatcgttaatttgatgggtcgtataggttggcgactagttataacaatacatgaaaagtatggcataatataaccttgacaataaaacaaatctttcggaggtaattttttttgagtcacaagaccgcgggtagattattcaatttcagctaatttttatcctgttaattaatatatcagtcaataattagataatcagtatgtatagaaccccgtaatttttggaatatgtccgccgtttcatgagggtgagttcgtgcgtgttacaagcgtatgcatttataccgtgtttctaaaaagtttcttttaaaagtttgataatattttggcaaacgataataatggaccagacaaatcttacaaaatcagatgagaaacaaaatactcttccgcgatactcctatacgactatctcgtcagtttggtggaggtatgaaaacatgaaatgtgcatcagtttcttttatttttctttttaatttttaggaactgtgtaccagttgttgatgcgctataggtaaaatatctggttgttgtggatactcctatatggctatatagcagtactttacatagtgcggagtattacgcagacataacaaaagcgtacaaagtacaccgtctgtgacttaaattaggctctgttcggcaggagggattgggaacccctctcggcacgtaaaacgatgtttgtattaacgcgtaattaattaattaatagctatttttttaaaaaatagattaatatgatttttttaaacaactttcgtatagaaactttttgaaaaaaaaacacaccgtttagtagtttgaaaaacgtgcgcgtggaaaacgggggtgaagagctaggaacctggggatcgaacagagccttagtagagcgagtacaataaaatcaaagatcctttcccttaagaaaagtcgtgtgttctgctttgatcttcaatacggatatttggtcatagatacgtgacatggatgttgttttttctttttctaagtataacctttcagaactgtagacttatattttatttctactctatcaatacaaaacgtcacactatcttgtgcgtattatttaaaaaataaaattacatgagcgtgctatacaagttatcacatcaccagtgacgtatatagaaattttatatgggtgatccaacttatataaacttttttaaacaccctaaatgtaaccaagttagaaatataaattggtcaaatatgcataataatatatcaataaaaaaaactttttaaaagttttttttcacatgtgtatatatatatgcattggattaggattttttttccaagtgagcactaggatcacccctagattcgcacacgcacatcacatttgtgattacatggagaagagatgagagagaagaaaaacgtgctacagattcgtaaccagctacaacacattctgtaataaactatctgagatcgaatgaattaggtattaatgatgcagtatatatatatatatagctaataattatatgaatggattattaaataagttgcagatgatattttaattttgagtaaagtccatcaccagtccctaaacttgtacccctgtgtcatcccggtccctaaactcgcaaatcgaccgttcagatcctcaaacttgttcgactgtatcatcccgctccctaaacttgcagatcactcgtttaaatcctccaacttgttcagctgtatcacccagtccctaaacttggatttgaatatcatctgtgtcaaataggacggtgtaaagactttatatttaaaaataattcataacttttatgtgaactctaataaagacaaactttatatcaaacttgtagccctcgacacgatctacaactttgtagttgaattttttttattttaagtcatttttgttccaaaatgtaattttaaaattaaaatttcaaaatctataaatatgcaacaatattttgggaccctaaacagttttaattcaaaaaattttcaactacaaagttgtaggtcgcgtcgagggctacaattttgatataaagtttgtcttcattagagttcacatgaaaaagttatgaattattttttgatataaagtttttagaccgtcctgtttagggactggggtgatacaactgaacaagttggaggacctaaacgagtgatctgtaaggaccgggatgacacagtcgaataagtttgaggacctgaacgatcgatttgcgagtttagggaccgggatgatacaacggtacaagtttagggaccggtgatggactttactctttagttttttataaagttagtagttgattatattattaaaattgctcgtggtatactaagaaaagtaggagccttttacacgatatttgcgtggtactttgctgcgataatattttactgtcccgtgcaattaattattctgtgaacaattaaacaggaagtatatatgcatgagctaagcggtgacgtacggtacatccatctgttgaagttataagcacatgatgattcgagtactcgctaggcaaggcataaacagattgatcgtcctgagaattatcacaggccatatgcttgaattattgatgcaaaaagattgatcagtctgtggctctgtgcaatgagtgcggcacatgacattttctatgctgtcagtcaagaatctttcgaagagatacatgtagatctcattagtcaagatcacaatgttttacgtttttccgtttagcatgcaggagtagtagatatttgtaatgcaatacaaaattaatggccaaacgaatgagtggtcggctgtatgatctcacaaatcatgggtttttttgttctttttgcccctcaagagtaggccctgctcgtagtgctgcggattataatccggaatcattttgaatttttatggattggttttatggtttctttttatcaactttcattactgtcccgctctgcttttatgattgccgaaaagattgttattaaaaactaagaatttagaatcattatatactataaacactatataaacaaactaaacgtaaattaatcatcttcaccagccggcttgcatgtataaattcatcatgtacttcaaaacatatttaagaagtttaagattataagaaatagctgattcgtgtagtagtaagtttctgagaatttttttaaaaaaatgtgtttcttagattttgatttctagtttattttatggattctataattatagtttttttaatctaaactgtttggagagcttctgattatagaagttgtagtagtctggaaatcaagccggcactgtcttttattgagctgtgattgaaaataattttattacaatttattacatttttttaaagccaaattttaataacgagctagcgagtccaaatgaagcaaacacaactttcatgcaaaattttatcattttagttttatataagaaaaaaacatatcacttgacaaaattttgacttgtgcaccaatctcactaactgggccgatcgacagaaaagctatctcatcctctttttacggcccaatctcactaactgggccgctccacgcatacacgtcccagcccaaaaccctccctgcgtaaataggccgggcctaatcactttaagtgggccgggcctccctctcctgccgcttcgtcctcgccacctccgccacttggcgcgagattcctatcgcgcgcagacgcgccggctagctaagtcgcgagcgttttcggcccatatcctcgcgcacggcccactagctacatccttctttttctattttttcgcaacgaagtgcgcaggacttttagaaaaaatcgtatacgtaattagttatcgataattatggtatattaagctaaccattctttttttctcagcaaaaaaaattgaaaattttgaaaacttttaagtcgaattttgaacttttaagttaaaatttaaaaacttttatctcaaatttaaaaaaatttaacccgaatttaaaaactttcgacctaaattttaaaaacttttaactcgaatattcaaatcttttgaccgaaatttcaaaaactttcaactcagatttgaagactttcaactcaaatttaaaactttcaacttaaatttgaaatttcaagtcaaattagaaaactttcaacttaaaatttaaaaactttcaattcaaatttgataactttcaaatcaaaattaaaaactttcaattctatatttgtaaagagatatgccaaagattaaaaaaatcggaaaagaaacaccgaaaaagataaagaaaaaggcacccgtaagcaccaaaatcggaaaaaaaaaagtgcaaaaaaaaaagacaagggagctatagggtggggcagctggcgtgcgcgccagcaatttagctggcgcgtatgcgcgcagtagccaccccccacgtggcggatcatgtccgtcaggtcggcgtgcgacgacccggctttcttcaccgccgccctcgccgtcgcggcgagcttcctggcgcgcgcccttctcgccacgccgtccgcgccgccgtccatcagctcggccaccgccttctccacgccggcgccggtgacctgcacgccctcggcctcggcggggaggtacatgggcggcgccgtgacgcccgaccggacgccgacgccgagcacgtcgacgagcagccgctcgctgctgaactggtcgaggatggtcggccatgtcagcgccggcacgccgcgggcgatggcctccagcgcggcgttccacccgcagtgggtcaggaacccgccggtggccgggtgcgagaggatgctcacctgcggcgcccacccgcgcaccaggacgcccctgtccttgacgcgctcctcgtatccctcgccgtcgagccactccctcacggcggcggcggcggccttggcctccttgatggtccagacgaacggccgcccgacgccttgacgccgcgggcgagctcgatgacctgcttcgccgccaggtgcgagatgctgccgaagctgatgtacagcacggacgccggcggtcatgcgtcgagccaggagaggatacgcccggcgtcgacgtcggcgcggttgccccggttggccctcgcgtcggcgtccgtgctggcggcggcggcggcgcacgtcggcccgatggcccacgccctccggccgagcgccgccgcgtagccgtcgacgaaggcgccctcgatgtcgcggaacgtgttgatgacgaagccatcggcggtgcgctcggcctcgaccgcgtcgcgctcctcctcctccaggccaggccactggaagaagcggcggaacgtggccgtgtagacgacggcacgcaccgggaagtccggcacctcgaacggctccagctcgccgtcaccggcggcgagcgcgaggcggccgtacacgccgtgcttgctcaggttgtgggtggcgaggaggaagtacgccgacgggcagtgcatgacgacgcgagcgatgccgaggcggtcgcagacgggcgccgtccacgggttgcagtagtcggcgacgaggcagtccgggcggcgaggcagcgcccggacgagccgctcgagccgcgccgccatggcccagatggccctctgcagggacaggtacatgccggggtcggcgtccgccagctggtccatgttctccagcccctccggcacgccgaactccgggccggggaaggcgacctcggcgaggtcgacggcgaggccgtcgcggcgggcggcctccacggcggccccgttgcgcgcggcgttgacgggcgtggtgacgacggtggcgcgcgcgccgcgggcggcgagaaggcgcgccacctccaccatggggatgatgtggccctgcgctatcagcggcaccaccaagaaatggagctccgccgccatcccgccgccgatgagtgtgaggaagcaagcaagttgcagtgtgcgtatacaagtcgacgcgacgaggacgacgcctgtgtcgaggcgccgcgccgcggcggcagaagcctcctggaaaagtcgggagggaggggtgatgacgtatgcgcctagcgaagcttcgtcgtcgcccgcctcgtagtcttcacagctgcctctgtcacgtggactcgtggctcccaagtccaatttcaacaagaaagttttttttaaatgcaacaaacaagaaggtaattaattgagttttaattatttcaaatttaaacaaggatttctttgatattttagagcagtttttatacagaaagttttcacacgaaacgtactgtttagttgtttgaaaagtgtgttaacaaaaacaaggtgtgtttagttcacgctaaaattgaaattttgattgaaattggaacgatgtgacggaaaagttggaagtttgtgtgtaagaaagttttgatgtgttggaaaagttggaagtttgaagaaaaaaattgggaactaaaccaggccaaagataagattctgcgtactggcctgaaggcatatatattgccctctttgtttaggcttataagccaacttataagttgaaaagtctaagccaaaacaaacaagtagctttttcatttggcttttttgaagccataagctattctaacactattaagccaaaagctaggttggagaagcttttttggcttaaatgagatagatgtatgactccactactaaacttaggacattaaatccactggcttataaatcatataagccaataagctgacttaaaagtctaggccaataagcctaagcctaaacaaagagggcaatagccatctgcttggctttcttatataggccgtgtttagattcaaacctccaacttttccgtcacatcaaatgtttagacatatgcatggagcattaaatgtggacgaaaaaaaaccaattacacagtttgcatgtaaatcgcaagacgaatcttttgagcctaattacaccatgatttgacaatgtggtgctacagtaaacatttactctactagtgacggattaattaggtttaatagattcatctcgcagtttacaggcagaatctgtaatttgttttgttattagtctacgtttaatacttcaaatgtgtatccatataattaaaaaaaatttagcacacgaattaaacacagccataatgagtttaaatgttagcacttcaaatcacatgaaaccaaggttacccttatcgatgggtttattgcacagttgccatgcggcaattgcggtaaccacaacaaaccatagaagccatacaaaatttatcaaaatttcagactattttttgaatctatttaattttatttttggtaccctagcaataagcacagttaccgtcagttttataaatcctgcttggaagtattttcaagctgttcattgagagagacaatagaggaatatctcatactcctaccttcttttggaatttcctctgaccaatttcgaatggatagtatccatagttcttctagaacttccattactacacactacactcccattcacgaggtcaggagtccatagatgacgagtgaacatgcgtcactccaagttgaaagtttattttgctattttcttctccggcatgatcgctccatccggcaagttgatacaagcaaaccggccctccgattgtttaatcgtccacacgtcactctcctttgatccgaagctcattgactcaaacgccataaaacaacttcgccacaattcactagcaacaaaccacagccatggacgacgacaccgccggccacgcctccggcggctacacgacgacggcggcggcgcacttcgtgctggtcccgatgatggcgcagggccacgccatccccatgaccgacatggcgcgcctgctggccgagcacggcgcggcgcgggtcagcctcgtcgtcacgccggtcaacgccgccaggatggccgggttcgccgccggcgtggaggaggccggcctgccggtgcagctggtggagctccccttcccggccgccgagttcggcctgccggacggctgcgagaacgtcgacatgctcccgtccaaagacctcttcagcaacttcctcttggcctgcggcgcgctccgggagccgttcgcggcgaggctccggcagcaacggccgccggcgagctgcatcatctccgacatgatacactcgtgggccggtgacatcgccagggagctcggcgtcccatggctcacgttcaacggctcctgcaccttctcctcctttgccaggtaaaaatcgtagcaaaagccactggcatatttctctgcatatgaataagggtatcccgtcatttttacatgtcacttaaaaagtcatcaaaatattttaaaaaaagtttggtaggatagatcaatatgtgatatgtaacttcacgagcatgcaaattcaaattcaacctatacaagtggaaataaaaataataaatttgactatgaataggacgcgcaattcacggtcaaatttgttatttttgtttcgaattgtataagttgaattttaactcgcatgtttgcgaaaagatatatttatatattgatctatcttgataaatttttttataactttttaaacgacatgtaaaaaacgaggggatatctcctcgagggacaaaaatctactttccatatgaacagagaatacttactccctccgtcgtgtccagatttatagctaaaaatgcttatattctgggatagagatagtagaaggagatacttatcaggtatgtgatctaagaactcacagtttggatgtgacctaaggttgtgtttagatccaaagtttggatccaaactttagttcttttccattacatcaacctgtcatacacacacaacttttcagtcacatcaccttcaatttcaaccaaaatacaaactttgcgctgaactaaacacatcctaagaacttggtccaagtttccaactatctcgcagggacatcatttatcgcaaaaatctattggagaacctcacggatgatgagatcgtcaaagtctcagggttccctacgccgctagagttgccaaaagctagatgccctggaacactgtgcgttccaggtctgaagcaaataagtgacaagatttacgaggctgagacgcgaagcgatggcaggatcatgaatagcttccaggagatggaatctctgtacatcgagtcgtttgagcgaaccataggtaagaagatctggacgatcggcccaatgtgcctttgtcacagagacagcaacgccatggctgctagaggaaacaaggcgtcaatggatgatgcgaaatgtttgcaatggcttgattcaaagaagcctggttcagtgatctttgtcagctttggcagcctctccagcaccgaccctcagcagcttgttgagctggggctgggacttgaagcttccaagaaaccattcatctgggtgatcaaagcaggaaaaaagtttccagaagtcgaggaatggcttgcagatgggttcgaggagcgcgtcaaagacagaggcatgatcataaggggctgggcgccacagatgatgatcctgtggcaccaggccattggagggttcatgacgcactgcgggtggaactcgacactagagggcatctccgcgggtgtgccgatgatcacatggccacactgttcagagcagtttgtgaatgagaaattggtggtggatcacctgaaaattggggtggaggttggagtgaaaggagtgacacagtggggaactgaacaaaaagaggttaaggtgacaaggactgctgtggagacagcggtatccatgttgatggatgaaggggaagttgcacaggagattaggatgagagcaaaagattttggcatgaaggcaagaagggctttggaagagggaggttcttcctataacaacataaaactattaattcaagaaatgggaaacaagcaaaatgcatctggttgatacatatggaaataagctttattttttcttaattgtaaatctgtaagcaagaactggaggatcctattgtgcttaccctgattttcatccctcaaactataaagaactgtactctccctctgattccaaatataaatctttttatacttgtgcaatttgtataagaattaataaaaacaactctaatgaatttgttgcccttcatctacagtatactatatcaagaaagataaattatttatttttaagagggatatagcatttatttagcaaccacaaacattgaacaatagtaaaaaaaaattgctaagaagctctgaaacgatatatatttgggtaagaattgagaaagactcaaatgacttacatttggagcccaacagtcccaccagcttctgcagtggacgaggttcccaggaccccttgcggatgagaagagtattctacaaatgatcagtgtatagagtggattagacctggtcttacatcactttcgtaattgctgcttcgattcctctgaatatatgaatgcaaattttgtggtcaaagtcaggcatagacttataaagatcacaaaaggaatttccttgtaccagataatgcagaggccagggagtatctttcgattttaagtacgtactgtattgatagcaactgtggcctctgtggttgcataaagaatggaagaagcttcatgtacgagggatctagccacgagtccatgactagcatgcgtcactgaaactgaagttgccaaagtctagcaatactgttctttttcagcacgagctcgaactggccgagttgatagtagtacaaactgttggcgctgcaatactttcaacccgtcactttcctctgatccgaagtggcaggcaccacatatgcactcctcggttgctgtcaagtgtcaagcttctcatcaactcgagcaggcaagcagcacacgacttctcggttaatgcatacctccaaggctccaactgttcttgtcacactctcactgtccacgcttgtcttggccgcttgactagatacaaccacacagccatgtcttttgccagccacgccggcgccggcgccggcgaccagcagcacaggtgctgctccaggacggtgcacttcgtgctggtcccgatgatggcgcaggggcacaccatccccatgaccgacatggcccgcctgctggccgagcacggcgctcagatcagcctcgtcaccactccggtcaacgccggcaggatggcggggttcgtcgccgccgtggaggaggctggcctgccagtgcagctgctggagctccccttcccggctgctgatttcggcctgccagacgggtgcgagaacattgacatgctccagtgcaaagacgacatgaggaaattcctcgaggcctgtggcgcgctccgggagccactcatggcgaggctccggcagcacgacctgccgccgagctgcatcgtatccgacatgatgcactggtggaccagtgacatcgccagggagctcggtatcccctggcttacctttagtggcttctgtacctttgcctccctcgccaggtaaaaatcacaggccactggcatatttatctctacaagaacaacaaatagttagaattgatcaatagacgaggcaagacatgagaatgatattggttaaaggattttaatcaaaaccacacattaagccttttatctaaaaaatacttcaggtcaggttggcaattggttggcagcactactaactcatttcagaaaatagaaaaacttttcatggtatcttaagaactgccggttggatgtgttttaagagctaagactgctatcttgaagggacattgtttaccgtaacaatctattgcgggacctcactgatgaggaggaggtcgttaagctctcagggttccctacgccgctagagttgccaaaagctagattgcctggaagcttgtgcgttccaggtctggaggaaatccgtgagaagatctatgatgaggagatgcgaagcgacggcaaggtcatgaacagcttcgacgagctggagactttgtacatggagtcctataagcaggtgacagataaggtctggacgatcggcccaatgtgcctgtgtcacagagacagaaacacaatggctgctagaggaaacaaggcgtcattggatgaagtaaaatgtttgcaatggctcgattcaaagaagccaggttccgtgatctttgtcagttttggcacccttgtcagcaccgcgcctcagcagcttgttgagctgggactggggcttgaagcttccaacaaaccgttcatatgggtgatcaaagcaggaaataagtttccagtagtcgagaaatggcttgcagatggattcgaggaacgtgtcatagacagagggatgatcataagaggttgggcaccacagatgatgatcctgtggcaccaggccattggagggttcatgacacattgtgggtggaactcgacaatagagggcatctgcgcgggtgtgcctatgatcacatggccacactttgcagagcaattcttgaatgaaaaactggtagtggatcacctgaaaattgggatggaggttggagtgaaaggagtgacacagtggggaagtgaacaaaaagaggctcaggtgacaaggaattctgtggagacagcagtgtccacattgatgaatgagggggaggctgcacaggggatgagaatgagagcaaaagattttggcataaaggcaaggagggctttggaagagggaggttcttcatataacaacataaggttattgattcaagaaatgggaaacgagcaaaatgcatctggttgatacatatatatgggaataagctttttttattaaaattctagatctgaaagaatgaattggaggatactatcgtacctatatacttgtaaggatgggaggagtccatatttggccctttaactatggtcttgcccggattttcatccctaagaattgtgctcccttcaattccaaatacaagccgtgtaaagacttgtgcataaatatgatttatttattagaaggataacatttatttagtatggaaaatctggaagaatagtaaaaacttctgtattctaaaatgacttgatattgagaaagaatcgtgaagcataaaatggcttacatttgcagcctggcagtccaccagctcctgtagtggaggggatttccaggatccctgcagatgcaaagagggagtattttacaaatgatcagtattattgtatgaggctcgtttgtggcatgattgtttacagtctggattattaaattatatcactttctgtttctgacactcttgcccaagtttcctagttacttctgaatatatgaagataaaaattaggaatagtggtcaagttatgccgtagacttcgaaagaaaaaaaatactgaatagtgagactgcagaggacagggagtatgagtatgtatagcaaccgtggttaacctgaccaaccgcgttgtccggacggctcaaagaatggaataaactcgaggactttggctatgagtccataactataacatgcacaccaaagttgccaaagttcagcgatgctgttatccttttcagcatgagctcaaactggctgatttgataggaggacaagctgctctgcaattatttaattctttttttgaaagaagctgcaattatttgattaatcggcaacattccactttcctccgactccgagatccgaagcatcaggcactactccgtagcacctcaaagcaagtactatgagcatccaagcacaagccccaagatgtcacataggactaaattgtgaggtggaggagagaagaaggatgagagagaaatagtcacctctcatgcaaggggcagcccctacacaaactttaataaacatgtgagagtgttagaaatattagggattgtgtggtagagatgacctattatacatatcacctcttaatttaattatctatgttatgtataaaattagatgcgatagtcacctccaatataaaacttgccctcagactgcttgcagtcatcaactcaaacagcatacgacttctccagagttattgcatacctccgcttgactagatacaaccacagccatgtcctccgccggccacgccgtcgaccagcagcgcaaatccaccacgatgaaggcgcacttcgtgctggtcccgatgatggcgcagggacacatgatccccatgaccggcatggcccgcctgctggccgagcatggcgcgcaggtcagctttgtcaccactccggtgaacgccgccaggatggcaggattcgtcaccgctgtggaggcggctggcctggcagtgcagctggtgaagctccccttcccggccaccgagtttgggttgccggacgggtgcgaaaacctggatatgatccagtccagggatctcagccgaaacttcatggaggctgcggagcgctccgggagccgctcacggcgaggctccgtcagctatgcccacctccaagctgcatcatatctgacatggtgcagtggtggaccggtgaaattgcaaggcagctcggtatcccaaggctaacatttgatggcttctgta

SEQ ID NO: 4703 - DNA, 12392 bp, Oryza sativa
cgcataccaatgagaggataattaggcctgagcggccggtttgcatcaagagatttgagcaccgagctatcggatcccctggaggaaacaatggcagcaggggcaaggccaactttcttggtcaaatcggagaaatggtgcggaaacgcgtgcgcctccacagcctgcatcgaggtgagctcctcgctggccccgtcgacgaacaagaacgtgaatgctctgttcctgcaagtctcagaaggattcgatccatgatgcatcggtaaaaaaaaacccgcagagacacattaagctgttcgatgcggatgggcgaacctgaagtcggcgttcttggaggcgaagatggagaggaactggttgacggagatgccgagctgcagatcccaccacgggacgaggaactccagcttgttgtgcttcttcctgcacacctgcgcctgcacgatcctcaggttgctcggcaccgtcctcccacctcctgcgagcaaatacaaaaaaaacaatctcgttagagatcgaaggaatgatgtggaagcggatgttgggatgagttcgttcgatctgcgtttcttacgggcgcaggggaaccagtggtcgatgtcccacgcgagaggcgaggcggagtcggcgtggaggtagagcacgttgccgtaggcgtcgacgcggaacagcgccgggtcgaacccggcgttgccgaggtggtcgagctgcttccacagcaggttcgcgaacccccgcgggttcgccgtcggcgccgcctccgcgtcggccaccgggaacatctcgttcagatccttcgcccgcatcgcctgcaccaccacccaacacaaccaccccaatcagctcaccaccgcaccagcagccgcgaccatcacctcgacgagcacccattacctcgtgcgggtggaggacgtaggggaggaagccgtgcggcgggccgtggccgtacgggagtccaccgccgccaccgccgccgccgcggcagaggcgcgcgtaggccttggggtagccgagcgagtcatccaccgccttctcctcctccgtgaacgccgtcgccgacatcggctcgcgccggcgccggcgccaactgtttgtttcgggatcagtggcaaatgggcgagagatcgggagagatgggagagaataaaaacagatgcgtgttttttttatttttttttttggtttttttcaggagcgtggcagcaacggtcgagagagccgttgggaaattcaaactcgcgcgcggtgagggacacgtgggttgcgggatgccgttggatttggattgagcggctcgcgatgagtggacgttacgctgggttggggtggactgtggagtggttacaggtgtacaagggattaataaagagatcatttagtaatgaggagttagtaattaattgttgtggggggagcggtggcccaccggcggccggcgggtttgggggccgtggggctcgccgtggataggacggcggccaaggttgatttgaatagactaccgagatgtgagatctactactctcttcgtaaaaaaaataatgaagaaatatgacatattctaacacaacgaaacaaatctgaatagaaatttatagaattaggttgtatcgtatccagtactaggatacgtcatccgctcctaggttagtatattctgagacggagagaggatacgtcatccgctcctaggttactatattctgagacggatagagtattaggttggattttttaggacggagtaaacggtttacgaagtgatgtgaaatcgttgtgatccatttgccagggccctgaaacaaacatggttaatgattgtccttgtcgaaagcattcgaggtcatacacgttcggctaggatgagcggttgtacggagtgccaggtgaaagctgttctactactcccaaatcaacatgaggctcgctaatcatacgaatttgaattccaaaacaacaacaaggctgtgtttagattttaaaaaaatttggcaaaaaacatcgcatcaaatatttagacacatgcatggatcattaaatgtggacgaaaaaaaccaactatacagtttgtatgtaaattgcgagacaaatattttgagcctaattgtgtcctgatttgacaatgtggtgctatagtaaacatttactaatggcagattaatcaagcttaataaatttgtatcgcagtttacaggcggaatctataatttgttttgtcattaatctacgtttaatacttcaaatatgtgtcagtatacataaaaaaaattggccaactaactgaacacggcctaaacttgaaagttcaatccatccaacacatcataccgtgtagacagacaaatcagtctgaggaaaaaaacgagacatattatttacgcatgatcaattccagtattatatttttcctttataaaaataccggggaaatgctgctatctgggtgactggacgggggagcaaaatcgggtgctccccccggccccgctccccgcgcgcggccatgcgcctgcatgccgctggcccaccatgtgtctggcccaccacagtgcctgcccctgcaacaaattaaccatatattttggaaactctctattaagaaaatttggtttatttttttccaccaaaaatatttaacctagtgcactcacaatgtttcactatgtatagatctaatgttgcagtaaactgagatattccattgcaacaaaaaaacccacatattttggaaaccccctattaagggaattcgttttattttttgttccatcgaaaaatgtttcacctagtgtacttataatgtttcactatgtatggatcaaatgttgcagtaaactaaaacattctttcgctatttgctgaaacattgtttttatataaggtgaaacaacacccgatttaaacgagtgaaacattttcgatgtacttagtgagacaatttcgatatacctggtggaacatcgtgcaacatttaaaaaaaggctaagttggttatatagcatcgaaagttcacgtttttggttttatagcaccgaaagttaccggttcactttaatagcatccaaagttcaccttgttcccatttttagcacttccatcaatttttccgtccgtcttaatcgttattgatccagccacacacatgatatgatatttctacccctcattgacatgcattatacttgtacttattaggggtagaaacgtcatatcgtgtgtgtgactggatcaagacggacggaaaacgatcgagaattgacggaagtgttaaaaatgggaacatggtaaactttgggtgctattaaagtgaaccggtaactttcggtgctataaaaccaaaaacgtgaactttcgatgctatataaccaattttgccttaaaagtaattcaataataagctaatttttttcatcggaatatatccatgtgtaatcttgttttgaagatttaattgcaacgaatttaatggtgcaatcggatcatgatttggataagtaatttaaaagaaaaatcagtttaaagtagttttacacgtaaatcggaggcgattttactccgaattgatcgggcgcccgagcctaggctgccccaaaataccgtttaggagtttagcaatttgctaacgaaaaacaagaaaattgtaagtcgtcgttggaggttagaatggggcctaagccgaagtgtcagatttggagcccatctggagaacgccgtgcatgatgggccgcggtctgtcatttatgggcctatctagagcggcccatagccccgataccgggccaggccaaagctgactatgtgggctgcatggcccactcgccgaatttcccccctctctctctctctctctctcacggcccatgtgctcgcaattaccaaaactttgcattgtggcctcgtcctgtaaatgacaagggatcagatcaagcgctgcaacacaggcacatggagtaaaactacttcaatctcaaccaaaatttatgaaaaccggtatttaatatatttttaaaaatataaaaacaggtagtatttgaaatctggagggcaaaaacagagtataaaacctctgatgctttttacttgcaaagtgggaattgatcaagagttatcattgtgaagtggcaactcgtcattcagagatcgatgccaaccaacagctgctgttcccaatggcatccatccactctgcatgcagttgcagtatccctttccaagatttggatcatcaccaagagctcctctgcctatgcctagcttcctcatgtttctactggcccaagaaaagcctttttgcaaatgcagctagagtactttacttgactacctaaagcccctttgaaagcagagtcttcttcttcttcttcttcttcttcttcagttcatcttgtggatggatggatggaatctggattcccatccttgctccaagatgcttctttttcatcttttcccaactccacttttccattgtctttgacatcttcaagcaccttcccttaaaaccctttaaagctcaccacagtccacagcagcagcatagatccccctctaaccttatcccaatgcatgtgttttaattatagtactccctccgtttcaaaatatcaggatttctagtatttagtttttaatactcatataagcattccttctctgatttctacaattcccatcatttcaataattccaaagccaattagatgcttggaaagagaatctatgcaattcaaaatttaaaaattgacaactaaaatgacaaaaaaaattgccctaaacttagtattttctaaacaacctataaatccttaatactccaaactccctttgttttaaacgagacaacaacaacttctgagcctagaagtttattctttctaggacggatggtgtattttggaacagagcgagtagtaagcattttgttttgttttgttttctttagctatacctcttgtttgcagccagccatggcagtatctatctccaaatgattggcttgggtttatgagcccaagcttctgtctcctgcagtccatactctaggttccaagaggcaatgcgacaagtgattggtggcatgaggtaaagagaacagcagtaaggtggtgtttggttggagggactaaagtggggctaaactttaatccctctcacaaaaacaaaaacagtagtaaggatggatggatgcaatgtgtgttcagaaatgacagcagttggactctgaaatttgctgcaaaggtagctagtaggggatactcctatataaagtggtcacagaaagatttgtgccatactactccagtcaatgcagtgcagtactcatcttgtcatggaagttgggacactgcgtagcagctgcaggagtgttcaggtaaaaaggatttgagtcagagttcaggaattgttctcctgctagtagtacagaaactagcaatcctctgaattcgtgtgaagcaataagccaagaaagatctgccaagacaccactgcatatcatgatatttaatctttgcagaaaagaattggagatgaaaacgagcttgcaaaacagaaaagaaaaaagttcttcaatctgaaatgacttgacattgtcacacttcgtcagaattactgtactcacagttccatacttccatggcgatccattggccgatagcccgatatatcttgtgttgcaccgggatgaacaatacattggatggattgttcatggctccttgtggtacggaagaatcgattcgtaaagcctatactcgagaaggctgatctgcagctaggcaaagcatcaaacattgtacagtagaaaacaaatgcagagaaacttgagaacgaatgggttgggttcagaggcagccaagccaaaaacaccttgtagaagcaagagagaatcatgcagtagcatttcaggctttgattaacgtggcttagcatctttgatgtcggggaaaagatgggttgctaatctaatcaatgggattaaaacggtaacgagagtggttgcctggtcaggcaggttctgatttctgaaactttagtttgacaacaggtggcctacttctcgaagatgaccgtggaccagtgtttttttactgctagattactactgtactagattacactaatgtgaatgaggatgaaaaggaaaagttaatctcggaccatatgaggaatgttttactgctaatgcatcattcgttatctttctgaaaaggcagactctgaagaaactcgttctgcatcgaaccaaagtttctgatttgcaagtaatattcagtgttgcaagttgaattttttttagataatgaatgttgcaagttgaatacactaacacagtaatagatgcggataaattatataaaaccgccaaaaaaaatatttgaacctactaaaagagaagacttttaggcagacaaacaagtcagaacaatgcagtgacaagaagactagaaactgttcagagtctcctctgatgcagtttattcacatcggtttttacaaatgcatctgcttatgatgatcagcatctaaaaccgtcatcattatctaaaaaatctaaaaccgtcggagctcaatcgaatctagacctaaaattttcaagtcccagagagagagagagagagagagagagagagagagagagagcaatcatctcctctcttttctttaaccatccatccatttgcaaagcaaacaaagcaaagcaaaggaatgtcaatcgatcatagctaagctaagagctggaggatatgaggaacattcagaacccaaatccgaatcgacccaacaagagatatgatttttttccctaaaggaaattccctctcttttcgatctttccacttgcattttctcagctttgctgctcatcaatcagagaagaagaaacaaagttggatggtgctttactctaagaaccttaaccggtgacaattagcatcccgttggattcctaatgagcaatggccgttccttttctgcatcgctgcccacattgcattattctcctccttagcccccccaagcatatgcatgcaaaaaccgcggaataactaagggagggcccacatgtcagtgcgctctgttgctgtctacactagatacttacacacgcctattatagagacatgtctcgagcacattgtattctcagctgatagtgaatactgtagatctttttttaaaaaataatgggtatttcattgagtgacagaattacgggttgtttggttcgggaccttaggggttgtttggatgagtgccaaattttattgcccttgtagcgcgctttggcgacttaggactagttcggttatcagaagtcgggccatagatgttcaatctctgacaccctcttacaagactaagttattaatctcgctatacctttttaagtcattgatgtttgggatctagctagtttgttatagggtattttgtcgtaactatggctacaaccaaacaaatatttaagttgcttgcttaagctgagacgtggtaaaatatggcaaattatggacacaaaccaaaccgtcctatctttggcctcgtctgtatgcagggatgcacgtatgtaaatataaaagtagtggagtacattgtaaatcctggtgtacatggagttgtaaccatagttctacttttctttcttacttccatgtgatccggaacgattttccaagagaactgacaaaaaacacacacagcaagtagcagtagcactgtcatggatggaaccgaggcaaaattcagaaatccgaatagcaaacaccaccaaaaagtacacactcaacactggagaacaaaaaggaaaaacttgggggtaattaatcaaaacctcggtccatcgatcgatcagatcagaccatggaatttagagcagggcaatgcaggtaattaaattaaattaaccaatcaacaagatccatccatgctgacgatcttgttccagtacactcactgctcattggcccggaggccgaagagaagatgggggcaaagctcgctgggatcatttggtgtggaaaggcgagcgaaaaaaatgggaaaagaaatggcagctctaggactagtatcagctggtggtattgtatgcatgggtcggagagaaatgaaaagaggaggaagacgatgagggaggggaatattcttggcgtcgggccagacaaaagggatattcagaggacgattttggtcagggaaggcaggccaccactgaccaaaccacgcgtgtcacgacgacaaagttgcctcaacggctcaacggttagacccagggtttaacttatcactaatttttcgaagtgaaaacagctccttactgatttgccaaaagctgataaaaaaacaaaaatattcgatcaataccgtacgaaaaccggctaacataaaccgatttttcacaaacgaaaacttagtgcaacatttctatgaatatatacaaaactttctatgagacatctttgaatttccgatcaaatatgagccactatgtatagctttgtcatccttcttgtaaaacatttacagaggcggggctcctattaaaaacgtcagctgtacgaacaaatcattttatcgatggaccgcttaaaaaggtcacatgtatatatcatttccacgcaagattatatccactagcggcttcttgtccacctgtggaaacaaccattttcacatgcctttacttagaggcgggcacaaaacctgcctatagaaatgcattatttagcccgcctaaaaaaacgtttaattccgtatgtgtagggataagtgtacatatcagaacaatttttctaatgctacaaaacatgtaccgcaaattctttaagtgcttgctccgtaacatattataagttgttttggttcttttagtcaaactttttataactttgactaaatttatcgagaaacaagctgacttttgtaataccaaatcagttccattaaatataatattaaatatattttgattgtatgtttggtattgaaaatattgctataatattaaatatgttattgagataccgatgtcatatcttaaactttacaaaattataatggtatggttccaaattaccctatttttaataaatttagtcaagcttacagaagtttgatgaaaaaaataaaactacttagggtgtgtttagttcacgctaaaattgaaagtttgattgaaattggaatgatgtgacggaaaagttagaagtttgtgtgtgtagaaaagttttgatgtgatataaaagttggaagtttgaagaaaaaattgagaactaaaccaggccttataatataaatggagggattacatgcctaaaaacatgtagcgtgagtaagaccaatgaattcatgcatgcatagacaacagatgtgcaagctagtgttcctgtacacacatgcatgtattggtctgtaccttgtacgcgaatattcttgtctctggaccatgcaaatgtatatgcatgcatatatatacttttggggcatgtacatgtacggtgttcaggtacgtagatgatatacgtatatacgtatacatgggctagctatacgttggatatatagcatgcagtacgacgactgcgaccatgccgttcgtacagagagagagagaatccatggaaaaggtagggattggagtcttgtacctcaagattgccccaagaaagcgaccaaccctaattattgcacagggaattcgatgcactaaaacacacacacacacacacacaacacctttctcccacctcttcttgtgtgtatgaactagctagagagagaaatcaagagagagagaatcttcttagcttcctccccaattcctaaaaagccaagagtagtagcagcagggagattctcacattctccttcccttcacccctctcttctctctctctaaaggacaccatgtcttcctttgtggtgtccttttgtgcgtgtgcttcatatccccctccaaagccttaagatattccttgcttgagccatgctgatatattcccttgtgaatgcaaagtgtgccagtcctcctatctatctagctatctctctatctacacacactcactagactaccatatgtgctataacagtgccacaacatgcatatacatgtacataaacacatgcatgtgtgaagaagaagagcacagaagaattttggagcttgtgtgtgaagggatgcagctcaccccttttcaaagcaaagagacctagggcatgcgatcttttttcatatctttggcttgaattatgtgtgatatatgcttttagtactgctttacccatttaattccttcctcctttgattaatcatgtaaagaatcttcacccattagaacatcaaccagtaaagagagagagagagagagagagagagagagagagaaaagaaaagttgattaattggcccttgtctgttggatgtgagaatctatgaatatcggtatcgataattcccggttgaaatttaggtactaatatagatttcttttgattttttgtaatgcaagttggggagttgggagagagagggtggtgtgattcccacagctaggtatatctggtgattatccccattgcaatatgctttaaaacccaatattaggtaaaatgtaaatattccccaagacacctagctgggttctcttagactcttgcaaggttctctttggactactttgagctttgagctcatctttaattcgatcccttgaatcagacgcaccccggcgttaagctttagttttcccctttttccctgctgcatttgcccggtagattcttagatttgttgtaaagttaaacttaccacagaaatgaggcaggcagcatcttgatctgtaaaaaaaaaaaaggattaatggcaaagaaagatacattgagatcatagcagctgatcagctaggctaaaacagtgtaatttgaacaggacaagaagacgtggctaacaaaagtttcagtttttcagtcacgcatgcatgctgaaaaacaaaactgcatgcatgcagtgtacaaacactgatcagagatattcagaaagcaggcagtacatatttgaatggagcagagagaaatctatatatatatatatatatatatatatatatatatatatatatatatatatatatatatatatatagagagagagagagagagagagagagatctagagagagaatgcaatgcatggtgcaatatatgcaatatggacccatctggtcgtaatgttaggagatatgttgattcccctgttggtacgtagtacatgaaacctcctgcatgcagaggaggagcagaattaacctttttctttttgtttttgtttgcctttgatctttgcaagaagttaccatgcctttgctttatccccctatctctctctctctctctctctgatctctcactactgttgctagctagctatagctgtttagctaagtgtatatgtgcaagatcatacaaagctagcttttccttttcctctaaatccaactttattctcctcttccttctcccaaaactctcccttaaaaagaagctgattccccatctgatccctcatcaaaacccttctcacattcgatctcgatcactcacacttacactcgcagtttgcacagctacttcatctcaagtagtagtagtaatatactagctagatcggtcggctatttgctgtagctagctagcgtgagctagcttggtttgtagagcttgtatacttggagggaggagatcgatagccatggcttcttcgtcttctgacctaaccctagacgaccaccaccatctgacggcggtggctgcggcgtcggggcaggcgacgcagaagcttcaggagttcttgtcacgtctcgaggaagagaggctcaagatcgacgccttcaagcgtgagctccctctctgcatgcagcttctcaatcatggtgagtaattgtatgtaacctaagctaaatcgatcgccatggctaaccctagcgaggattggtgtgtgtttgcagctatggaggcgtacaggcagcagctggaggcgtaccagatggggagccagcatagcgccgcggcggcggcggcggcgagggcgccgctggtgctcgaggagttcataccggtgaagaacatcgggatcgacgtcgtggcggcggacaaggcggcggcggcggggggcaacagcgtgtcgtcggagaaggcgagctggatggtgtcggcgcagctgtggaacgcgccggcgtcggcgtcggcggcggacacggcggcgaaggggccccagacgcccaaggagcactcggagcaccacccgctcgacacgagccccaagctgatcaccgcgctcgacggcggcggcggcggcggcggcgcgttcctgcccttctccaaggacaacgcca

SEQ ID NO: 4704 - DNA, 50426 bp, Oryza sativa
cttggggttctaacatggttagagttaggactagggattgcttagccatgcctagttcaactagttcacattggggaaaatcctattaatgattagactgtcggttctaatggttttgttgggttagtgacaccgctttggtgttggttaattaaaatgaatcacatggtgggctgtgggtgcatggttttgctggtcgcacccatggcagttaaggaccggttcgcgggatgccctgaagaacttatcgtacttaccacaagccagcgtgggcaacggctgggcttgtagtgtagctttcctctagtcgacgcatccaggcaagggtgggcgtgatggagcggggcgggccctgcgacggcctctgtcgcttccggattcacctaggcacgagaggggactgcccgctgccttgcgaggagtgggggtgaaacctgaggtgtggtgtgcttggctagagggggttatgtgaagggtcctgtcacggcctctttccggtatgtcgtggtggcatgtcggcacacggaaacgtgtcgtggggctgtgtcttgtgggtacagttgtacacctctgatcagagtaaaactattcgaatagccgtgcccgcggttatgggcggtcaaccagattcaccgtgattagtctcaccctagtgtaatcttttgaaactggatagttttggtggagggttgggcctgttgcaaagtgggatagcgttggacagtggatagttaatattaattaattattacaactgtttaatctttcaacttctgtttataaatgctcgctttatgcaaatgaaccatttagctcttctttgatgattccctgcatcatgcctctattccggtatgacttgctgagtacagtgggtagtactcagtcttgctctacttttcccaaccccagagttcgagtatgtgtcagatgaaggtttctccgaggagtaggcttcgtccgtgccgtcgaggatgcctgtggagtggtgatcccgctgcggttctagtcaaggcttagctcctgttgtctctctttctttccgctgcatttatgtaagacttttatgatgtttgtaagacgtggatctgaatgtcaacattgtcgtttttgtaccccggctggtcctggacggggattttaatgcacattctgcttgaaattctattcgggaatttctgggcgtgacacaaggtatgggatgactttgaagaattctttgaatcacgcaatagcgcgcaggttcgcatttctgctaaatgcaatcactgcaaaaaaaactttgtctgctcattcatctggtggcactagtcatttgcttagacatctcaagtcatgcaaacctagaactgctagtaatttgtctcagtctatgcttaagtacaatgctgatggtactgttcgtccatgggaatatgatcctgattatgctagatctgagttggttaaattgattgctgtagaggatctgccacttaattttggtcaatctcctgcttttgaggagtacattcagaatgctcataaccctagattccatgctgtctctaggcaaactattagtagagatgtttttaagtactttaacaagagtcgtgctatgcttattgagaggttcaagtctgttaactctgttgctttgacatctaatatatggtctggtaatgctaaggaggattatttaagtgttgttgctcattttgttaattctgattggcaattagagaaaaggattttgggtctggtgctgattgatgtgaagcacactgctgagaatatttctaaacgtgtgctttctgttgttgaagaatatggtttgactgataaggttttttctattactctagacaatgcctcttctaatactaaggcaatggattttctaaaacctaagttgtctgcttatgttggtgatttatatttgcatcagtgctgtgcatgtcatataatcaacttgattgttaagactggtctagaagttttcaaacacatgcttcaagattttagaacagccatctcatttgtgaatgcatctaatcagcacattgctttatacaaaaactggtgtattgctaagggtgttcgacctcgtaagtttggtttggacatggatgttagatggaatgcaacttatctaatgcttaagcatctcttcccacataaggagcttttttcattatttattgaaactcattatcctagggaaaatggtagactattgcttattgatttgcactagacaattgctgaaactgtgcttttattccttgaacaattttatgattcaactgttattttgtctggtgtttattatccaacatctccattaattatgcatcacattcttgagattgctggacatcttaacacttatgagaatgatattaactttagaaatgttgttgttcccatgaaaagtaagttcttggcatactggtctgagattccatttctgtattcatttgcttttatcttggatcctagggctaagatcagaggttttagcaatgttctataaaatatgtcacaaattttgacctctgattactctacttatttaactgaggttagggctgcattgtctgacatttttctaagtatgaaagtaagtttggtgctgtgagattgcaaagaacaaccccaggcagtactgctagtaagaaaaagacagcctggggaaagatttttggtgccagtgatgcacttggacatggtgctggtgccagtccagaacctggacttggtgctggtgccagtccaggttctggacttggtgctggtccattttccaggagaacttctgctactgctttgattcaagctgtttcttctaatgctaacttgaatgcctctgagttgtctgcctatcttgactgtgacattgtcaaccaattcgacgatgacttcaatatcctaaactggtggcatgagcacaaacacacatatcctattatgtccatattagctagagatgtcttgactgttcctgtttctactatatcgtcggagtctgcttttagcttaactggcaggatcatcgaggagcgacgacggcgtctaggtcctaacatggtgcaagctttggcattgatcaaggactaggtgcaggtagacaagaagttgcagcacactgctgagaatgtagagcttataaaatcatttgagaatttgtgtcttgatgatgtaaccagtggcagtgccactggaactggatgattgtattggacttggactttaatatgatagttagatgaaagctgtgggctgcactcttttttcctttctagggttttctgacgaggtgtgagtttttacctagaaaggtttttaatgaggcagccattgcactacacagctactattatttttgaaagtgtttgtgacttgatcacttgagtttgaactgtgatttgtgaactattagacttagtatttgaaagtgttttgtagatttgtgacttgagttgtgaattgtgagacttagtagttgagttagagaattgaattgtgatattgcacatactataacttgtgaattgtgatattgtaatctgagacttgtgatattgtgatatgttaacttgtgaattggatggttttgtgctgatttttgtgatggacattgcattttcgatatgtatgtgcaacactgaagtgaacaagtggcagttagtgtttggcgtgcctgggctagcccgggcacggtgggctcatcgtgccgtcgggccggcacggcccggcacgactgctgtcgggccatgcctgggcctaaggttcagcccgtgggcaggcacggcacggcacgaagtgctaggcgtgccgtgtcggcccgatgcgtgccgggccgtgcctgggcttgaggttcagcccgtgggcaggcatggcacggcacgaagtgccaggcgtgccgtgccggcccgatcgcctcgggccgtgcctaggccgggccaggccgggcgggccatatggccatctataactatagcaactaaattgccctgatatattaggcaattctcaatacaactcacctgctagtgtcacaattcaagaggtacttatgtcgcctattataaaatagagtacacatggcccatgctagaagttatttgtgtctagaccagtagaagtctacgttggctcggtccctaaatacatatacatcgcaaagtgattatttctttattgttaactttcaaaatcaacaatttgtttatgtagcattttaagtgccttgcaaatttcaacgggactgtaactagtaccacttccatacaaaaataagttcactttatatatgaacctggtataggctatatctatatttatgtacaaaattgaagttattgtagaacggggcagtaaatatttttgagctagggttcaactatctctctttgtttttagttaccatgtgtattacatctgaaaaaaaaaataaatactccctccatcactaaaaacaataaatttggacttagttgagttttttttttatggaacatataaagtacctggttatccccaaccgtacgaatgcaaatgtcccaagtaccaattaaaagtaggtaaaattaactccaaagaagtggccaagaactcaaaaaccccgcactcccctaattaagacacaaaatggggatatgagactttctaattaagcaacggacctaatgtagaaaaaggtactactcgaactagaagatgtaaattccttcctctaaaccgtacgtcatccatatatagtgggaattagaaacggagcgctagctgtacaagttttcacaatttgagccttttaaaaaactaattttacaaatgaaccgccgccaaaacttattttaaaaatgatcctttttttcagcgccaaatcatgtggtgttgaacttagacacctcagcgccacatcaactagcgctgaataccgtaccaccgcagatgggaggctaagtcagcgtgccaacgtacattcagcgccacacgatttagcgttgaacagaagggtcagttttgaaataagttttgacggcggtttatttgtaaaaatagttttgcaaagggttaaattgtcaaaatttgtgcgctagctgtgagttaactagccactctatatatttctgagggtgttttttttatacagctttaaaagttctgggtgaaaaataattgctttttgtagttagggagaaaattagtctttgagcaagttagacgtcaaaaatgtactttacccaattaatagcatcaccaacaacattggctaaatttcatctccaaaaatatgaatttgagaatcttaaatgaaatttgatgtgtaaaaatagttatcttctgttaaaaaaattgggtaaaattaacccctaaaaccaaaaggtgggccctatatgaaactaaccaaaaggtgggccctatatgaaactaacataatatcgtacagacgggcacctgttaatcagtactacagttgtacaaactacaacgtaaaatatgacaatgaaagtagatattgaattaaattattgtgatcctatgtatttttcttccaacacctaaattaattaaagtggactatcatcgaagggcaagcatgttgcccgtgtacgttcagattaacggaataagcaccactacgtactaaaacagattcttgcgtaggatcggagacgagagacgttgaaatgttgacatcctatcatgatgatcccccttaatagctcgggctggtggttgccacttgcctgcagccctgctgataaagtcaggatctatctgtaatctgacatccgctcacattaatcccgtgacagagatctgcagacgctcaacactcgcataaaagaaaggcaagaattttgccggcgacttgcattggtgtacgttgatcgagttagttagctgggctacactaattggaaatataattaagcacatgtgggtacactaaacatgcatgtatatcaatagatccatatcatatgtatatgatttatacatgtatacgacagcactgcatgtgaatagatcaacacgaaacatagtcgaaacgtactgatggtttagttctaaaggacgcacaacaccactgctacaaaatacttcatatcttataggaaattgctcgtaggtaaaaccgacacatataaactttttctacatccgtgtgatgaaaaaaatatagaactagcatttttaaacactatagatccacatccgtgatgaaaaaaatatagaactagcatctttaaacactatggatgccagttcttaaaaaaaaaaagggcacttatacttataagtaccgacacatataatcctatgtatatattcttatataattcatctcctccactaaatataattaatgctattctctcttttttcattaagccacatcacctcaattatttttagtctttggatgataggtctatggttcaaattgtctcttttttcttctctcataacactatgcgatctcacttgtttttaggatcaaaattcataaatatcaatttattttagttttaataatcatattgcatcttatttgtatatattatgaaacttaattttccacggtaacgcggcggagtattcatctataccaaaccgagccgagccggtgaaccgagcgccatccttatctactcccatccagcgctcgcgtcctatccatttctctcgtctctctccctcgcgtctctatgcctcccctctctctcgcacatctctcgcctggcgctcgctctctccctcgcccggcgctcgctctctctcgtgtgtctctctgcctcccctctctcttgcagcggctgcccagcgaaggcggtggtggcggcggcggcagtgggctccctaacgccagatccagcgagaggggaggcagcgctctccccttcgccagatccggtgagaggggaggtggtgggtttcccacgtgtgttcctttagttctcttcacacgcattacttaggccatgcttctttcagcttaatattattgtaatctagattattgacccagattactataagttggattataataagctgacatagttgttagctgtttgtttatctggattattagctttttgttagttgttagccacccaataatttaaaaaagcacctttagagtggattactagattatagtaatctggcttatagattgtaataatttattataataagctatatgttcgttgcagcttactcataataatccagattataataatcataagctgaatcaaacaggaccttaattgattagaagagcattaattattttaaggtggtttcacatgcatgcatgtctcccgtgggctaaagacccacgtataatttcatcatatctagacatatgtactataagcattaatttatgtgtagattaatccggctaataaaaacacaaagcaaacaaaaagatacaacacattcatactaaagttacactgttctatattttgcaaacttaggccatatatatttgtgtgcaagttcaagtgattgacagataaaaaaaatagacgactaacaaatagcaaaactgtaatttattttaatatcatcaagacacatcagcaacaacttgtatatatggtcaattaatatgtaataatgtattagtacccggcgtacaagtatatagatacacttgcacatacatcggttggctatatatataaccgatgagtcgatataaaattataaattaactcggctagctagctagatagagctcacggccggtcactactcaccatcgagaggagagcaaaaataattgagtgatagctgttagctaagctacctagcatcatgcagggaggcgccaataataagggcttggtatgcttgatcgccgccgccgccgtggtgttggtattcgccggcagcagcggcattgcggcggcgcaggcggcccgggctgaagaaggggttctacaagaagagctgccccaaggcggaggagatcgcgcagcgggtggtgtggaaccgcgtcgccggcaacccggagctcgccgccaagttcctccgcatgttcttccacgactgcttcgtcagggtacgcacacaaattgaatatatccatatactggccaatcatatatatattcccctctgtagattataggtttgactgattaaagttaaactgcttcaaatttaattaattttgtagacatatatataggatgtgtttttcccctttttcccaactcacatctctcgttttccacgcgcacgcttttcaaactgttaaactgtatgtttttttttacaaaaaaaaatatatacaaaagttgtttaaaaaaatcatattaatctattttttaaaaaatagttaatacttaattaatcatgtaataatacgtgcttcgcttgggaggagaggttcccaaccccttctcccgaacacaaccatagtaatatttacaacaccaaattagtttcattaaatcgataattaaatatatttcttaatatatttgtctaaattagttttagatcgataattgaatatatttttatgatatatttgttttgtgttaaaaatgtttttatttttttttaaacttggccgaatttgaaagtcagaacaagttataatctgaagcagagagagtatatccaaacgatacaccatgcacaattgtattcttgatgtgtgcaaatggatatataatgtacatgaaggggtgtgacgcgtcggtgcttctggactcggctagcaacacggcggagaagaacgcggcgccgaacctgtcgctggcggggttcgaggtgatcgaggaggtgaaggcggcggtggagcgggagtgcgccggggtggtgtcgtgcgcggacatcgtggcgctggcggcgcgggactcggtgtcgtaccagtacaggaggagcctgtgggaggtggagaccgggaggcgtgacggcacggtctccagcgaccaggaggcgctcgccgacatcccggcgcccacctccaccttccccatcctcctcgcaacttctccgccaagggcctcggtctccaggacctcgtcgtcctctcaggtacgtacacaatttcttgcattgcttgcatcgatcactgaagaagtatacgtacggagactaattattttcttagataatgggcagttcattaagactgtgttcggcagtgcaggatgggaacccattttttttacacgcaaaacggagtggtcttttaacatgattaattaagtattagctattttttttaaaaaaagatcaatttgattgcttaaagcaactttcgcaataaattttttttaaaaaaaacacactgtttagtagtttgaaaagtgtgcacgtgaaaaacgagagatttgggttgggaagatggggtgccgaactcagcctaagtacattcatgaaagcatccgttttctgaacaaaactgatgaactcgaccaaaacacaacgacgcacacggaagaagaataaaagaacagtaccggccggtactccccctattacatcttaacttgaacaaactcattagctaagtccaagatggttacgccatccaaaattagaccacaaagcacagggacaactaatcattggggttgatttcttgatttatcacttcagcagtatcaaaattgtttaactagctagggcctattttgtttatttgtatatgcctagtattagcctgtaatatgttttccaagttgtcctagtgacctagttcacgacatttctcaagaaaaattctactttgacatttcttaatgcaaaaagggaaataattttaccatctttgtaaaggtaaaaaagataacatattttcgaattgtaaaatttggtatctactaatatctcaaggtattaaagtttttagtttaaaatcttgatacatttagttactttctcaagtaaagtaaaatttgtaaaaagaaaaagaaaaccgtccatatgaaaggttgcatggatttgaattgaagcatgttgattaaagacaactgttcccgtagtgtgaaaacaaccgcttgattgcaatagcccagctgaaaatgacataattgtcggtgatggggcaaagaattaattaaacttcaccacaggccacatgcacgtccggttaatgcgcatgtgagccaaaacagtatacgaagatgcaaccaccagattggatagatttagcttcaattcggtaggtaaaaaaaaaacaatccttgggaaagtaatcccagtcaagatagcagctttaggaattaaaaaaattcaaatcaaacgtcggataaaaaaaattataccaaacatgaatgtttttttattcatattcaacattattaccacagtccatttttggattgttgtaagacggactactcaccgtactaaagtaggatggatgactgcagtacttaattagaatagacggtaccgcttagatagcagacaatcctcctaatagcatgcgacccatacttagagcgcgtgaaactcatcacatgttatcttgagcggtatgttactagaaagcgtcggtttctcatcagtgttactatcatacagctgttcaacttaaaagctactcgctctgtggttcgcatgggtcgtgccactatctattggacaagacccataaacataaatccttcgaatagaattacacaattttatacatattctctatgttaatataagtccttgtttttcgcaaagtaaatatttgaaaactaatcttaatgaaacaagtcaaatttaattttggaactgatggtacaagagcatgtaaggtggagcaacttagtacatgaatatgtaaaatgattcgttcgatctatatgaacttttttggatcgtgtggatcaagaccaaaacaacgtactatgactaattttgtttagttgaactctgatcgattaatataggcgggcacaccatcggaatcgggcactgcaaccttttcagctctaggctcttcaacttcaccggaaagaacaaccccagcgacgtcgacccgtccctcaacccatcctacgccagattcctccaggtaattaattaacctgttaattagtggagtaatggctaatctctgcagtaatttaatctcatcatgtcttgcaaaattcagaattaagatcagtagctgcaaaaaggaaaaaaaaaagcatagaaaaatatgtactacagcaattgtgtgtgtgtgtgtgcaagtgcaggggcagtgcaggcgtaaccagcaggacccaaacgacaactcgacggtggtgccgatggacccgggcagcagcgtgtcgttcgacagccactacttcgtgaacctcaaggcgcggcaggggatgttcacctccgacgccacgctgctcaccgacggccgcgccgccgcgctcgtcgacaagctgcgggaccccggcgtcttcctcgaccacttcaagaactccatcaagcgcatgggccagatcggcgtgctcaccggcgccgccggccagatcaggaagaggtgcaacgccgtcaactcctagctagccggccgctcgctagcttggcttattatcattctctaagctttttagctcttacgatgaaaacatgcgtcatatccgctgcgcgcacaaccattattagttgttgtatcctaattattgttatgcgtcgaatacagtaaaattaatgcccacgagttaagtacaagaaacataaaaagattacagatatatatattttattggtaaacagaagtactgccagtatatactggtagtacattgtaccgtaaaagttcaacccagccatcccttcaaatttcaaacctacacctctcactaatttcccctccctctagccgtcctacgccctccttgataatccctctcgagtccagacctctccctccacttaccctttcttcggccacccacagcctcaaccccacactagaacccttatcgatggggcttgttagcagttgtcgatagcgctcatacgggttttgatagggttgattagaatccgctcgattggaacggacgtttgcaaaaagcaatttcaaacaaatttcttcttgtacaacgaatgagataccgagatacttgctcccccatcatctagaagctagtattacgttacgaaaatgcttatcatcatacgtccgataaaggaggaaaaattggacacctcaactcaatggagtagtagtatagcacaggtgcatgacaactgacaagtgcaagcagccaatggagcgtgcatgaaaatcacatcgattcaaaatttaaatgatctttctcttaaactatttatcagaattatgaactaattataccattggatttgttataattaactatttataacaagatctcacatgacaatattctgatgatttttatcacataatgttattataatgtttcaatatgtttttactcatatttcactaattcagatgtaatgttgcatgtggtctttttatatgctttatgctttagtaaatgtattttatgtttcaaaaaaagtacaacttgacgcttcaagagtgatataaaattttaacaaaataaaatatttgcaaatatgttgcaccatatatatttttatgtttccctaggtatgacctaatgttttatgtaatggtagttattgttgtagccagtaatttttatatagttattgttacacgtgatctatttatatgtttcagcaaataaaatttttatgtttcaaaaattgcaggttaacgtttcaagaatgatataaaatttaaacaaattaatatttacaaatatgttgcatcatttttttttagtttcagtagtttgggacataatatttcatgtgacggtgcttattgttgcatttagtaatttttataagttacatctctctgggttgagttatccgtacaagtgataaaacaatattatggtgcaacaaaaggttgatttttccaaaacacatataaaatgttgcatggcaatatttcgatatttcaataaatatttttctgacgtttcactagtttatttgtgaatgttgcacgtggtattattggatgtttcagtaagtattttctaatatttcactaattcatttataaatgttgcacgtgttgcttgggatgttgcagttaatattttctaatgtttcaataattataactcgttgtttcacatataatatacaaatgtttcaattagtataggtggaatctaaaccatactccctcaacaataggtggaatctaaaccatacccctcaaccataaaaccgggtaaaaacgactcatccaactatttaaaccagtgcaaaatgactccctaggtggttttgaaggtggttttcgctgacgtggtgcctacatagcacggttgacttggtcttaagctgacgtggtgcttacgtggcattacaatgaaaaaaatgtgagacccacatatcattcacataaaaatttattgtgggacccactgaccatgtgggacccatatatcctcctgtccctcctgccctcctttctccttccactccagtgttaatgaaaaacacgaggcctgggagatcggcttaactccagtgcaggtccaaaactcgccttcgggtatgctagcatgccagttgatttgatcctgcaatcaactagaaataaagacaaagaaaccgtggttaaatccataaacgatagccgatcgactaagtgccgatgacatatcgtttatctttgagccgatgtcatatatgcatcgatcggcagttataaatagataataaagaactaaatctactcgatcggctgtagacattaacaatatataatcgttatgtcgatatatacttaaatcaagtaattgggatagatcggtcgccatgccgagacagtataaatcacttagattgaaatatatactaacaacaagactatatatgttcatagcatacccgatcagatagatctagcatgtatggctaatactccgataccaccctatgttaagatattaaagcaagcagaatataccaaacaaaagcctaatatacttaaatgcaataagattttgacataaagggtagatttaacatgtcaataaagcatataaagcaaatatagttaaatcaggtaagatcggctgaaaccccgatactaccctaatcggcaaccaagaagcaggctagagattgagattctaatcatcactcataagatcaaactcaactgatgcagctataagtatgaaaagaaggacaatatctagataatcaagccattggaagtttcatagagtggtggatatcatatataatctaagccaacatcgatatttaacctaatcggctgccctctattgatagatgttagctgagtgtaggttagatagtgatattgccagagattatataagatatatgataactcgacgaattacataaacaagattagagtatcataaagatggaagcactaatcccaagaacgcaagccgtcataacaagttttacctcttgttgaagatcgaaatcgatgcagctcaacccgaaagcaagaactcgtcgaaataaaactaaagtaaaaaagggtggcgatgcgccgagattgtattgaacgtgtgtgttcctttgattacatagggctcggtgtctatttatacccgagaattatccaacatgtccatatcggacaagactcttatccttgacaaactctaagataccataagtctttgcggcagacttttgccaaacatatctctaaggaatttatataaaatatcctaactaatagatacagtcgccttctcaggactctatccatgcgtggcaatcatcttcaagcatatcaactcgacccgatgtcgtacaccaagtcgtattgtcggaattggctgtatcacctaacccagtctgactcggacttagccgatcccaatcgtagccgattcgaactccagccgattcttactctgtttccacgacgatcctcatctttgattctgcttcgatctaatcttcttccccgatactgatattaccaaatttggtcgttaacacatgccccccaagtccggaatatttggtaatgtttcagatttgccatatatcggctccgagcaagattcgcactctgccgttttctgaccgttattccagcgctttaaatactaaccgttgctcctgaaaaatcttcatcgccgaagacaactttgtcctttctctctccggcgatttctccgacgctcaaggcgatccccaagcgactccatctccggccagatctccgcccacggcaatgtcgtcctccgccagcccgtctaccgcgccgtcggccgaatacgctgaggtaagttttcatcggctagatcttctcctttcgcatcagattgatttcccctttcctcatcttgttttcttcttctctattcttgttcgcatctgtagcatctgtccaatctgtttgcgattccaagtctatcgcatgagggacattatttccttggttcgatccgcaatctagatcgcactgacttcatcattggcgaaaccaatagaatccccttcaaattagccaaccctaatctaggtcactgaaagaacaccttcaagtcttggccgtctctcgagaaaaccacccctgagaagagttggacctcatggtacaagcgtgtatcgaccagcaagcaaacacattgggatgaaattggaatcggccaagcacttgccctcaccatatcaaattcagccaaagatgaacccttaatggccatcgccacctacttctggtccaatactatcaacgcctttctgttcaaccaagggccgatgacaccaactctgatagatattactatgatcactggtctagatgtatcctcatctgctaatcccatgaacctgaacaccaagaaccaatacgatttcaggaccaaaagcataggtggttggtctggttatgtggcagcatatatgggccatagatttgttactcctcgagagcatgtggcatttttactcatgtggctagaaaagtttcttttctgtggatccagttgtggccctacaaccaactggcagtttgcagccaaagctcttgagtcaaaaagagaatttcctctaggcaaaatcctcctcggctacttatacaaaatgttgaacaatgcatcggccaaaatagccgtcggctcggtggttgaagcaggtggaccatggtggctactacaatcttggctcaacttaatggtcatgaaagttgtcaattggccatcagtgacagaagccgaattcccaaggctggagccgatcacagaagatgatggagaagaacgcacccatcgcagatgcatgttatatggagagtatgcatccacaccagccaatgctggagcaaaactatcggctgaactgctcaaggattggttctgcagcttttatgaggactcagcagaccttgagctcccgtcagactttagattttaagatatcaatcataaaagataccaaaagtctagggaagttttctcagttgcaatcagcccatgcatcctttctatcggcattcatcagggaagaaacattcaagtctcttatgaattctatcacccaatgagctcagccagacaacttggaatgggccaactcccaatcggcttatttttcgccgataagatccagtgccgaggggaaatttcatcaaccttgatgatggatcgactgctcaatctccaaggacctcctctgggcagcattgagaatatcgagctggcgggattcaagagcaaaaactttgacatatggtggggtgaatggaagctgcatctattccaccaaccggcctcgatgtacatgacagatctcttccctgatgttgtacctcaggtaaaccttgtcatcattaatctaaacaattgtcagctgattcataacttgactaatcttttgtttctgttttgcaaacaaccgaatcttcccctccacatgaaagcaacagtgacagagacattgaatatgccccaggtctgattcccaatggaggtgggccatctcctcctatcatcggctatcatgcccccaagacttcaactcttctccaaggcctaatcagagaaccagccgatgcaggcaagaagagaagaactaggtcatcggctgtggacacattggctccagccccaaagaagaaggccaaactcaagaagcctaaaccaaccgatgacctgcctgccctagatccatccattgaacaagctctgggtgaagaagaaatcggcgaggatgttgatcaagccacagataagtaagcgatactgaaagaaccccatcggcttcacctaagcaaactcctccaactccttctgccccattccatttttcaaaggtaagcagctttctttttgcaatcccttcacttatagtcgattactcacagattttatggttgcagaagaagaaaattgctataaagaagaagtcggcagcaccaattcccaaaccggctccaccaataagatattcttaattcttttaatagtcgatctcaaccgattttccgtaatacttatctttttgcagcctcctcctcctccttctcctgttcagcaaccatcaagtgatcaaactccatcggctgcaaggggtcatcatgttgaagaagaagtacaaccagctgctcttgccattccagtaagtcttgtttataaaactcttgaatcagccaaataactcatgttgagactcaattttttaaattccttcttgcaggccttagccgatctgttctctttcgatattaaagactatcttgatgaagaaacagaagaagacactactagcaagtctttagctcccttgtctgataatgtgaagaaaacccttgaagacatctctcttcggctagaggcatcatcattagacagcttggtggtaaactgtgggccaattaggactcggtcacacgaggttcaagctctaatcccaaatgagctagtcgatgtccttacaccagctgtctaccttgagcagcatcaattcaagctggagaaagccaaactaagattagccaaacgtcgggagcgcaaggacattgtcacaccctaaaaatcctaaatatgtaaattgttgtttaaatggaattattagaatttatttttttaaaagcctagaagggaagatctaattttaattaataaattccaatataaaatggggccagataaaatttcattaaatactttgcttaattctataattcctagatttttctgggatttatttgagctaaggaagtaattttaataaatgaaattgcatttcatggataatttaaattgaaaaaggtttttaaaaagtctcttttggctttgggccgaaagtcggcccaaaaacctctctctctctccctcggcccaagccggcccagtccgcagccgcagccgcccgcgcgcgcgctcgttgtcgctgacaggtgggtcccacctgtcagtcttcgtcttcctcgcgccgccgccgccgcccgaaccctagcgccgcgccgccgtcgtctccttccaaatccggccgctcctttccttctccggtgaaatcaaaagaggggaaatgtttcccgagatctcctctaccttttcccttttggaaacatcatctatttcggtttggaaatcggtggattcgagatcgaatcggattcctctctctctcccgaacccgaagtttccttcgcgtcgccggtcgccgtgggccttcgccgccgcctccttgcccctttaaaaggatccccaagcccgccgctacccgtcgccaccctcgccttcgtctctcgccgtcggaagagctctagcgccgtgtgacctagcgccgccgtcgttcgccggcgagcatgcgcgcccgagtcgcccgagccgccgccggtggtgacgtcatcgccgacgtcatcgtcgtcgtttctccgtgagccgccgtagacccgatcgatctcggccgtccgttttggatggatcaatctcggccgttcgttcccgtgaaccgccgccgtgcgcccggtccaccgcaaaccctagttgctgacgcagtaaaccccttttccttttcaaaaataactcattattgcgtcataattcaactaaaatccatataagtgttttaatccgatttaatctttaaaaattcataactaattcatcttagctcggatttagttggttcaagtctctaaatttttctaaaattgagatctacatgttaaaaatatccacatgtactgttcatgcttgtttatgtgctgtttttggtgtttttgctcttttctgtttagattccgacgtttccggagagtccgtttccggaggagaagaatttgaagagttccaaggccagcaaggcaagtcacacagatcccaaacaaccctttgagcatgttgatcccgtttaaagctattgtttctattcaactattgcatttattttcgaatgtcattgggtggaattaacctattgtttgttatagccctttttgttcttgattactttattccttgataccttgggttgttataacttgactagttgggcaatatatatattggttcaactagatgtgttagatataattgcttagccatgcttagaaatattagctcactaatgggatgaatcatatatactacattatttaatgatggcttaatgatagttcacgatggtcaatcgtgattggttaattaatcacttgccaactaaaacctgatgatggtgggttgtgagcacatggttttgagagtcgtgctcatgacaattaaggaccggttcacgagtttcggttgtgaaacattaaccgtgccaaccacaagccagcgtgggcaacggctttaccttttgtatagcatggttcattgtggggcaccagactgagaaatggcggagataagcccacgggggtcgctggggagtccatgccttgtttacaagggggtgattatgatctaggaatggtgcgctgcggtggattgtgttatgcaaggggtattgtcacagctcctttccgaggtaccgtggtggtattgaggcacatggtgacatgatgtggggttgtgtcttgtgggtacagtggtacacctcttatcagagtagaactattcgaatagccgtgcccgcggttatgggtgggtctaacaatgtctttcgtgattagtttcacacttctcaccataataaaagatgctataactggtaataatttgattagctcctggtttggagatagaattgtgcagccgggatggttgttcagaatggttgggcctatgcaacagggtatattgtatagcgttggattaatattgtttaattattacttaactgttttattaaattctgaaatgtttactaaatgctgtttatgcaaatgaaaccctattatgccatcctttgttatcctgtgcacttgcatatttgctgcgtgacttgctgagtatgtcatatactcaccttgcaatcattcatcagaggaagagttctacaatgatgctgatggtgtggaggattaggtgtagccctggtcaagctgcctgtggagtggagccgtctacgccgtttatctttttttttccgctgcttagatctttattgattgagaggaactatctacctctgtaatgacattttattcgcttattaattagagtaataatggtactctattatcaatttgttattgtgtgcctcggctgattcctggacgagggtttacacacatgtaagcgtttggaattttggatagaaattccgggcgtgacagacattgaagccacaatccaagccaatcggcagcttgtgcacgaagagaagtccaagcttgatctgctatccgagggcccgatcaaatccaacgttaatcggctcgaagctcgcaagattgagctcttggcccaacttcaagaatgcaatgccgaactggatctggaacacaaaaagctagccgatctcccgcgagtcgttgaagaacaaaaggcgaagctgaaatcggccatcaaaaatgtcgctgatatgaccaagtccttgaaaatcatccctggaaccgacgctcaagatgcccaagctattgaagaagtagaacaaattaggcaaagagctatatcggctatccagcaatatttgtctcggtgactttctgtgtaatagatcttataaatttttgtaatcggctaagatactctggtactttattgtcttgacaaacctttgtgccgattaatataacttctaaatttgctcaaaaattttcatttttcgtatatatgtgcccccctaattttacaacgtcaaaagcattgacaaaattataaaaacaactaaaggcgatataaccatatcggccatcggtacatcggcaaaccacaaccgattacaatatgaaaaacaactaagggcgatataacaatatcggccattgtacatcggcaaaccacaaccgatttacaatatgaaaaacaactaagggcgatataacaatatcagccatctcaaagcgatgtagacacatcggctgtcatgtatcggcaacatcagccgatcatgcattaacccaaacacttgggtaatatttcttcaaatacttgccatttagtgctcgtccataaacttctccatcgagtccatgcaacatgtaagctcccttagacacaactttgtggatttggaatggtccttcccaattcggcgaccacttgccgaatttgctatctcgagtcccaatcggcaaaatcacttccatacaagctcaccttcagaaaaagtcttgggtaccactttcttgttataatgtcaagcaactcgttccttatccttggtaacccttgcaagggctcttaatctagactgaaccaagtcttccctttcatcggccatgagattataatactcatcaactgttaaatcattttgcaattccgttctccttgagccgattctaacttcccatggtaaaacagcctcatgtccataaacaagcttataaggagggacttggatcgatccatgacaagccatccgataataccacaatgcttcggccaaccgagtatgccactgccgagggtaatcataaatctttctcttaatcaatttgatcaaactcttgttagatgcctcggcctacccattagcttgtgcataatatggtgaagaattcaacaatttgatacccatgctatcggcaaactgaacaaactcatcggacacgaaaattgaaccttgatcggtcgtaatggtttgaggaataccaaatcgatagattatatgctcttgaacaaactgtatagcatcccagaatcaactttctttaaaggaatcgcctcaacccacttggtaaaataattggttgccaccaatataaacttatgccctttactcgatggtggattaatcataccaatcatatcaattccccaacccctgaatggccatggcttaatgataggattaatagccgacgctggtgctctctagatcgccccaaatttctgacaatcttgacatcccttgtaatatttgaaacaatcctctaacattgtcggccaaaaataccctgcgcgtcgaagcaaccacttcatcttatgagccgactgatgagtgccacaaatcccttcattaacttcgccaattgcaaccttagcctgattggcgctcaaacacttaagcaacaccccataaatttttcaataatagagttcatcatccaataaagtatacttcaacaccttatatctcaatttccgagaggccgattgagatggattctgtaaatatcgatgtacatcatatctccaatcatcggctgttattgcagcaacttcaaccttaacatctttgatcatcggcttataccctgacgccccttgggctaaatcattagcttcaatattttgctctcgagatacatgcttcaaagtaaccagccgaaattccttcattagttcttggcacttctcattataaactatcaatgtatcattcttgcactcatattctcctgccaattgactgattactagcaaagaatccccccataatttcaatagcatcggcttcaacttccttgagtaactgcaaccctttaagaactgcctcatactcagcttgattgttggttgcataaggtttgatagtataggcaaactgaaaacttgccccccgaggggaaattataaccaagccgatgccacaaccatgagtgcatactgacctatcaaagaataaagtccatggcatgatctcaaccgagccgattgaatcatcacgatgttctacaataaaattggctatagcttgccctttgaccaccttcggttactcataccgaagatcaaactcagttaaggaaaatatccacttcccaacccttcctttcaaaattggagctgataacatgtatttaacgacatcggctttgcatataacagtgcattcgttggacaatagataatgccttaaccttgtacatgaaaaatacaggcacaagcacaacttctccacaggagaatatctagtctctgcatccaagagtcgatgactcaagtagaatacaacactttctttcccttcaagttcctgaatcaagactgaaccgattgacttctcaccggccaacagatataatctaaaaggtattcctttctgtggaggaatcaaaactggaggagagctaagatattccttaatactatccaaagccttctgttgctctacccccaagtaaactgttgatcggctttcaatcttaacaacggtgtaaaaggttctaaccttctagacaaattagaaataaaccttctaacaaaaattatcttgccgattatctcttgcaactctgtcttgttctctggaggatgaatcttcttgattgcattaacacttctatgagtaatctcaattctcctctcatgaacaagaaattccaaaaattggccagccaatacaccgaaagcacactttgttgggttcattttcaagccatatttcctggttctctcaaaaaccttcctcagatcggctatgtggtcctttatctctttagacttaacaaccacatcatcaatgtagacctcaaccaaccaaccgatcggatcatgatatatataattcatggctctttgatatgtagccccagcacttttcaagccaaaagtcattacaacctactcgaataagccgattgcaccaggacacctaaaagctgtcttatgaatatcttcttcggccataaagatctaattgtaccctgcattactatccataaaacttaaaatcttgtgtcctgaagcagcatcaactagctgattggccactggcattggatattcatcttttagggtagctttattcaagtttcggaaatcaatgcacaccctgaccttgccgttcttcttgataacagtaactatactagaaacccactcggcatatcggcaaggacgaataaaaccagcatcatataaacgtttaatctcagccttgacaggttcaagcatatcggctttgcatcttctcggaggttgttgatgcggtctaacccctggtttgataggtagccgatgttcaacaatcgatcggctgagtcctggcatctcataatactcccaagcaaagcaatctctgaattccttcaatagctctatcaacttggttctaaactccggagataaatttttactaataaatgtcggccttggtcgatcacccagacctatgtcaatttcttccaattcatcagccgacatgaaaccatatccttgcttgtcatcgagatcatctattgtatccttggtgtagacgtttgaaccctccacgacgccctcaaaataatagctttggttctccatcttcaattggccgtatatcagaatcggacacttttagaaaatctccatcccaaacttttccagataaacaatcaagaccatccatctcccaaagagctaaatcggcactggcaacattgactgacctgttggctggcacaatttcaatcttgtcgccttgccactgaatcaagcattaatgcatggttgagggaatacaacaattggcatgaatccaatcccttccaagcaacaagctatagaaacccttcccatcgatgacaaagaacgttgtaggtatagatttgctgccgacggtcagttccatattcaaaactcccttggtttctgatggattgccaccaaaatctttaagcaccatgtttgtcttgatgagaccttcaacatttctgctcaacttcttgaatgtagcgtaaggcatcaaattcactgcagccccaccatcgaccatcatcttggacaccggcttcccattgacatagccatttatatacaatggcttaagatgccgattctctatcccctctggcttctcgaagacttcttgttctggtgataaaatcaacttagccgattcctcttcaacttcatcgacatcggcttgcttgaccccaaactcagcaggcagcgtgaaaaccatattaaccgatgcagtcacaacactttttcctttggccaatctctttgcttcatcggctgcggcctcgtcggctacaggagcttgtttcttaacgcgccactcctgctttggcttcgttttctttagctgatgactgatttcctattagacctcctgaaaacgctcactgttcctcaatctttgaacccttctcttatgattctttgtaaatataccagaaggacatcattgagtcttcctgttttcattgtcctcctggttacaatcttggttcactggacccaatctttgatgaacgggaactctagtctgcattagccgattgcctctattatatgatcggcttgagctttctacaatattaccgcacctaggacagtcctcgatagatggcagcctcacatcctcattccagcaaaatctaaagaactcgcagccccaatgaggatcaaaaacgtcatcaccttcctcataatgcctctcctgctgtttgtcatacttcttctgatatttgttgataatttttgccgaattcacctgaaaacctcttgcacgtcctccatcagctgttcggccagctgtttgcaccatattaacaggaaaaggattgccatcaaccttcatcagcctcttggagtcttcaaattttattttgcctccctcaatagccgcttggatctgctgcctgaaaaccttgcaatcattggtagaatgagacccagaattatgccacttgcaataccttttcttgcccaattcttcagccgatggaatcgtatgaccagcaggaagttgaatctgcttctctcggagtagcaaatcaaagattttatcagccttggtaatatcaaagtcatacctctcctcctttccagaactctttacccattgacacggtataactttcttgcttctaacccattcggctgctgctattccggagtcatcatcatcatcatcatccgatccatacatgtaaggacagacatgattaacttttttaaagttcttccttgcttttgcaaacctctgttcatgcaaggtcaccttctgtgcaagatgtgacaagctatcaaagtcttgagatgagaacttctccctgattggagcaatcataccctgaaaagccaaatcggctaactgggcatcagttaaactcaagctatagcacttatttctcatctctctgaatctctaaatatattcatgcacaggctcatcatgtctctggttgatcactgttatatcggacagttttatctcatataccccactgtagaaatagctgtgaaaatgcttctccaaatcggcccaactgttaattgatccatatggcaaagaagaaaaccaagtgaaagccgatccagacaaagacaaccggaacaacctaacccttaaggcatccacagccgatgcttcaccacactgggccaaaaaccggataatgtgttcataatttgacgtactatcttgcccttagaattttgaaaagtctggaactttgaaccggttaggtagagggactccctcaaaccattcagggtaaggttgccggtacaaatttccagcgtctttcggcctgagcccaaactgctccttcatcacatccgcaatcatatcggcccatggtcgttgctgaggtgctccttgaggttgttgtggcatgagctcgaattgattgtactgaggaacaaattgaggttgagccgatcctccctgctgatattagacttgcggtgaaggaggttgatactgataattcaaattgccccctggtaatcttgaaaatttggttgaatattgcgcaccaaatgctcaggaacaacttgaggtaccaccgtttgattcggttgcacattatggaccaaatgctccggaacaacttgattcgcggcatgctgccttggctgattattaggtgttgcaaacccagccgatgcattcatcgaggcttgttgttgaatcagctgaataacttgttgccttaacagtgtttgctgaattggttgcaaaatctgccgcctaggtggcgtctgctgaattggctgcacaacctgttggattggtggcgtttcttgaatcggctgcacaatctgctgccttggtggtgtttgctgaatcggctgctactgggttgggtcaacagtaggttgaggaggtaagaacatagctacaacctgaccttgcgttagctgattcacattctgtccactatgctgcggttgctctctaaccaacaaccggggattcactaattgacccggcaccgatgatgctgcagcaggtgcaagagctgatactggtgccgtcggctgagccgatggtgcattgggaggaattggttgaacagctggctgattatcagtgactaatggccgataattcgggaacacccctcctggtagataaaccggtcctgtagcctgatattcagccattgaaccatcaacccttgtcttcaccatgtttgacaaagtgttgactaatattccagattgattgatcaaagcatggtgcacggcatagtcaacctgatcctggatgttgttaaactgtaactgtgccgcattgccgtcttgattaaggcctccaccttgaattccttgagagccaacaccctgaactccttgagagccatcaccttgatttccttgaaagccatctgcagcacctttatactcggttgagctgcatcatgtcacgtcccaaaacgaccctaaaatatatcctttaaattatgcctagaataattaaaatccgtgtgaaagcctccaacaattaaaatgtgcaaagtaaaagtcaaataaggcttagaggatttttttatatttcctaaaagcctaaaatgtgtaaataaattttagtggaattttcagagcacaaataataattattaaggaataaacaaagttgaaaaggttttataaaaagaaaaaccctaaaaaccatccttccctctcttgggccggcccggcccacttccctccccctctctcctcttcccccgcggcccactcggcccctccccgcgcccgcgccgttgacgggcgggcccgcccgccaccctcgctgacgggtggggcccacccgtcatgtccttcctcccaccgctcccgccgcctcgcccgcgcctagcgccgccgccgccgcgaatcccgccgcctcccgtcgtccccgcgtgaaatcaataggggggaattactccccgtgatcccctctccctttccccccatttttccctctctctctcgcattcaaacggccggatttgctcccgcaaatctcgccggcgccattgatggcggccggacctcccggccggtttccttccttccccggccaccctctcccccttccaaccctatttaaaccctccccgcgcctccctcgcccgtttccgccccttgccgcactgtctcctcgccagaatcgagctcgcgccgtcgccctctctctcctccgtcgccgacgaccttcggccggctctctccactcgccgggaccgtttcccgccgcggcgtcgcctcctccggcttcgccgcaccgtcgccgtccccgtccaccccctcatcgagctcgccgaccgccggagcgccaccgtccccgtcgaccggagccgcgccgccgccttcctccgctccggccgcctttttcgtcatcgccgtcgacctagggtgagtcgtggaccgccacctcgtttccccctttccctcccctctctcggccgccgctccgccgtgcctatggccgccgccggcgaccataggggcgcgggcgcgccgcctcccgccggctgcgccgacgtggccgccttcgggcacgccgagcggctgccgcgtggggcccagccgtcagccgcctgcgccctcgggtgcggctgacgcgtagggcccacggcgccggccggtgtgagcccgggtgcacccggtccaccgtggaccgtgaggctgccgcgtgggccccactcccgtggacccggtccgcgcgccctctcccctcggctgacgcaataaaccatttttaaattaaaatttaaatgaagaaattcgtaaatattcatttaaagagcatataaacttcaaatggccataacttggccattcgaactcggaattggaccgttcaagtctctaattttctcttaagaagtcaaaaacccatttttgtgctttgttcctgcttgttatatggagtttattagagtaaaagcctttttcctttccgttggtcgtgtagacgctgcagcttcggaagatccgctctacgtggaggttgaagccgacgtttgggaaagcgagcaaggtaagtcacatcattcttgaacatattgaatcccagtttataaaattattttgatttaaattattacattatcgctttatttaaattcccgcgttatcactgttttatttagccatgcctttttacctttgttatgaccttattattattgttattgttattattaccttgttcaccctagaataaacaaaaccccaactagtggatactgtattcatggtaccactagtatgaatttaggtagatgcttcgctgcttaattaggcaacattaggtggttttacaactctagactttaggaatattcttatcacctggacactatggaatggttggattattgtggaattggattcacacctctccctctattcaaaatcctcaaaatggttttagcctgggctcggggtgcatggttttgatagtagcacctcggccacataaggaccggtcttcgggcctctgttgcaaagcactaccgtacttccacatgtctagtgggtaaggcttagtttgtggctcagtctggttataaacaaaagtacacggatggagatggacgaagtcgagggtcgatggacatctctagggcaaatgaaggctacacgagctgcggcccggtagtcgagatgtcatggcacagggctggtgtcctgctgctaggggctcagtcctgcctacctgtcccggaggttccggccgtaggtggggttcggtcggtactcttgtctatggctaggatgggttggaaactatgtcacgtcttccgtccgtataccatggtggtatgtggcacgtggttacacgtgacgaagatgtgtcttgtgggtaaagatgtacacctctgatcagagtataacctattcgaatagccgcgccctcggttatgggcaagcctagcaatgtacccaagttagtgttttaattcttaaaacctgcttaacaactaaaatgtggaatggttggcctgggttggttgggacgagctgggacctagggtcgggttgccagttcagtctgaatcatcgtaggccttgggttaaggcaggttcgtatgggttcacggccttgattaataatattgcatagctctaggatcgtgtttacaaagtagctttgagcaactaagtgacttttaatgatgtttactgcaaaccctaaccccctatattatggctcccttgtactcccttgcatttattttgcacttatgggtgtgtcttgttgagtacggtggttgtactcagtcttgctcaatttttcccaaacccagaagatgagttcctggaagatgaaggctttggtgtctagctcgtgcctgccgtcaagcgcctgtggtcgtcgccctagtcttccgctgttttttgtttgtcttcttgtgtgctgggccttcgctacccatgtaataaattatctatttacgcttccgcttgttaaactctgaattgtatcaacttttggtgtaccttgcctcctgggacaaggaataatacacgcacgtaaggaacgcccgttgggttatttccggtcgtgacacatcatctgaagcttgtttcacttcttcatccttagaagaaccggtcctaggaacatcagcaattacctttactttgtacttctgaaccagtgttcccttgcgggactccgtgaatgagctcaagaactgattccgtgcttgctgcatcattgtatcaaggtctttttgctgctcaggtgtcaatttatccagagtgataggcacaatgttgtcttcatcaatctcagatagacccagcttcaggatcttttctttaacagagctaggaccagcctggacggcgatgctggcaatttctcggccatggggaaaactgctgttgtgattctgacttctgatgggtcccaccaggcgtgccaaaagcgtgttgatgaaaaacacgaggcctggaagatctgcttcacttcagtgcaggtccaaaacacgctttcgggtatgctagcgtgccagttgatttgatcctgcaatcaacaagaaataaagacaaagaaaccgtggttaaatccataaacgatagccgatcggctaagtgccgatgacatatcgtttatctttgagccgatgtcatatatgcatcgatcggcagttataaatagataataaagaactaaatctactcgatcggctgtagacattaacaatatataatcgttatgtcgatatatacttaaatcaagtaattgggatagatcggtcgccatgccgagacagtataaatcacttagattgaaatatatactaacaacaagactatatatgttcatagcatacccgatcagatagatctagcctgtatggctaatactccgataccaccctatgttaagatattaaagcaagcagaatataccaaacaaaagcctaatatacttaaatgcaataagattttgacataaagggtagatttaacatgtcaataaagcatataaagcaaatatagttaaatcaggtaagatcggctgaaaccccgatactaccctaatcggcaaccaagaagcaggctagagattgagattctaatcatcactcataagatcaaactcaactgatgcagctataagtatgaaaagaaggacaatatctagataatcaagccattggaagtttcatagagtggtggatatcatatataatctaagccaacatcgatatttaacctaatcggctgccctctattgatagatgttagccgagtgtaggttagatagtgatattgccagagattatataagatatatgataactcgacgaattacataaacaagattagagtatcataaatatggaagcactaatcccgagaacgcaagccgtcataacaagttttacctcttgttgaagatcgaaaccgatgcagctcaacccgaatgcaagaactcgtcgaaataaaactaaagtaaaaaagggtggcgatgcgccgagattgtattgaacgtgtgtgttcctttgattacatagggctcggggtctatttatacccgagaattatccaacatgtccatatcggacatgactcttatccctaacaaactctaagatatcataagtctttacggcagacttttgcccaaacatatctctaaaaaatttacataaaatatcctaactaatagatacagtcgccttctcaggactctatccatgcgtggcaatcatcttgaaacatatcaactcgacctgatgtcgtacaccaagttgtattgtcggaatcggctgtatcacctaacctagtctgactcgaacttagccgatcccgatcgtagccgattcgaactccagtcgattcttactctgtttccgcgaccatactcatctcttattccgcttcgatctaatcttcttctccgatactgatattaccaaatttggtcgttaacatccagccaccccaccggatccaccaacgcgtcgagctcgttctgcacaaagatggtccccgaatactccttccacggccgcgccatgtacgtcttcgccttctccagatccgggtgcggcgccacaatgcggttgtgcagccccgtccctcccgcgacctgcgccgttaattatgatgttcacttggttccccatcggcttttgcagctggatcaagcagttctggagcaccacctgcatgcatttcatttgcttttctcaatatttgcttattcttcttcgtcgtggtggtggtgttaattgttggatcaaaagaaagagaagaagaagagtttaattatatacttgcctgcgagttgcagtatatgaagtcgatggtgccagacacggagcagtcgcgttagaactgccgctgcgcatgcgggtagagcgtgtcctggtacgtcttcaccttgtccgtgaacttctccaggtccgggtgcagcaccaccatcacgtttggctcgaattcctccggctcggcctcaggccgcggcgcctccagcagcggctgcttcccgccctccgacatccacgtcggcatgccgtcctcggcgagcagccactgcccgatgctgaggctgccgagcgtcgatgagaactggtcgaccacggcgacgatgtcctccatgagctcctgcgagctgttgagcgcgttgggcatcttggcagcggcatcggtggtggtgttgaggaagtcgtcgaggcaggtgccctggtaggtgagtgcggcgctgagccacgtgcggaggtcgtcgacggccttgttgaaattggtcatatcgaagccaccgagcttgtcgaaggacgtgttgaggtcgtctatggcgtacccgagcagctccttgcaattctgcagcgctcccactattaaaaccgctggtgcccttcccggctcctactctacctcgccgtcgtcgccgccgccctctctactgctgctagaaggggaaaggggaggaagaggaagaggaagaggaaggagaaggcaaggagagggagagagaagagggaggaggaagaagaaaaggggagagaggatgacatgtgggcccacatgtcagtgggtcccacaatattttttttacatatgggtccctcttttttttttttaatgccacataagcgacacatcaatgtcaagtgagacgaagactaggtcaactatgccacataggcgccacgtcagcgaaaataaccttcaaaaccagctagggagtcattttgcactggttttagtagttgggggagtcgttttatccggttttgtgattaagggatatgatttagactcaatctatagttgaggaagtcgaattatactttttcctccccactggcccacatcattttagcccagatacaagctagggttgggcctcccagcgaaggccataagatgctgagtaatccagcaacaccaccacacaattaccgtattccttggattataacttcataagcaaactaaagttttgcatggcgattattaaaaaaaaaagctttgcatgacgagaaaggtacacatggcactttcacatattaacaggattttaccctagccatgcaatattatcaatgttgtccctcttccaaactcagcgtgaatgcgtgatgcaaccttccaactgcaagaaattctctgaaagagtcagcttcagtaagtgaaggagacacagcttcagcatcatataaaaaacgatgttgcgcttgtgtaaagttaagcgcctatgaattgatcaagacttttttacacaccagagacaaccataagttacacatgatatatggcagtaaatttaaagggaccaggtgctttgcttccagagatcaacattatgcctaactggctaaatgattcgatcagcagctggtagacttcaggcaccagccaatgactcgatcagcagttggtagccttcaggcaccacgctctggttctttacgcaagcggtgagggcaggaacatctgcttttatgtctaggaaagcagcaaccaggaggagaaggtggaagtccgagatccgcttaacaaatggtagatgcttagcacgatccaggtggctcttgagcgcgctcattgctacagggtttccacggttctcgataggaaagccggttgaaagtggaccctacatacacaaaataaatataggatgttaactgatatatctttatggatagaaggtatatgcatataatcgactaaaatggtataagagcaaatgacacaagctcagttggtggggggtgtgggtatctcttctctattgattcgattccaagctcctctgcatctttcatttttagttttaaaaaacaaaaattaaatgatagcagagtgttgaatcattgccctgttccctgggtggaattatgcaagacatgcgagatgtacagcccttttagaaaacaaatcatttgcttttcttggagagacaatgttaaaaagaagagtcaccatcattttgaaacctcaactatcctgaaatcaggtgtatttcgaaacaaaaggatggtggccatgtttatagtctaaatagaaaaggttcttgattaaacaaattgacaacccacaatgtaatcaccaaagcagtaaatgaagagattgtgcatatgaagattgatctacgccccagaacacaaatctaccagaagtaaaatgcaacgctaccacattcacagttatctgattacgctagtttctattatggacatcaaaagatggaaaaatagtagatttctagctgatcccttccactctaatcactggcccagtacatcatgatgaacaaatataggtggcttgtttaggaaaaatacagatgcagcactgtaatttaacttccataatcaagtgcatgcgaaattgcccaactaattaatgatgaaacacaacagtttcactgaagtatgtagccaggtgcatattggcttgatgcatggactgtacagtccaaattaaacgtattttcgtttgtcagcaaacaagacagaagcttacccccaattttaagtgtttaaagtttaatgtatatgatcatcaaatgcctgatgataagtaaaggtaagttaatatagatgatcttacatgaagctcaagttattccaatagtctaattataaatttctgtaagtgaatacagaagatagattcggatacaggttgtattgtgacattcagtttgccacgttttctttccacatagggaatcaaatactggatataaaggtaatgaattattagaactttttaaagataaaaggtaaatgttcagatggagattcttatattcttttcaaagtagatccatggaatatctgagaaaaagaactgttagtgtattctaggtcagaatatcaggttcccctttattctcaggtaagcttcagacttgttctacacacaactatctgtgtcagtgctaaagcagtacatgccgcatcttgttctatacaaaaagatcagaatagttatctttgatgcactctagcaccatccaaggcctcagaacactgccatagaattcttccctagaagcacaccaatataaaagaaaccttctattcttaggacctataatttttaaaaaaagaaaaaaaaaacttttcacacctagcacatcagatgcatgacatacatgacatcaccctggcctattccatatacacaagaaatggtttacactaaatatactagaagggcacatacacttggtacctcactaactctctctctttttttttggccaggcgaacaatggtatgccggccaaattttattaagaacaaaagagaaaccagtacaaggaaagcaacaataggatcattgaaggcacccaagcttgaatgcttagaatgcttaaaattagcaacaggacccccaagcctaaacatgaactagaacagctagaacaaaagcaaaaggaagaaacaaagttaggcagggcctcagcaaccctgttgttgtttccttgtactattatgccttctattcttaactaaaaagaggctgcatcatataagaactaaaaatcacccattgattctgctcttgaaataaattaaatggaatcacatcaaattcatgatatcagttgcatagatatcaagaatcgtcattcacagattcattctcatctagatcagctctatgaactaggatgcatcactgaaataagatgctcttttctagagtaaatttcacaaacactatagatattttggcatatctatcaaaaaaccacagatctcattgctaagtttgcaacagctacaacattttggcaacacttcctgacaaacacaaggctttgtcctgttccatgccaaataacaaaaatgtgtgctgcatgtcatagaacagggcctttgtgtgtctgcaagtggtttgaacaagtagttaaaaacttgtagttctatggaacataagagtaactatatctttacgttcttgaaacagttacttaaatcagtaggtcttcaataaatgtgccaaaatgcctgaatttttctacacatactccttttcttatatagtggttaattacttctcaaaagtggatctattattactagaattatgaatatttgtggatggctgtttactaacagtctaacactgaacagaactcatatatcatgcccttacacccagagattcagtttttcaagacagtgcaggaggccctctacgaagtttgaatcaaaaaattaacagaaacataatgactttgcagaaaataaatatgtcatgaattaattgcttgcatgcaaataggcactctactatttagtggataacacaaaggctctaattcttctcttgtattgggaaatttttatttctaattcatgcggcatatctaccttgttcgctgaccattatgttgtttcattgtcagttttacatcaaattactaaaacgagcacccactcagatcacctgatgattcaaggtttcaaacatgctgctacccagtcaagtgttaatattgctatgttgtaggaagcaaacttatttagtaaactgtaagttcattatactatgcaacagagtaggaaagaataagaatacctgatgatcagagatcttgacaggcaccaggaagaagtcattgtccacctccatagtatcctttcccccagccaccacctctttccgcatcttggacaggcggggatcgtctttgtccccaatctccgtctccagcacaccatccttgaacagcttcacacaaatctcactcatctggaacgcctcgaagtgcacatcaccggagccatcatcccccacctcgagcttgactatggcggtgacccactccgggatcccgccctccgcctgcagctcggtggcctgaagcacctcgcggttggacatggtgtactcgccagtgtcgctggtcttcctcccgactgcctgcgtgaacaccaggccgacgcggcgcatcccgaggccgtgggcgatggcgtcgacgcgggcctcctcctgcgcgtcccgcatgagctggacaacgtcctcggtgccgacctgcggcggctcgtagatgaaatcgacgaagacctccttggtgtcggcgtcgacgcggccgtagaggaagccggcgcgcttggtagcgaaggcgagcgactcggcgacgtggagctggaaggcgttggcggagtcgcggtcgaaggaggcggcggcgcagagcggggcctcctggcgggtgacgcggatctggcgcgcgatgaggtcgtccatggtcatcttcttgccgaaggagccggcggcggagagggctttggggggaggcggctgggaggagcgggcgtcgggcgggtaggagaggtagacgaaggagccattggagaggcggagggaggagagcggggcggccgggtcggcgagcagggcggcggaggcggaggaggggaggaggagcgccgggtcgagggagaggcgctggagcgggacggggacggtgacgcgcgccgcgatgagacgctgcaggtcgccgacggtggcggcggccgggtccggcacggtgatgcggtccgtgccgtcgcggctgcggatgcggaggatcatcgcggcttgggttgggttggggatctcggtacttggcttgcgcggtggggtttttggttgcggatttatagagcgggggaaggcgagttgggggagatggagtgcgactcgactgcggaatctgtgcgggaggaggaaacgggacggcggcggagaggagaggagaggagaggggaggcgacgagagatggattctcgaagggttggaggctttggggcggtggttgcgtcttcgttggctacggtagtttgggtacacctggcccggtgcggcggaaagacgagctggtttctattctctggttttgctctgtaaaaattggattctatcctatgaccatctgtgattctaatggtgtttgaactttatttataaagataaagataaggattaagtgtctcacgtaagacgaggtggtaataacatgtgattaattaagttttaattattataaacttaaaaaatggactaatctgatattttagaacaactttcatatagaaagttttcacacgaaacatatcgtttagcagtttgaaaaacgtgccatgataattttattgtttgagctgctactccatcaatccttttcaaagtatgagagattttggttggacttctatgaagattcataatactataatgtatcatgtcgaatcaaaatatcttatatcttaagatgaaatgagtaatacttctacttagatatgtcctttattgctaaagagagtaaaaattgagctatccgaatgctatcgacctaactataacctacagaaaactttgaaaaaaaataataataatttagaattagcaatgacataaatataggcatgcatatgctggcctgctagattccaaccgaccgccaaaaggtgattaggtgagtatggaatttcacctccatccatgcatatcctctttgtatgctcttccgaccgagcacaaggccgttgacaccttattgacacacatgaacaatacttttccattattctttccttcttttcttttcaatttagtaacaagcattcacttgtgatctcactggacatgtatgctatgggctaacacaaacatggagaattttctagcatagagaaataaaagaagcattaaaatattaagcattaaacggtttaaaagctaatatctgaaaacaaactacaatgaaaaactaaaattaactctaaatttattaattttcaaaatgagtaaagtgcacggtcagtctctaaacttgttcatacgtgttatacagattccgaaattctcaaaatgtattttgttctcaaacttgttaaggtatgtcattctagtccaaattacaataactcttcggatcctatgttgcacacaaatgttagatttattttctttatattttgtactccctttttcttctcttcttccttcatgttcgtgtgaaaaaaaaaagacaaaataagataaggacaacacagaggggaaggaaaaaaagaaaaattgggactggaatatcagtgtggcatatcgctttagtgactatgtggcatgccatgtaggatactcgaagggtcatggcaatttaagactgaaatgactcactttaataagtttggagacccaaaaatgcattttgagagttagagaacccagatgacacaactgaacaagtttaagaaccaacaataaacttcactcttttttttagaacacgcttcacttttccaaaaattatttatttttagcactcgcgtttatgagctaacaataagttcattcgagcttttaaatagttagcaggtttaaatgatgctttatatatatttcatataatgatactacctcaaaataatctactattcatattttttattctcaccctttctcccttcatctattttacttacagtaatatatttttaacgcatctatgattgtatcatatcttatgtcaaaattttagcattaatattcgtccttaatttataagtaacgctccgaggacttctaccacttgcttgtagagtcagccttttcctccatcaccttcatcatcctcgctaacggtgagaccacaaggaaaaagggacatgtttcttgttcgtttgtaagtaagtttggagagagttctatcatatgtttatggtcttttaggatgtttatgaagttaggcttgtttagagcctcttaatggctactccttttcatgaggtctcttatgaagcctcatttttcactaggctctttttaggatgtttattgacttatttgttgagattattggtgacgaagtcagtagccattttaggtcatggcgccgaattattcaatatcatcagtttgttgttatgtctatgaataaagtcttgctgatatttgtcaatatgatcatgcatatattagagtagtcaacgtgatgtgctcgtctatttgcaattcttacgatgttataatatatagagtatctttgatcttacgatgttagaattatgatgttataatgtatagagtatctttgcatctcctataatgttctaatacatggagtctcttttggtctgtgttacacattttttatttgtctccaatattactcttaaaacaacattatattgccttttttatatatttattactatactagccaaatgcatgtgcgttgcaacagtattgaaaatagcaaaattaagtcatggttgaaaaaaatatatttttaattggttgaaacacaacctttcaactaaaagaaacaaacaaaaatatcatgcttagaaaattaaagatctgcagtctacatagtacaaacaactccccaaaatcctaatatcataggccacacgtaagtgatggtgctggtggtagagtcaccacaaccactactatcttttaatagtagtatagatcatccatggaatccgtggataatcaattggttatcctacttaaaaaagggataattaatttgcatttcacacaaaaacactccgagaaaatcttataaattctgcaccattcgattgctttgagatttgtagagtactctaactctaaccccacctctcccccctcctcactcctaaagtcctagttccatcagcatgcccgtccattactcgacctcgcgcttggctagaagtcgccaatggtaccggcgaccccctgcctcggtgggccttatccgccaccccctcctcctcaagctggcagcaattagatgccctcgcctgttgtcttcctatctccagcagcgggagccatcggatccaccactaccggcctcctaactactctccttgccttgcccctgctaccagtggcccaccaccctccttcatctctacagcttcggtaccatcgtctcgctgacctgcctatgtttaccgcctttcacagtcatccctctaagcatgacgatttccccctcttctgccctcccctccatcctccttctaaagactagcttgttgagccaccgcggtcactaaagctagaggagtagttgcgcacgagtctgcaagcaaatcgactggttcaaaatatataaaaaaaatccccctcgatttttttgtcaaatattatttagcaaattacgagaatgcttcgtctcgaacgttcaatgtgggatgaaatattagatgcatcatcgagtgagtcccaccaccgaaccaatctcctaccttttcctctccactatcaaacctatccccgttcccctctctcgcatctcactctcttcctctccacctttcgctccctggctctcagttgcttcgctgagatgcaatagcaggaggccggctttccaacctccacgaccaccattggtgccttatcactaccgtatcccgtcgaatccaaccacgctaagctccgggcgttagatctgggctggatctagggaaaggggcgcactagtcatgaagggaggagctcggcctcatcttcgtcgccaacggcaacagggatgatggcatatgcaacatggatcaagcttcagcgcaagaaggcaatgggcaatctttatggcattggtaagtagagttgtcaagggatggcatcccgggcgtcaacacgttggcctactactagagaggaggaagaaatagatctagcctactgtttgttttcaatttttgatgtttcagctcaacgtattagatgtttcactagttaggtaaaaaatgttgcagtgattttttgtggtattctttttgccgaaatcattcggatctactgatgtttcagtggtccataaccgatgtgtcatatgttgtaccaaaatgtttcaagtgtaagttgattgtgtttaatcgtttagattgttgatgttcaaaagttgagacatttttgttcgaggaatgaaacctttttttctaaaatgatgaaacatgcggaacactttgcaacaatatgacgcaacaccgtccgacattttacgtctgacggagatggagtgcgactcgattgcggaatctgtgcgggaggaggaaaacggggacggcggcagagaggagaggggaggcgacgagaggtggattctcgaaggattggggggctttggcctttggggcggtggttgcgtctttgttggctatggtagtttgggtacacctgtagtttgggtacacctggcccggtggggtggaaacgtgagctcttcctctggttttgctttggaaaattggattctattctatgaccatctgtgattctaaatcgtcgatctcgggagcttttatcgtttgagccgctactccatcaatcctttcaaaagtacgagagattttggttggatttctacaaagacttatagtactacaatgtatcatatccaatcaaaatatctaatattttaagatgaaatgagtaaaaattgagctatccgaatgctattgacctaactataacctacgaaaactttgaaaaaaattaataataattcggaattagcaatgacataaatataggcatgcaaatgcctgcctgcaggattcgaactgaccaccaaaaggtgattaggtgaggatggaatttcacctccatccatgcatatcccatttgtatgctcttccgaccgagcacaaagccgttgacaccttattgatacacatgaacaatacttttccattattcttttctccttttcttttcaatttagtaacaagcattcacttgtgatctcactggacatgtatgctatgggctaacacaaacatggagaattttctagtatagagaaataaaagaagcaaataaaaataatttctatgtaaaatattaagcattaaacggtttaaaagctaatatctgaaaacaaactacaatgaaaaactaaaattaactctaaatttattaattttcaaaatgagtaaagtgcacggtcaatctctaaacttgtccatatgtgttatacatatttcgaaattctcaaaatgtattttgttctcaaacttgttaaggtatgtcattctagtccaaattactataacccttcagatcctatgttgcacacaaatgttagatttattttctttatattttgtactccctttttcttctcttattccttcatgttcttgtgaaaaaaaaagacaaaataagagaaggacaacacagagggaaagaaaaagaaagaaaaattgggatcagaatgtcagtgtagcatatcgctttagtgactatgtggcatgccatgtaggatcctcgaggggtcatggcaatttaagactgaaatgactcacttcgataagtttggataccaaaaatgcattttgagagtttgagaacccagatgacacaagcgaacaagtttaagaaccaacaacacacttcactctttttttagaacgggcttcactcttccaaaaattatttatttttagcactcgcgtttatgagctaacaataagacggtagtgttaatacgtttgttcgagcttttaaatagttagcatgtttaaatgattgctttatatatatttcatataatgatactacctcaaaataatctactattcattttttttattctcaccctttctccctgttagaataaatgggctaggcccaatttatttttattaaaatctcaaggggccataataaatcctatcttcctatatagtttatacctactaagaagcatttactcctataaagcaagacatgcaagaagccacatcatcaacaattttatgctattagatcatattagtacaaagataataaccattggatcaagaaactacttattcatccaattcaatcatttactagttattgcgcatggaaataatattcatatattatatattatactaacaatgacgcttggaaaaataaggcatgaattgtattgcagtaataacacaaggcatatataaatccacattatcatatattttgtatatacatagagttacacctaaccatttaaaactacaattttgtttgacaataaaactacaaaacccgcggcaaagacgcggggtgccaactagtgttaaagataataataccaccttggagattaaaagtggagtatctcaacttaaagagggagttattgaaggctccctattgaccggttgaggtgggggtcggatagccacgcgcgcgcgcgacaagccaggcgtgggcgtggcgtggcgggcgagcgctgccgctcggctctctctctctctccctccctctctctctctctctccttttgcaacggctgagaattcaattcgcgagattacctttgtgatgggcgggcgaatcaattctgattgatcgcatcattactgcggcaatggatgcgaatcctctctctccctgcgctattaggacgagacaacgacccaattcacgagattacctctgtgatgggtgggcgaatcaattctgattgatcgcatcattactgcggcaacggatgcgaatcctctctctccctgcgctattaggacgagacagcgacacacgaacaggctctccacgaattctctccattgctggttcatcctctgtgctgagaattcaattcacgagattacctctgtgatgggtgggggaatcaattctgattgatcgcatcgttactgcggcaacggatgcgaatcctctctctccttgcgctattaggacgagacagcgacacacgaataggctctccacgaattctctccattgctggttcatcctctgtgcctatgttgcttctgttcttccccggttctaatcgcttgcacgcacaagtgattgggacgagcagggcctccggaaccacacccttgcctgagatctgcacgggtaggcgggtgatcaggtttttggggagtgcttccgcacgactgctcttgctacttcctctgctcatcgtcgtcgtcgctatggcttctactggaggtgcacccggagcaggaggcggcgcttcgatcgacaacaccaacggaggcaattctgcctcacaatccaacggagggatattcactagatcgcttatttctgttaccatttgtttttcgtttcctaaaactattagttgcaatgctattgcgttatattgtcagtgttgatgcttattttactttaagcatgctcatggttatgtttagcttcatcactagatcgcttcacattgtgtatgtcatgtttattgtcttaatattttggattaaaatatgccgatttatgaccatatttccaacactcccttcatctattttacttacagtaataaatttttaacgcatctatgattgtatcatatcttatgtcaaaattttatcattcatgtttgtccttaatttataagtaacgctccgagaacttttgccacttgcttgtagagtcagccttttcctccatcaccttcatcatcctcactaaaggtgaggccacaaggaaaaagggacatgtttcttgttcgtttgtaagtaagtttggagagagttctatcatatgtttatggtcttttaggatgtttatgaagttaggcttgtttagagcctcttaatggctactccttttcatgaggtctcttatgaagcctcatttttcactaggctctttttaggatgtttattgacttatttgttgagattattggtgacgaagtcagtagccattttaggtcatggcgccgaattattcaatatcatcagtttgttgttatgtctatgaataaagtcttgctgatatttgtcaatatgatcatgcatatattagagtagtcaacgtgatgtgctcgtctatttgcaattcttacgatgttataatatatagagtatctttgatcttacgatgttataattatgatattataatgtatagagtatctttgcatctcctataatgttctaatacatggagtctcttttggtctgtgttacacattttttatttgtctccaatattactcttaaaacaacattatattgccttttttatatatttattactatactagccaaatgcatgtgcgttgcaacagtattgaaaatagcaaaattaagtcatggttgaaaaaaatatatttttaattggttgaaacacaacctttcaactaaaagaaacaaacaaaaatatcatgcttagaaaattaaagatctgcagtctacatagtacaaacaactccccaaaatcctaatatcataggccacacgtaagtgatggtgctggtggtagagtcaccacaaccactactatcttttaatagtagtatagatcatccatggaatccgtggataatcaattggttatcctacttaaaaaagggataattaatttgcatttcacacaaaaacactccgagaaaatcttataaattctgcaccattcgattgctttgagatttgtagagtactctaactctaaccccacctctcccccctcctcactcctaaagtcctagttccatcagcatgcccgtccattactcgacctcgcgcttggctagaagtcgccaatggtaccggcgaccccctgcctcggtgggccttatccgccaccccctcctcctcaagctggcagcaattagatgccctcgcctgttgtcttcctatctccagcagcgggagccatcggatccaccactaccggcctcctaactactctccttgccttgcccctgctaccagtggcccaccaccctccttcatctctacagcttcggtaccatcgtctcgctgacctgcctatgtttaccgcctttcacagtcatccctctaagcatgacgatttccccctcttctgccctcccctccatcctccttctaaagactagcttgttgagccaccgcggtcactaaagctagaggagtagttgcgcacgagtctgcaagcaaatcgactggttcaaaatatataaaaaaaatccccctcgatttttttgtcaaatattatttagcaaattacgagaatgcttcgtctcgaacgttcaatgtgggatgaaatattagatgcatcatcgagtgagtcccaccaccgaaccaatctcctaccttttcctctccactatcaaacctatccccgttcccctctctcgcatctcactctcttcctctccacctttcgctccctggctctcagttgcttcgctgagatgcaatagcaggaggccggctttccaacctccacgaccaccattggtgccttatcactaccgtatcccgtcgaatccaaccacgctaagctccgggcgttagatctgggctggatctagggaaaggggcgcactagtcatgaagggaggagctcggcctcatcttcgtcgccaacggcaacagggatgatggcatatgcaacatggatcaagcttcagcgcaagaaggcaatgggcaatctttatggcattggtaagtagagttgtcaagggatggcatcccgggcgtcaacacgttggcctactactagagaggaggaagaaatagatctagcctactgtttgttttcaatttttgatgtttcagctcaacgtattagatgtttcactagttaggtaaaaaatgttgcagtgattttttgtggtattctttttgccgaaatcattcggatctactgatgtttcagtggtccataaccgatgtgtcatatgttgtaccaaaatgtttcaagtgtaagttgattgtgtttaatcgtttagattgttgatgttcaaaagttgagacatttttgttcgaggaatgaaacctttttttctaaaatgatgaaacatgcggaacactttgcaacaatatgacgcaacaccgtccgacattttacgtctgacggagatggagtgcgactcgattgcggaatctgtgcgggaggaggaaaacggggacggcggcagagaggagaggggaggcgacgagaggtggattctcgaaggattggggggctttggcctttggggcggtggttgcgtctttgttggctatggtagtttgggtacacctgtagtttgggtacacctggcccggtggggtggaaacgtgagctcttcctctggttttgctttggaaaattggattctattctatgaccatctgtgattctaaatcgtcgatctcgggagcttttatcgtttgagccgctactccatcaatcctttcaaaagtacgagagattttggttggatttctacaaagacttatagtactacaatgtatcatatccaatcaaaatatctaatattttaagatgaaatgagtaaaaattgagctatccgaatgctattgacctaactataacctacgaaaactttgaaaaaaattaataataattcggaattagcaatgacataaatataggcatgcaaatgcctgcctgcaggattcgaactgaccaccaaaaggtgattaggtgaggatggaatttcacctccatccatgcatatcccatttgtatgctcttccgaccgagcacaaagccgttgacaccttattgatacacatgaacaatacttttccattattcttttctccttttcttttcaatttagtaacaagcattcacttgtgatctcactggacatgtatgctatgggctaacacaaacatggagaattttctagtttagagaaataaaagaagcaaataaaaataatttctatgtaaaatattaagcattaaacgggttaaaaagctatatct

SEQ ID NO: 4705 - DNA, 25192 bp, Oryza sativa
  unsure (1)..(25192): unsure at all n locations
atgcaccatgcaaagctgaaatgtgacaactaattagacatgtcacgtttgaaaacaaatgtgtgcagaaagcgagatggtatgatagagcataccataaaacggtcgcattcctcattatagaacttccctttgttctgtccatactggattttcaactctaaccatggattcttatagcggtctaacttcttcccgatggctctcataatttcatccttccgtgatatcctggcctctcccctttcaatattcttgataattctatcataatctggttggacagtcaataataatgatcagccaataatcttcagttctcaactcaccattcaccacataagaaattagctgtttggtgaagatttatgtactaattaacaatttattaatcatgtatactcaattgaaacacttgcttaccactcagttccttgtatctctccttgaaaactttagcatatcgttgaacttcctcctctgtcttcccctccatttcagcggcaatactcctaatatcatttcgaccatacttctcacatgcacgaataaatgtgttgaagtctctcctcgtccatgttgcaaaaccctatgattttgcaaaccgaaaacaaaaccagagttaaagacaagtatggacaaaagaggcaggtaaggaaatccagaaagcattgccacctacctcttctaacaactgctctttctcttcctgctcctccgcagtcaaaggctccagctgatctgagtatcgtgcaagtattatatacattagcatgattgagctggatgatgttatgcacaattataacttagaaagcgagaatcagcggtaccttcatcttcaccatcaatagtatctttcttctggtttgcttgctggaataatttttctcaagttagcattgggattatcaataataattggcaaacaattaactgagtacgggaacaatgctatttaatcggactggcacattagacacaacatggagtccaagagctagtttctcaacatctagcaaaacaatacaagcattttagctaggaaattaccataaggtaccggacttccttttcatacaattcattgagcctttggttgttgaagaactggaaatcatgtctgacaaacaaaaacaatatgagctgacagtagttctaaagagagcaaacaaggtaatcatgatttttttttcacaaaatgaaagaggcaagagaaaacttacaggtgcggcattcttggaattcgtggttccctaggttttgcaggtgcaccttggcgaagtgcttgcttaaagtattcagactcagagtagctagagtaacaaacaaaattaggtcagtttgagcaccagacgtgtgcatgcacacatagagatagagacttactttctcttcctttctcttctaggtggctctatccagttatcactgaccagtttcttaaaatcaagcttgttttcctccttcaagaaatcaagaatgtaaatggaattaagtaaacttccaaactgacagcagagaaataaagtaagagattgttaccttatcatcatcaaaatcatacaattccgcagctgcataaaaagactaagttagacctgagtgatagaaagaaagagactgcgggagaagggtacatactgtcatccattttaaatttaatagcatcctctgtgaactttttcatttttgcatcaagctcagctgttgtttcctctcctttagctatgatacggtcaatatcctcatctgtaattgtgctgtccttggaactgaataccatttccgcaccaaatcttaccatttgcaacagatcatccttattgacagctgaaagaagaacaaaataaatccatatcttactactgcatgaatgccttcttaaacataaaatacaagcagcaaaaacatactcttctgctctgccagtcggccttgttgaatgaccaaagcatccaatgcaagcttcttgtatgccctctcaatcactttctcctcgatggtatactgaaattaagttttcgtcatcctatcttagatatcaatacaaaagattgttacgtaatattctaaagaaaagattgacaaacctcagtgcaaaatcggaaaacttgaacttctttcttctgacctatcctatgtgcacggtcttgagcttgcagatcagcttgtggattcctgaagacatcaacacattaacactaaatattcaacatacatattcatgggttcagaagaaaacaatttgcacataacagcataccaatcactatcataaagaaccacaacatcagcagtagcaaggttgatgccaaggccaccagccctggttgaaagcaaaaaaacaaacttttcactgcctggtttgttgaaagcttcaatggatgcatcacgatcttctccaccagtatttccatctatccggcaatactgatagcctctgtacataagataatcttccaatatatccaaaagcctggtcatctgtagaatggacataaatgtcaaagtcaaacacaagatttgaagaaaccaaattatgtgtgacgttaacatgcttaggaacaatagagaactcagatcatatccacacatgaattatgtacatgttatacacagctaagtatcataaaatcaatgcacgtagtataaaagccatttgaatctcatgaggatggaatataatcacctgtgagaaaatgagcaccctagaatcacgatccttcagtttgggcagcaatttatctaacagaaccatttttcctacagatattgtgaggagggaaggttaaatattgaactgtacctttggcaacagtacaatggaaattgtgacatgaacataccagcattctcaactagatgttcaccagttgtgtaaggtggaccaggttctgctccttggaataaatatggatggttgcagcacttgcgcaactgcatggctatgttaagcaatcttttgcgttcaccaccagcattaataacctccaaatctttctgaagcagggcacgatagtactgcttttgcatctgagacattccaaccttaaggatagtttcctttttggggggtaatcccttttcaacatcagatttaagccttcgaagaagaaatgggcgaagaaccttcatagaagaatttacatgaatgaactatgcaggttgtcccaaattattagcataatgagccattgagcatgggagttatattactcaccttatgaagctgttgaacaacctcctgctgatcattttcaccagaaatttgaaaccattcatcaaatgtttcagcagagctaaatatttcaggcaacaagaagttgaggagagaccaaagctcatggagattattctgcaaacatcaatcatagcatcaacgaattatcagaataaaagcaaaaaaatgcttgaggatgtaaaccaacataattactttgaccatggctacagtccaaaaaaagagcacagccaggggagacctacctggagtggtgtgcctgtgataaggagacgataattagtattataaatcctcattgtcttggacagaagagaattctcattttttatgcgatgtgcttcatcaataataatgtaacgccagctgaaacgcttcagtgtagttttttctttgattgccatttcaaaactagtgacacacacatcaaattttcctggctgcaataggttctcccttatatggttctgaccaaacagaatgcaaaatgttcagtacaacatcagaagttgttcataagaatggttggagagcggaggctaagtaaactaaccctctcttctggattccctaagaatttcacagcacgtagaatagggcaaaaccgttgaatttcctttatccagttgccaagagtagactttggtgcaacaaccatgtgcggaccagttattcccctgaattcatgcagatagcccagcagcgaaatagtttgaagagttttcccaagaccctgaatgatgattttataagtataagcacagtatcattcaataatatattggggacattttattgactttggcttaggagtacacaactaacataccatttcatcagccaatataccattgataccattctcgtacaaccgtatgagccaattaagcccagctagttggtagtctcgcatcttcccctttatacctgcagagcaaaaaatatattacattttaacaatttattattcaacttatattaacagaatggtggcagcatactcttatgatacagttacaaataattgtgaagggaaaggagctcacatgaaggctgtgaaagcaagcgtgttccccctgaaccagcaagggcatcttcctcttctttaaggtattcttcatcttcctcctcttctgtcatctttgaggcatggcgtcccctacagtttaccaatgttagacaatcaaatcatggaacatcaaaaaagaggcacaagattcctaaaatcaattacatattatgaccctgcacataaatagcaggtgatgtgtcccaaatgcccataagaactataactatgcaaggttaattgtatggctaaacaaatgtattcagaatttccttaatcccacaaattgaagtaataataatatagttaaaataaacattatgttgcattcttaaaatcattaattcacaatttcgtaataccaaccagatgaagagaccaacaattactgatatctacaaacatatcaaacagaaatgtttaccatgtacgtttgaaacaccagtccttcagtatggaattattttaacatattccagcatcaaagtacacattctaaattatatcccagttccagcagcacgacaaacaacagcaaagatctatgcaatttccaggatggttgaacacacaaagtaaagtactatctacacaaacaaaaccagttttaccttccacgcggtttcttctcttttgattggttccctttggcaaaatgtgcaaatatttcagtttgctgcagtaggtacttcaatcgtcctttccctttattgttctgttaaaaaaatattaatcagggcaaaaggcaacatacacaaaggtattcaaagcaggttgaaataaattatgtgcacatgatatgccatatcatgtgctgaaaggcatttgtattgacggattcttataggagcaaaccatgtcagcatcaactgcagcattctgtgtatccaatatttcttgtattttctgcttcttcaatttctgcatttccttgagcctggctttctcacgtttccctactactgcacctccttcagcctgtaatgggaaaagttaggcaggactcgacaattcagaaactaaaccctacttattgctcctaataattttgcgtagaaatacacagaatgacacttaaatgacagctacattgcagcacataatgcaaggaaactcccactgttaacacaaccttaattcactgacaacaaaatagaggcaaagctagaaaaaaaatgcaggcataggaaatggccccccaaactcgtacaatttacagaagcagctcaatatattaccaaaatattataaatctaatgggcaccacccgaatcccggttcgaccacccaaaccctagccccctcagctcacctcatctgcgtcgtcgtcctcccccacgacggcctcgtcgtcctcagtggactgcgactcctcatcgccctccccgggggcggcggcggccgcaccgctttcctcctcttcctcgtcggcgccggcaccggtggtgacggcttcgatctcctcctcatccacctcctcctcttccccaccagccgcctcgccggccgccgccgcgggcgcctcctcctcctcctcatcctcctcctcgccagatccggacccggcgccgtccgactgctcctcctcctcctcgccggaggacgagacctcctcctcctcctcgtcgtacttcaccggcttcgccattggggcggcggtggcgggctagggtttcgtagattcgattcgagcgcggaatgtgtcgacggaggcggtgggggttcgaaggaccgagcgatttgggggaaaagggaggagagcgcagctaatttatacgagtggccttgtatccgcaattttttggcagtttgcattttgccccttttctattgcagtattgcatattaatcttacattcgttctaaaattttgatttttttttttgccaggacataatgcaaactacgtgactttctgaagtattagctatttatttcattctaaattctactagtactgcaaataaaagtaatctctagtggaattcaacataattaagcctcgttgcttctattgagtcctaactgaaaaataactatgtgaactcgtagagaaaatattataaattttaattaagcaaaaaagcacattattgatactaattttcccaaaagttttcgggcttggctacaaaatcctcgaggacagcagcaaaagatatgtctgtctcaaaaagaaatactaccagcggcaaaagtggaagtgccttcatagccgatcggaggctatggaacgaaatactgacgtgtcagggatgcatgtgaaaaaatgcagcacgaaatgaaattctcgggagcacgagcgcgagggattctcccgtgaacgtggtccatggcgagcctttcctcagtgggtcccagcgtcagggtcacagttccggtggcctaccgaagaccacgcgtacgaagcgtatttagcaagagggaagtgggcggggctccgttcccgccaacgaggcggggatgggtttgaggcatcccgcccgccgactttgggttcggatccgtccggaccggacgaaggcggttgggttcgaccaggttttgcattctggtgcgaccgacgaacggcccgagcccacggttggtagctgtgggaccatcctgtatagacacgttcgaagtcatgctgggccagcctttggtattggtagccccgtttttcttttggtattggtattgttttttcttttggtaaacgatcgaaattccttttttttttgttgataggacaaaagttgccgattcactctgataactcctagagttcccttggttcatgttttgtaaaaggaatagttctatcgtataagatttcttattataccctggaaatggatttttgtcctttgaggggacatcctctcattttatgtatggcgttcagaaagttattaaaaaatttattaagatagattaatatatgatatatctttttgtaaacatgcgagttaaaattcgacttatacaatttgaaacaaaaataacaaatttgactgtgaattacgctttctattcatagtcaaatttgttatttttggttttacttgtataagtttaattttaatatgtatatttgtgaagtgacatatcatatattaatctatcctactaaattttttaatgactttttaagtgacatgaaaaagggatatctcttatgggtgtttggcaccctattttcccaaccgatctccctcgttttccgtgcacaagtttttcaaattgctaaacggtgcgtttttttgcaaaaaaatttctatacgaaagttgcttaaaaaatcaaattaatctatttttgaaaaaatagctaatacttaattaatcacgcgctaattgaccgttccgttatccgcgcatatttcggttgggaacatggatgggcgaacacaccctaagggatgatttgagatttccattataccttgttttttacatgtatatagtcttctcaactgttcaccaatgatgatgacggccccatcgtttggctttttctctaataagtcaaaacggggcttattagggaataaaaataaatttgtatataaaatttttatagatgtgttcttggtgacttaaaagtcaatgctgaaaaagaaattacgttgaaaatatctcaaaattaatatcaaaattaagtttgaaaatttaaaatttggctttttttttggctgaataggccatccgatgggagcctgattcttgatgtaaagttgtcaattcctttcgttcttgtagctgttttgtgtttatcttaataaaaatgataaacaggtattgaagtagtccaagaggcaccaaatggcatctctagcatcaaggagattgagatatttttgttgcttggtgggaaaaagatttggcaaccgattaaatttggagagctgtcgccgcgttgaatgcaatcagggagcaagatttggacaagatgtcatcatcatcatcatcgggttggagctccaagaaggtgtgcgtcgtcggcgccgggatggcggggctggcggcggcgcgcgagctgcggcgagagggcctcgacgtgacggtgctcgagcagagcgccgacgtcggcgggcagtggctgtacgacgcggcgaccgacggccgcgacccgctcggcatggccggcgtgcacagcagcatttactcctcgctccgtctcaacagcccgagggaggtctgcggcttctccgacttcccgttccgccccaccaatggcggcggcggcgacgcgcggcggtaccccgtccacggcgagctcctcaggtatatccgggagttctgcgacgtgttcggccttatggacgccgtcaggctcgacacgacggtcgtgcgcgtcgccatggcgccgccacggcgcgacggctcgttgcggtggacggtgaggagcaagcacaacggcgatgcggagacggaggaggtgttcgacgccgtcgtcgtggccaccgggcaatactcccagccaaggcttccaagcatcgacggcatggataagtggaggaggaggcagctgcatagccactcgtaccgcgtcccggactccttcgccggcgaggtcgtcgtcatcgttggttgcaacttgagcggtaaggaagtcgccctggagctcctccgcgtcgccaaggaggtgcacctgagctccaagtcgacgaaggaggccatgacgccgtcgatgtccaagatgctcgccaggtacgacaaccttcacctgcaaccactggtcgaacacctgtgcgaggacggccgggtggtgttcgacgacggctcgttcgtcgtcgccgacgccgtcatctacggaggggaaggtcaccgtcgacgacaaccgcgtcgggccgctgtacgagcacgtgttcccaccggcgctcgcgccgtcgctctccttcgtgggcatcccggtcaaggtgatcctgccgcggttcgccgaggtgcaggcgaggtgggtggcgcaggtgctgtccgggcggaggacgctgccgtcgccgggggagatgctgcgcgccgtcgaggagtacaaccgcgccaaggaggccgccggcttgccgaagcggcagacgcacgacctgttcttggacctggagtactgcgacgagtacggcgagcgccactgcggcttcccgcggacggagcagtggaagaaggagctgatttggtcgtccatctccgacatgtgcgacgacatcgagaacttccgcgacgactaccacgacagcgacatcgtccgcgacggccggcgcctgcacggctgggcttcctctcctcccctcgcgccgcggccgcaggagaaggacgacgaccatgacaaagaagaagacaagcatttgggatttggccctagtaaattcagcttaagataagcaaacgaaattaaatgaactccttattttgttcactttatctaattattattactaccgtagtttactactccctccggtcataaaaaatatttaatgcaatcatttatcttatcaataaaaaatatataatattacttattttgtaataacttattctatcactaaaggtacttaaatttttatttgttccaaaattttttatcagagaatggttaaagtcaactatatcaaacatatggctgaatcaggtgtacttaggacttgtttggatgactactccaacttgccaagccacaagtttggtgaacgatttgagagccacaacttagaccaaaaaacatgtggcaaagtagttcatgagcacataacttcttatggcaagctaatatgtggtaagcaaacaaacaatatgctaactacctgtggcgcgtcaaacttgaggcgccgcaaactgtggcacctatcaaacaggcccttaccaacaccagaagtttcattttatgacactgtcatatgactggcagtatgtatatgtcacatacatacaaacttgtgcttctgagaagcctccccgtggaatccatgcaatttttctgatgcaaatcgtttttcagtttatttctataagggagtttaccatgatgtaaaagaaaacctgtttgatcacgtgatacaagctataagtataagtatttatagaactagaaaatgccccacacattgccacgggacgcaagattacttgtctccaacattagattaaagcaatgcatggtatatatttatttttgtatggttatatgatttttataggaaaagaaatgtattcagtttgaaaggaggatgatcatttgagggtttgcagtagtggacacaaggattttccttcatctgtaccattagtttttttttaatctatatctatactaataaaaaaggagaagttttgcatagcaatcctaccgtgaaatcaaaggaatggcagcccacacatgggatccctgccaccgcaaattcctccacgcgagctaaatcctcagcaaatcgcttcccccaatcacgccgcgcccactatatccctaacatgcacctccactctgagccacggctgcggccttgcgatggcctcatgctccaatccctagctatcccttctcctaccgtctcgccatcgacgaccaccatatcaccctcactatcccctctcccacaactgtgtctaccattgttgtccctgaaggaggaagcgcggaagcgccagcttcacgatagcagtagaccaaggatcccttccattgaacctacatcgatgactgaaaagtcggcccgcttccctccctgttgccgccgcggtccccgctcggcaccgcatcacggtgacagcaacatcagccgccgcgcgccggacccaaaatcagcgatgtccctgttttggtgttgtccatctcgccgttctgtggcactgtgatgtagaggctagggctcatggagcttccttagtcacaccgttgttgcatgaatacaagagcgtgagggtccttccctggtcgcgccatgagcgagcgcgcggtgttgcatgaatcagtcgcctcactgtttttccaccatccctatatctggaggcctcactattttcccaccttcgcactctagagcgtgcaaacgacagaaacaacaaatcgggctcccaatctccctttctcaagctcacatgatatgctttttattgccaacatgtcatgctttcgtgggctcttatatgatagcttccaacaaataatttagttaattttactggcaactctgatattcttcaagttgttaggaatggagattatgaacttatcatgatggacatcacgttgggtttcaatcattaaataatgcttcaactgaataatgtgctatcaaaggttcgtcagtcaaaaaatggtgtttatcctatttgagtgcgaatcttcatcatgctacaagcaaataagcaatgtgctgtgaaagaacccactgtttgtttttacagtatacaattccaatcccatttaattgctaatcttttgcttttgattgagttactgtaacatgaagtagcagatatttatttattatttttaccaggctggtgtctgtttacttttgtcggtgacatgggaccggggatatcttgactagaggtttggggcagccgcggtcacccacgtggcctgaccccctcgggggggtcgggcccgagggtgatgaggccgcccctccctctatctccccgaggggtcgggccgctcccgtttcgtccccgagggctggggcgccccgaccccctgagggtttggcgccacgtgtgtgggttaggtgagcacagcggcgcttacctaaccgcgtttattgcgggttggacgagcgccccacgccgcatttaatgtagtgcagcacactcatccggtccgtgatcggtcacagtgtgtgaccggtcacagaccggtcagatcgcgggttagggggcaacaggcgggctgacacacgccttgccccgttccgttggaatgatgagagcctccaggcactcgtccctagccggagccggcgtgggaactcctggagttggcacgtcagccccggccagatacattccaggcttcatcgcaaccattgcaaggaagtcattgtatgaagaagggcagacgtgtagcatgctaaactgacacgtggtggacaagaatgaccggtctgtgactggtctgacgccggtcgcgtcatcggcaaacaaccgtgcttccacgttgcacctgcttccggcggagtggaggttggtatgacccatcccatcggagggtcattcggacaacagccattgcaaatctccgcccattaatgagggaggacagggttatcccggtgtcaggcaaaggtacgagccaagttttggtcaaagtaggatgggtccccacccaaaagaatggtaggtagaaatggtgtatgtggtatccccttgagatataaaaggaggaccatgcctaccaagagaggggacggacaaaaagactggagaagacctgagctcgtagaggggactggggaaaaagagtagggagagggtctctagagtttgaactctcttgctctccagctctttgtaactccttcatacacagatccaccagaacacaggagtagggtattacgcttctcagcggcccgaacctgtctacatcgcccgtgtcttgcgcatttgctctctcgcgaaccattccacagatcaagggcttagaacctcacccagcgcccctggccgaaccggcaaaggggggcccgcgcggtctcccggtgaggagccccacgctccgtcaactttgatttcacttgtttcatgttgtgcggtacatggtacccaggtacacacggcaaggccttgggccgtgaagcatggggtgggccgagtgccctaggcccatgcggactgcttggtgattaagaaagggattaaaagacaaggctatagatcttatcgtgtaggcacgcggacaccgcacgatgcacctccccgaatcgtggctgctgcacactactgaacttgtgcaacgccattcgtccaactcattgatcccacggagcatgttgcaccacgcaatgcgaccgggcagctccgcgtcgcgccagcagtgtcgcacgcaacgggccagtccacgctatgccccactgcgccgtttctctcggccgaccccgcaccgctcctctcggccgagctcgagccagcatcgcgctgtgccaccatctttcgcaccaagttgttaacgccaaaatttggtaagcccctaggagaattatcacattatcaatagttggattcctgctatattcggttaagaaaattaatttatcaaatgaagcttatccagaagtgaccgagttcaaggaggatgcggcatgccaagttatctattaattaggaatagtttgttagtttctttttatctttaggaaagtgtgtttagtgtcttataaggactttatgttttccttttatctttagaaaaatttctttcttgtcctataaggactagtatctacccatgggtataaatatgtacacccgaggtcattgtaaatcatctctcgatcaatactactctcggcgcatcgccaccctctttcccgaggtttttacttatcatccggcggaatttggcacctgacgcggggctgcatcggttcagttcaatctccggcgaaggggtaagtcctacgttccgccggccctagtgaatctattggctacgttggtgttgttcaaggctgcatcgcttcgatctcttggatcgctctggtttggttgatatatttgcctacctgatatctcaattctatctctaattgcattatgtttagagacacatcggtttagttggaactgtctcggttaggtctgatcttctgtcttagccgacatatctctacaatcacaatgctgttgtaaatagatttgttctatccatcacattagacagatctattggctcatcgagtattagattatcatatacaatcttgtgctgcatcggttaggttcgacctactagattgttgataatataaatcggttaggttcatgctagtgttttatcaggatactagccgataagttttttggacgttgcattggcttataaggattgcatatacatataagttggatttagccgatgacaacagaggtttcattgatttatctaatctcgtggattttatgatatcggacctctagccgatgtatgctttaaccatcggatcagtacttgttctatgatatcatattgttagccgattggtttttctactggattatattattgttatattgcatcatcatcagccaactgcctttatatcattatctacattggatatattgccaatagctcaaaaccctatcgatatcggctggaattactccattggcttgtcagccgatcggctcattgatctgctatttgtatatcttgtcagttgcagggtcaaattgactggcacgcccgcatcctatcaacctttggactgtactggagctaagcagatctcccaggccagtgtgtgtttttcgcgtcaacacaggtcgaacccgactgtgtgacgtgccaagctgcatcgcccttccccatgtgctgcaccaatcaccacccatatccccctcgctgatgttcttcctttgactccctcgcctcgtcatcgagtctcatccccggccccgctgccacagcacatcactgaccaaacatcaacacaacagatcagcatgccgccactaccgaatatccatctcactgagcagcaccctccgctccgtagaaaaatcaccgcgcctcctcacctcggccggccctgcctcagcattgtgtctcgtcgctggtcccgcatcactgccaccgcgcggacccgctcagccatactgccgctgcgagatcgttgacccaaaacaccacgcgcgacctccttctggcgccgtctcctcctctgcacagaagtctagcgcctctgtcactgttcagccccgcttgaccttgctacagcaccggataagccgactcaacggcgaacaccaagaatcgccatctcgccacaccgtccatcccgccgctcagtgaatctgtggtcgagtagccaaccccctcctcggcgccaatggattgcatcgaacaccaagaagcggacacccaacactccttgttcaccaccacaaccacgccacctcaccatcaatccaatccagaagcttcctatccgtcaccgacaagtggaacccaccgtctcgttgcctccccattccacatcttctcaagcaagccttcgtagcctacaaataccaaattcccaaactctccgtgtctcggcccaaaccgagctcaaactcaagcgagcatccatggtcaccttcctaaccaccaccacctagctgcctcatctctcttttccttcatccacctacaccccaagcttccaaaagaccatcgccacagttgcccaaccttcccttacactagctcggctccaccattctgcgacaagtactggacattctgttgaacacctaattggcatccaggagcatgcagtcctattttttctccaccgccactgtgatcggccacatttcgcccctgcttcaccatggtaaaataactctctcctttagaatccccttcattccctacatttcattattcatgtttcctcgaccgattgcaccatctagaaccatcaccaccctggagcccttcgctcgtgtcgcttcctccctagagcgacacaagaagcgaccgaaaaacaccgccgccgcttctccttcttcctcctcccaccttgccgctgctcgagtggcacgtcggcaaagtcggccgaccatgaggatggcggcatcagggctttcccctctctctcaaggaaggatgaagaggtgatgccgcctagatccaggccctgctcgtcctgatccggcgaggagcggtgagagggcccccatcagatgatttggatggtggccaaggcatccaagcttgaggagggagtggggcatcaatagccaaatctggatcctgcgcagccagacccgatgccctagtcccactggtggatacggaacatccacgctgaatttggccggagttgctggagcggtggagcatcagcagtgggaggcctacacggacgtctacgggggaggccctggcggttggtggcaacgggatgctgtagcagccagtggcaaggaggtcagcacgagcaacaatggcggaagggctgtgacggctggcggcaacggaaggctcacccgactgtggtggtggcggggccttctctctgggcgcatggagatgcgcaggggctgcaaccgcatggcggatgactagcacgcgtggacggcccattaatttcacttgtaaattgctttaaattttaatataaattctaggaatgatttatttaatgatttttaaaccccaaaagaaaattggggtgtgacagagctctcctccatgaggaataagccattcggggcagcggttggcttcgaggaataggcggttgagacactcctcgacatggcaaagcttttgacacaagtggcatggggcggcggtgagcattggacagaggatggcaacaagcgacggagcgaggacgcagcatggggaacacaatatttggtgcggcgagctcgtgaaggtgtgtgtgtggggggggatgtctagtggtcccttttataggcttgaggggccatgaacaaggtgggagctgcggtaaccgtcagtagatgtaggtggcgatgtgggcagggtgtgggctcaagtcagcgcctatttttgtcgggagagagggggatgtgggtgtgaatatggcgatgaccaaatttgcgttgtttgagagtgagggaaggagcggtgctcgtggatcaggtgggtacgtgggagctacagcggtcgtcgacttcggctagtggtaggaaatgagcctgacaggtgggcctcggtcctacctatcattgagaggaggaaaggcaagccaagcatgcccggcgtgggaggtgggaggaaaggctgaatcgggtgtgggtgagatgggctgacaggttggtgaccccaaaaggagggggcgtgctgagttaggagttgggctagcaaataagactgggccatggggaaagagaaacaaagagagatgttgagcgacctgcgactgcgagagagaggggaagaaggaggagcgggtgggccagactactattggtcacgtgcgatgaggagtgggtcggaaatgatggcccacctggaaatgaggacttttaattggtttttcaatttaaatattctctgaaatggactttgtgctattaaaatttgatgttgatctctgaaaattctgagaaaattatattaattattttagggcatggataatacgagaaaaatattcccaatcatgatttattaaaggaaatgttattttctgaattaacttcacttgtaaatttctttttattttaatataaattctagaaataaattattaaatgatttttaaatccctgaaggaaaatcaggcatgacttactcctacctcggagttaggcctctaacagtcaaaaattctatcgcaggtctataaaactaactagatcggatactttgatcccaacataggaaactccgattttaaatggcaagccagactgagaaccaagttcctcccacgaatactcaaatggattagacagtccgatagaggtcggatagtgtgatgttgctaagataaaaatataagaactttttactccagagtttgattttgatgatcttggattccatgtaaaggttggttatagggctatcaaatccatcataaacaattgtccaaagataaatcattttgagaacttaagcaaacacatttgtattcatcttaccagtacaacattcctatactcaatccagattttaattaaaaacaccgagaccggtaaaggatttgaaaaaggatgcttagtttcattatacctttgccttgtgcttcttcttgtggacttagctggacaacgcataccactctgtttagtcacattcatttattatgatgtttggtcacattcatttcttccagccacttgatgcctttcaacttatgacgatatcaatcactgttgatgtggatcaacacatgattcccatgtttcagctcttcatcttgagacatacgtgactgttgatggtcattatcgatcagtttcgaccatcaatattatcaaaataaaggagaactagtgatgcttgcaatacataaatatgttagatattatcaggggaggttgggccgaacctcccttgacgctgttggatccaggttttggctggacggcatggatcactccccaataacggttggagggcaattccgaccattccaactaccacaaccgtcattggcagcctatttaaggagctcctctcctcacttcactcacacacctcaagcaagagctctctcattcctctcaagtttagtttagtagtatctagctggtggaatagaattagaataggaatcaggagtctggaagccttcggaagagttcgggtatggctctagtagctttcctttcctcttttgtaagctttgtactttcattagaatactcttctagatacatttctggtattgaaatattttccgagtatatgagtaccttctttatattatgttcatgttatactgaatatactgctagcttatctgggatatgctttggtgcaggtatagtgtttgcttatgcaattattctatatcatgacgatgatattagagtagtatctggtaatttagacgtggtgtctagattacgggatatcattatttggggttatatattgcggatgagaggtgggccgctgatggtgacagctcagtacgagtattcctccgtgcctatatataatccttagttaatttcctggggagggtattcctctgtatttagccccggttggatggtcatgacgggctgtcgtaaagaactcgacagtcaggggtggcttctcgaagtaccaggaaggcatcggataaatggtattagctagtatatcagttaactagaatgtatgtatactatgtatattagaagtataggaatagattctctttctcttttctttccacctagcttagattatttattatgaggataagtagaaaagcttgtgtgtcactctacccttggattatcataacccctgcttagaatatgattatcacaagtaatatataaattattagttgagttctctctacatgatctttccacgtgataaaataaatacgatacccttggaatactctcgggtgaaatgctataatggtatattcgtgtgcttgcggatgaactctgtaaccataatataccagaagtatttctgcgccattgctgggaattatatttctagtaacgtcgttaagaaataccaacagtgacttgatctcacttgagcatcaacattattttcatttcttggtatctatttctttcattcaactcaataaaactgttagtcccaatgatctggtagtcaacctccacttgttgaccaaccgatcgcatataaaatgatatgaataaattgatgaaaatcaacaacaccacaaatgtcatatactcacacatatacacaaatgtaaagatctcaattaaataaaattgattaacttggatcacacacatgcataataaaatataagatatacttcccccaaaatatatgcatacaaaatatttcgagtgaaataggtgtatgcataatttttgatgaatccatgggagtttatcctatacaagaaaagaaagcatgtgtaaagagagtatagcttgatttcgatgtgtttcatccttattgagattaaagtcaaccatcaatggatacatttctatcccaactcatatgacatccgagaacaacctatttgccaactcatggaaaaaagtaagtcacagtaacctggtttgtcataaatcaccagaacaacatttacacattattgaccatagatcttttgatcatttccgttttggtgttggatgacaatccaatataaaatatgatcatttcctttttggtgatggatgacaatccaatataaaatatttagagttcctcaccctatttgggaaccattagagagataatttagaacacgaggaatttaacacgtacctctcatcatttttatttttcatattaattgagactatgcaaaataaatgtttatatataaaagataatagtatcatataattggatttggcattagtcaccaaaactaatccaattgcacttgaacttacatcgtcgtcgtctgagttaccacgcccgagccgccacggtggtcgagcaactgggggaggcgcttcaccagcactggtatggacttggtggtgatgatgaaggagactcaccagcgctggatccctgtggcggtgtggtcgacgtcgtcgtcaccctccccttcatcatcgccgccgagtcctccacttgctgaggctcaccaaagctgcctgctactgccagatcttgcggtcccgaggcctaccaccgtcaactctgatggtaccgaggctagcccaccaccgtcgttaggatctttcgctggtagatccaccatcctgagctacggggagctgcagtcgttgccggtcatcaccattgcctttacttgcttcctttcaatgtggagagagagagagagagagagagagttcatgaggtagtagtacggtaggcctgtttcaaaataggaagaggagaggaaggagaggcccgccaacacgatgactggctgctgtcgttcgggaggagagtgctggggggagggggggtggtgtcggtgactgagatggggatggagggaggggaaaaggagaagtgaggcaagggaggggctggccaggtttttcttttatttaagttggggttagctagaccggcctaaaagtcatctagaactactcctaatgtgtggaaccattacggataggagatacatctgtaacggctcctacaggagctattacagatgaggtgcaaccatttctaatggctcataatggaaagccattacaatcatgaggggctcgtttgtaacggctcctcaacttaaactgttacaaagttggtagatgacatatgtaacaactccatataactggagtcgttatagatcagtgctaatccctaatggcttgaatgtcactcgttatagacacgtgatatgtagcggcgcacttaagcccatcatagataatagatgtgaggatatgtggtagtgacaattaccgagtgtttttcactatttaattaccatgtgtttcgggcacaagggagagattcccttcttagtgtctgtagttttgatagagatcacgattactgtgtaaaataccatatcatagatggattttacgaaccatagtaattttacattccctgtggaggtaccataagctaccaaaaatttagggtaaaatttggtacctcctagtacctagataccaaaaggtaccaaattacaatagaaaaagtggtacctcctcaagtactataaaattgctcgcaagaatatatatactactctctccgtcctaaaatatatgcatttttagcataatgacaagtcaaacatttttaactttgactattaatagaaaaaaaataaaaaaagatcaaccatgtaaaattgatgttactagatttcttattaaacaaaatatcgtaatatgcaactcttcttatttgaaatattttacttttatagatattgttggtcaaaatagtatctcgaagatcgtgttagtcataaatgcttatattttagaacggatggagtaattcttttgatttatagatgtgagattttgacggaaatagcaaatccaccttttccagagatgatatattgtactaaacacatgcgtacgtggctagctgttattattatatattcataatatatgccagatatgtgcaagcacactttatggagctcgcgtggtatgttcctgtacaatgagatccaaggtcgaactaaagcaggtatgcaatttctagggctaattaagcaagcaaagcatatgatgaaaagatgatcaatatatcgtgtggcggatatatgcttaccatcgatgccattaccctgtagacaagctacttgaagtagaatgtttgccaggggccaattaggcacatatatgcgcacgatgtcactttggcctttcccgcttttggcatctggttcactgccccccggtgggtggctgcctataaatgcggggtgtaccatatacatgcaaccatgcagaaacgaagcggtcgcacgttcttgtgactgcacaacacaccaacacctcgatccctgtcaattctctctagcagcgcgcacggccaaaattcatgggcacgaacggcgcccagggctcaaaaggtgcgtcgtcgaccaccactaacccgacaaacgatgacaagaagaagaagccggctcaggcgcccggcgccgatgccgatgccgatggcggtggcaagaagaacaacagcgactacgtcgacaagacgctgtcgacgacggccaacctggtgaagctcctccccacgggcaccacgctggcgttccaggcgctggcgccgtccttcaccaaccacggcaggtgcctggccatcaaccgctacatctccggcggcctcatcgccttctgctgcgcgatctgcgcgctgctttccttcaccgacagcatcatcgacaggaagggccggccgtactacgggctagccttccccgccgacgaagacaccggcaagggcggcttcgtccccttcaactacgagaagccgcgccgtcccagcaacggcgccgccaccgccgccgccgacgacgacgatagctgggaagtttacttcgtggatttcgacccagaggacactggtggagaaaccctttgtagtcccggttcgtaaccccctttagtcccggtttccaaaccgggagtaccaatccgggactaaagatcgctatctttagtcccgggtgaaataactgggagtaaagatcgatctttagtcccggttggtgtcaccaaccgggactaaagatcgagctgaccttttttttttttgcatggatattggtactcccggttaaaccatgcatatatatgtttcaatacatatatatgcatacatatatatatatgtatatatatatatattatattatattatatgtatatacatgcataatatatatgtatttatacatatatatgttatgcaaatgcatatgtatatagatatatatatgaccaaaatatatttacattatagaaaatgtgtacacatgcatatagaaacatatgtagtcatgtattaattacaatccattatatgtcctagctagctacgatttcgacgtagtagtactcgctgctagctcagaagctaaggaccggtgaattgtgtttccgtcgtagtagaattcacccttgggatcaaggatttcttcgttgatgaatcccatgagttgttcttgaaccgccgcgataaattccttgtgtgtggtcaggttatccctcatgcgaataaactatatgaatgtatgaaattgattagtaattaaacaagaaatcgctacgtaatgaaattttgaatttatttgtacgtacatcgagctctcttgtggtgatgatttggtctgcaaggcagtggcaatactcgcacacgtaatagccgcacaagttagttccctgcttttgctttgcgcactacaaataaatgacaaacaacgagagatctaattaatatacacttgtatgtatttgaatcggagaaatataaatgttgatcatgtgtactcacaggaaatttgaacttccgcctaagtctttctctccatttgccgcggaccaaatgacggaaccgataccaagccctacatggagtttaaagctatgattcgtagtagcaattaacataacaagattttcttaattaacaaaggaacttatgacggtacctgtctataagttcgaaaaccttgtcaaacgtagactcttttttatccattgagtcatatacgttgacggtgcaggcctccaggtcgaagagtaaaagcacccagtggaatctgcaatgtgcgtgggatgcattacatatgaaacacttagcaagttcgtacgggaatgaaatttggtatgtaggaagacagtaaaattaaactaactctgtgttgtatggcaacagtatgaacgtcttgtaatgctgcgccttcaggagatggacgagattgtcctctgtttcttttggatattggtcgagcattgcgacgtttactttccgagggtcgatgaatccagtatcgaaaaccctccgccgtcgggccctttgaatctccattctacaacgataaaagggagtatattattttctatagtctacttatatacaatgacctaattagttaaaggagacgtatagtaagaaatctaactgaacgatatacttacaaaatccagcaactcataatagagacgtcgagggcgtccagctggtatagttcgtagattcccctgaaattgatccagagaatgtcatctccttgcaagaagtccgtgtccctgatcctcgctccgatcatctctctaccggtggcgctcatctccatgtacagctgatggaacttgtacatttgtgtgggtagggactgcagcagctcaggcttgacaagcggtttaccgagttcgtacatgtatttcacttccggcttttcgattggtgcgactcctagcaattgatccgtagttagaccggtgtcaagaataaattgttctatcgtcatttctttaccggtcacccaacggctcgatcttctgggttggttgctctccaaggctgaggacttgtttggactttccaagaaaatcttncttcagcgttcgcttatagtccg

SEQ ID NO: 4706 - DNA, 54414 bp, Oryza sativa
ggcagtatgagtacaagtgagtatttctttttccaatcatactattaagtgtgaatatatataactataattttcaaataactctgcacttgaacaggtacaaaataccattcattgcaaatgatggcacagctagccttgaacttgtgctatttgaaaagaaaggtacagaacttattggtaggactgctgaaactatgaaaaggcaatatgatatcaatcaaacacctccagaaataaaagcatggataggacataaattcacattcatagtgaaggttttgccgaacataactatcaacgctgatgaaccttcatttgaggtgctgacaattaaagaaagatttggaaggcaacattccagccaaggctttaaggcaactaagaatcttcccatcagttcaagttcatctcaacaactacataatttacctccactggtgcctatactatccaagaaaatacaacatgaggtaaaagagtagtactctttcttttattcatttttgtcggtgctacataatctcttactatttcctttcttttctttcttatttactgctcatcatcccagatagaaccaccccaagatattcaaagcatggaagttgaaccatataatttagaaacaagcactttgtcaggaaaaagagcttatgaagatccaaacagtacagatcaggtaaacaactgatcatatttaaattcatttgtttttcattcttcaatcatacaattaacctactaactgtactgtgcacaagcttggcaccatttcaatcaagtgtatttttttagataatggaatgaaatattcaagcaagtgtataccctgtggtcaacaactattctctatttacatgtactattcacatatatggctgacactaggggtctcatacttgccaaacctactgcctgcattgtgctaagtattgcatgagaaagaattgctggttccttagtaatatactttgataaggattctgtttttcttttttaggaaaatgatgaagaagaaagcactgactatggcttcattcagacaaagggcaaaaagaagcgttctacctgataacttctccaatcaagacagcctacttttgctatctatagtccaagatggacacttttgttatcctctcatctactagccaaattacttttggtgtatctagctctgactaagaacctagactgatctactagccagttactctaatacaaagttgacatggagctttattaaaatctttcattatttaagctctagatcaacatctagaggatgatgacgatgacgatgggttgcttggttccggcaaacgattacgaggacgtcggccgggttctcgagaatcctgtcgtcgtctcccgttgttgaagataatatgtcaatactcttcaaatgtctgtcacaaatagccactgtgttttgttcagattatacagtctatatcacactatatgtcacaaaaatcttttaaattttgtagtctactacagcaatcatgattgtgcactgtagtatcatgctataacttgcgcttttttttttagataatacttgcattgttgttaaactgattattctgtctcattagggtcaaatagcatggcccatccagtattgcacgcggctttgccgcgtgtttttttctagtgatgatcctaaagcatttcaatcattaaagagatgagtagataaaagagcaggataatagcttatataagtgccatgaattgaacacctaaactcccatgctctttcccaaaaaaacatcagccaaccttatttagagcatgccaaatggcaattttaggacttaggagtattactcaaaggtcagcggtataataataatcacaatgcaggtggaagatgctatgtacgcggtgtggccgcgtcgatcaggggcctcagtagcgtgtgctacgcgtggtatcctaactctcatcacaataattcatttcataaccaaaaaaaagaaaagaaataatcctttttaagacctggaaatccatatgatctaagatcctctataaaatgtcaaagtaaaaaccaaaaggatagattatgcactgcaatatctgagaatgggtcaatccaagcaaacagaacagtcccatgcaaacacgcatcagtgcagtggcggagacagcgtgggggctggggggtctatagaccccctaccccctaatagatcattagagcccccattaagaccccccctaaaatttaaatccatatatctattaaagggggctaaaatagactttatctgagattgttagaaggcccaaaagtctgaggagcccccactataattttatcctggctccgccactgcatcagtgtacatcagctaataagctaactatctaagtggaaagcaaaacaaatatctatctatccaaactagcagtgagaaaaaggaagaggaaataagaaatagtggcaactacatacatctgccttgtgatccaacaaaatcttcagtgtcttatccttgccattgttagcagcatgaaagagtggtgttccaaggccacagtctatgtcaacaggtatcccttttgaaagcaagaactctgttaccttacagcatcctgcagtgaatgagatgggccataaatcatggggaaacaaatactatataaattgagttatttgaataaacagttagtaccagtataatggacaaatcacaatagattacatgtgagatgtgaccgagtataaacagagcaaacctatacaactttgagtggtgatatataaactaaaagtatctagattagcaacacaataaaagataactgtgacgacatggttgaattaaatgtaatctattaatagtaatgcagtatcgtagaatcttgtacaacaatataattggtaatataacaaggaattggatagtgttcatatcaagggagacctgtgccagcagcatggtggagaactgtgcatcctctaacatctgcttttgttacatcaccaccatgatcaagaaaatactgcaccgtaggaacatcaccagactcagcagcggccataaacggtgttatatctgtaataaacagcacatcagtacacttggcacattatactgccaaaacatagacatggcagccgccaatttcatgaaaggatggtagagttagataataaccttcttttccagcaatattcacgtcaccccccaattcctccaccaagaacttgcaaacattcagatggccctggcatgccacggcgtgcagcatcccaatcccatgcttgttaagagctaagactgcatactgggtctttcctttctcgatcccaaggctctttaaaataccttctcgcaaataagaacaaaaagaagtcatcacagtgaggaagataatctgcgaatgaacagattaactaggtagaactcgaaaaagcgacgaatacgtgcaacgtgcaagaacctcactgagtcatgtgaacctatacttcatacttgcgacttgaaaaacatttttgtagagtactacctgctactcatcacacattagcacttggagaggtaactgtaatagaaagatgatcacaacgttgtcgcatttatccaacgcaaggacttgctacgataaaagcctcagatcttgcaatttctagataagatggcatgcatctccagtaatccatagacctggctgttaattccttcacgcagggtcaaaaatccatgcaacatataaacattaccgaaaataaattgtgggaaattcccaaaggcaacgagtgctagatacagaatttgcattccaaaattccatggccaaatcaattaacagtacagccatcgccaagcgctccacacaaggacacacatgcatcacccaaacctaagggaggaaaagcacgcaacacaggcgcatgcaaagggggggcaatgcatacacgcatcgatcgggggggatcgacgcggcggagaagaaggagaggaggaggaggaggaggaggagaggaagcaaacctacctttgaggcgtccgaggttcccgtcgaaggccgccctcaggagagcgctctcacctgcgaacaaaccgagaaatcgccattagaccacatggccgaggagctagcaagccgatcgagctaggaggagatgcggagaggtggggggaggctggacgaactggtgccgtcgtcggtggggcggcagtagacgaacggcgccgccatggccgcgaggagggaggaagcttgcaggaggaggaggacgaggagcggagtgggtgggggtggggggttttggtttggttttggtgcactggacccggtgcactcgtgggactcgtggacaaggtgcacggagccgttttgctacactacctctcgctgtctcgcagatagatggtctatgagtatgacatgggtggcccattgcaggggtctaggccctgtttagtttctggaaaaaaaatcgcgctgttacattgaatgtttggacatatgtataaaacattaaatgtaggcaaaaaaaaaatcaattacacatattacatgtaaattgcgagacgaatcttttaagcctaattgcgccatgatttgataagtggtgctacaataaacatttgctgatgacggattaattaggcttaataaattcatcccgcagtttttctgacggaatctgtaatttattttgtcattatactacgtttaatacttcagatgtgtgtccatatatccaatgtgataaccaaacccaaaaacttttcccaactaaatagggccttagtttcgggaaagacggactcccctgacagtaacataagagagagaagcgggttgtctatgtcggactctcttaggttagtctctttttgtttagaagggatggagtataccagtacagatcttatttatgtgcatccctcgctatgactaatcttgtctacaaacctacggtggattggagttctgtagcccctcccctgtcacgcactgaaacttgtccccttttaccccatctctttgcttgcatacatttgatcccaaatgcagcatatcagagagagaaagaaatcagatccttcaatctaaatagctatcaagaactccataatacccaaataacactacccatgttttggggcaaacaaaatgccaagccattcgagtttagaaacgaatcaaacccttaactagttgcctccaaagtgtagaaaagagactcacattgtcagtgacgactatatatatggccatctcatcgacggtgtcaacctcccgtctcatcgacagtgtcaacctcccgtgggtgtcttggtggattcagaaggaatgcactaggatattatcttttcgcttatacttattagtcaaattttaaaattttaaccttaaatttagagctaattttaagggttttttttatcaaactttattttttagcctttacttttagattgataagaacacatatataaaagttttatttagaaattactttttgtttgtaaatatacagtttcgtttactccgtagagtagagtagctggagcggagagacaaaacagggttcaatctatgcaaaatggcgaccccggataaagcaccaatcttaaacttagatgaacggtcaggaattcggctggtaaacaaaaaaaagacaatcaatcggacagtatcaccccgtatctgtatagggttgcaacgaagaacgagccaactttccccgggccgaaaactgatcgggtggtgcggcctctctcgcctttgatttaccctttcgcgcaccaaacaccaaaccctcgccgccgccggcgccgccatgcggatccccacggagacggagacggagacggggacgggggcacggattcccagccacaggcggcgcaagggatcgtccgacggttcgcgggccgtacaccggcgcaaaccaacgccgaccaaggagacggagattcccggcggccacgggcggccgaagcggtcctcctcagccctgtcgttggacggcgccggcgactccaacccaacctgggtgatcctgaatcgggtcggtgcccggagggattccttccgcggcgaccgcaccacgtcggtggcctcccgcacctccggcggcaaggagatctccgtctcgttcgagctcgcgccgccgccggagacctccctcctcaccctcgactggccgcaagggccccgcccgtcggaggggaccacatcctacccttacgtcatcgcggcgcacggcaacgtcgtgctgctcgagatcatctccaccgccaagtgccctcgccccatcgacatcgactacttcgtctacaaggccaagcccaacggggaaccctccttgacgcggctgcccgtttgctactggaagggggcttcgggcagagacaatcctcggccacgcatcatgagtagggtggccatgggtgtcctgtcctgcagcaaggattcgttcgttgtggccgagatggagagaaggtcataccaaccttctgcagctaacatctacatgtttttctccggctccgacggctggagagtcttcagggatgtgcggattgaccatatcaatggtgccggctggtggtcaactgatgcagtgttatcctaccgccgtcgctacttgatctgggtggactacttgagagggatgattgttgccaaattggcacatccaggaggaggagacccacaggagcctgctctatggtatgtaccgcttccggtcgatccggttatggggaacccttatgacagtgagcgtgggcgaggatgccctgaagcttcccgtaatgtgtgtgccacccaccatggcatcaagttcgtcaatatcatcaaccaatgtggtggcagttttagcataaccctgtggtcgtggtgcgaggacggaacatggagagaagatgcgacactggatgctgcccaactttgggacctcgattgtgaaaaccgccttccaaatgtccaaccagaattccctattgttgacatggaaaacccttacaccgtttgcttcttgttgaacgagggcaactacattgtccctgaagccacaacatggatgatcaaggtccacatgaagaagaagattctactaggttgtactagttattctaaaaatggaagcttgtctcatcagaacaccacctacatgactgccagaaggatgtctgagagactctcctttatctccagtgaaatgccatattacctgtctggacaaaccatgaaaaggtaataatttcatgtctagtttgccaaatgcatgccatactgttcttttggttgcatgttgtacagaattttcctagtttgaagtgaattgttctgcccatttatgtttagacagcattgacgttgtggtagcttgatcagtcaagagcatgattttagatgaatataattgtggctaggatttagctatttagcagcaccaacgtttcttgctccctttaattacttggtcctgaatccctctataactcatcctatagtttatacaaaatcgatgtttgtttgcatgtttttatttcgtcttctcgacactttttctaaaaatatcactgaaccatttctgaatcttaatttcaagcaggaagttgataaactaggaatataactggagatcgaggaattgtcttaccagtttgaagattggatccatcaaacactgtgtttgcaagagcaagttcccaacactcccctctcgttttccacgcgcacgctttttaaactgctaaacaatatgtttttttaaaaaaaagtttctatacgaaagttgttttttaaaaaaatcatattgatctatttttggaaaaaaatagctaaaatacttaattaatcacacgctaatagattactccgttttccgtgcgcactgtgcatgttcccatccttccctaggatgtgagctcctgcgtctgcgtgctacagtaagttataggcaaaattggttcgatgctatataaccaattttgtcaataataaaaaggctaaaagtttatgccatagcaaacgaaacatgaagtgctactccccacatctgatttgccatgcaattttacaatcgaacagaacaatcaaggagcaacatttcacaggctagagaacatcgtaaaatccagttgcttctgtttactccatgcacaatgtgacaactgacaagcatatcatatcatacggccgccgatctcctgctacagtgcgatgtataggaaagtaggaatgtatgaggaagtgctatatatgcctatcgtatacccatccgacagtaagccgaaattctttagcactcggaccagttttctgtatctccacacctgggctgaacggcttttgtatgcgcctgcatgatggagatcaacatttgtcaaactcaaatatataaaaaagataaagggatgccatgaaatgcgcttaacgcaagagaattttgaatttgcacgtgaactctgccatttttcaggcagaaagtacaacaaatcgtgcgtggtatttgatcttccgtaaaaaagaaagagctcgatatttcaacaagcctggctagtagtgacgctgatagaagagttagagagcaaattgtaaggccacgcattgtatcatctcatctctaatcccgtgcacattcggcgcaatattgttcatgccaatagtttacctgcgggtgcctttcttcacggtggttgaaagttctgtgctttagctctccacggttagttgtcagctcatctaatatctcggcatcgtcacggctgccacagctttctgaatcagatgcaccatcctcctgtgtggaacaaaagattcagattaacaacagacgtggggcatcggagaattaaagagtgaaacacaatcatcactgacaagtaaataatccaagaatgggagataaatttataccagcgtgtgatcgtggtggacaccttcaagctcttcatactcagctgcatccaattcccgaaggtcatttggctcaaaaaactttgggaggacatgctgcctgataagaatcataaggaagaatggcaacgggaacaggatccctgctattggtatccatgttatgccgaagcatatcaagaggtaaaccaactggaagatcgtgaagacagtaattgtttttgaaggcactgactccatgaaagacgcatggggaccctccaaaaccctgcaaatgttgaagcatagtgtgagctgttaatcactgttttgacaaaaaatggattatcttacgattaatccaaaaggaggcacataggctgcaccgcaagtagtcaagcatgcaatttcattgttcaaatggggtaaacagatgcagatagagatattacttgtagcgtcggcttgatgggatgaatataagtcttattctttcccaaaactggttgccaggtagactgtcaatggccatataagcaaagtaaccccagaggaccgatgtcggtatcatcttgatgactggcatagctccaacacaagcaccaactaataaggattgcagcaagttacttagtctctgctcattcactcgaacaggcaaatgtgcttcaatatgttttatagggtcaaattcttcagccaatgtcccttctttatcaccttcttgcagcatagcatccttcaagctctttaactccttgtcaacagaatcagtctgcaggacaatttttgacctataagttgatttacttgaacattttccatacaagactaacagtggcatctacattttgaatagttactgaaagaaaaccaaaagtatggggactcctcgtaaggtgaaaagtaaggtgttcaggcaattacatgagcttaggactaattttcttgacaactgatgtagtaattttgacaggaactggcattgacaatagaagtaaaatgcaacaaataaatggaagaggaaattatatggtaacatacatcagtaatgaagagtacatactcacatttttttcacagtccatctcaatgaaaaccccttgcatcttgccatagatttccaaactgctagcacgattcatcaggccttcgttggcagtttgaaccatctttttgcgtagcagctaagcaaacagaggaagaagatgggtgagctgatgagcaaatatggatattgtagcaaacaaaacacttcggtctgaagttcaccaacctgccccttaaggacagcaaggcttcttgtatgcatcggggactgaggaagtactccattagatggagggatgccaatcaaaccacaaagcaggacctgcatcatttttatactactatatgagaagaggagcatgtcacagctttggtctattacaccacaaagcagaatcagtgtccaatactcctatcaaccatcaccttgtagattgcagtagtgccaggttataatcacgcaaaaaagaatataagatattatggatgttggattttcaatcatacccattcaattgttgtaacaaataccaactctactttaaaatatatgagaatatttcttattcattttttttgaacggaaatatttcatattcataagactatactaaaagattttggctagttttaggctagaagtgatagagaaatgaaatgttcactgaggaccaaaagatgttaggttcctagttagccgagaaaaaaaaacttaagaagggccgccataagcagataatttttttagacgggtataagcagataaatttatcatagaaccatggcacacaccatgaatccgaggaccaaaatgtcataatggtaagcagagggcttcttcaagttaaactccttttgttgcgccaattgtgaagccacgctatgatcaaagaagtaaagtcctgcaatcatcaaagctggcagaatggcagcaaatatgtatgctgggggaacagaaaacaggtcctggaaataaaaaaaaaacccaaagatattatcaatgatgccatgcaaaataagctataccaaaattctaaacctgaagaccataaatattcacatctccagtatcccaagcaagtttgatttattacctttgctatggtccagtgatgcagtgaacttgactcccagggaagtggactgaacagcctcctaggaactcctgaaggaacatcctttggtaatgcgtacgataatgctgtccaaacaatcaccataagtgggacaccataatcagaaatgaagcctctgagccaccctgcaagtgtcaactcaaacgcacaatgatcagttcatgtacatgtgcttctcaatggttataaaatgtcatcatggagtcatttgcatgctgatgtagcatacatagtagtaatttcttctctttttacttgaaagatggcaaaagctttgcgtatttaatagagaagatagtagtaatttcttgtttttgtttctaaatgttaaaaatttcaaagagggaaaaacactgtgcagaataagaatctgtcgatatgggctactaaacaccatctcaagccaagccatccactcaataaggaaaaaaaaggagtccatatggtttgccccaaagctgacaggctgacacaacacaagcttgcagcccagcccaaccaacgcctgatctaaagtaggcccagtccaaacttcaaaacagcaaaagaaatgtttggcataaatctaacggttggatggatgactaatggaacagctattgctaatttgatgacccagagctcaacttgccccctaaattggacacaatgagataaaagtaagatgaaaacgtgaccaaccttgaccatacacccatgaccttgcccttcttgaccttaatgcagtgtataacagcccaattgaaaagattacaccaagtaggccgttgacatacaaccactggaatcgatatataggtgaactatggtcgacacctccaggtaccttgaattcttctataattccctgcaataagtaggcaccgttctaaatattttcttccaagatacaaagcactgagctcgctagaaatagcatactttaatagcttgttgcaggaacagaacagtgatcaacatcccgaaaagttctcctgcaacccttgtaaacctgctaataacattagaagcattgaacattgccagaagaaacaacatgatcgcagtccagatgcagaccctgtcaacagtaagcaaatcaggagagcattaacttttttttctgaaaagctaacgtgatagtattcagtttcagttgttaccatccagcccatgctaaatacagtcgttcccccagagcttgctggttcttggcaaagttgtagagatacgtgtacatgattatagttggctctgcaactccaactatcaacagaggctgccctccaagaatggaatggatgatgccacatattgcagtagatgccagtgtttctactgtggtgagtataccatctgaaatgaaccactttccctttgttagagatgtaattaaagcctaaggacagcaattccaaaaagagcacaactgtagtatggctcatagtggcaagagggtaggtatttacttgtttctctgctcagttgcgttccgaaggctatgactgggagggcagaggcaaaaaatatatacatagtaggtgccaatatcctgacgatacatccagaggcaacatgaataattaaggaatgaaactgacagcaacaagaggagtgaaaacacacacagtgatctactgcaaaattaattgttcgaaacaaaattaacctgaagccagagtggaatccctcaagccaatcatgcttgtaccaagctgctcggccttcgatatcagcgacgacacccttaaagggaatctttagtagttccatcagctgaattccactcaatactaaccagaagctgcaacagtacttacaattcagaaatggtacatatatattacatacgtagtattttgaagacacacatattggcatacacacatcctagaagcccccatgttacaaaatttacaaactcaggttaaggtgtcaagctacccagatgagtcaaatggagagaaaccacggaccaaacttgcaatcatcacaaaatgcacgcttggtgctaatacgtatgcaaagtttgcagtatacgtaattaatttgcgcttactgcattgcaacatatttggtgtaccataattagcatttgtaatttgtaattcgaacttctgcatgacgaggagacaaatttgcatttctgcatacaatttctaggaagtttatactatacaaattacttggtcacttgctgagctaaacatcatgcataaaagcactaaaataaaaccagcttgctgggttctttcaaaaataaaagcactaaaaaattgtcgtcaggtaaccgcggcaagtgtccaacacttcctctcctctcatgccgtcatgcgtggggttcagtcataacagcaaacaacacatacatgttactccaatattattacttagtggtaaaaaaaatcagaaaacagcaaaaagaaaaaaaaatcaagcagtagagacccaaatcacgaaatatttacagataacttgttagatccatatgcaagcattccacatcccgacatctacatgcgcacgcaaccaccgcacttgcgaaacgaacaagcgccgcgtttctccatcacctcgaacaaaaaacccacaaacttttaccaccgaaatcgatcaaaaaaaaaactatgaaaaaacccaagcaaatctccccacaagtaggaagagaaatcagccgcaaacaccagcatgcaacacaagacttcacagtccgaaagggaacgcacgcacaccgtgactgcaaaacctccaaaaacccatcgctcactcaacatcggccgagcaatcgaggcagcggcgagaggacccgtacctccggcgggcaatgctgacggcggaggggaaccctagacgtggaggtggcggaggagacgacgcggccgcggcggggcggcgcggggcggggttggctcctcaaacctcaaggcccccgtgatgtgcggctatttataatcgagggcgaatcgaatggacgctgccgagaagaaggggagaaaagaaaaaaaaaaaagccgccgcggctgcctctggaaggctggaaaacaaaggagacgagaacccgtttacctaggagtattttttttgaaaaataaatcggagttgttagaaatatgacgccatatactacagtcgattttttcagccatttatatagtagttacacctcacttacatatgtaattagtatgtaatttttgaatttacatatgtaattttattacttacatatgtaattttgagatttacactgtaaatacactaaaattacatatatatatatatatatatatttaggaacttacaatgtaaatacatgccgactattttttatgaaaaatattgtgttataaatatagctacacccaaataaattccaaaggattttttttctttttgtctactctctcatcggcgtcactctctgacaagtgggccccaggagctgacaccagtggggctcaccggtgatactaggggctctgccgcatggcagccgtgacgacgactccctgaggttgaagggtcagcgccaaagatactctactcctacatataccctccgttctaaaaaaataacttctacgaatgaatctgactaatacttatctagattcattcacagaagttaattttctgtgggatggagggagtacctacattctaagataaaattcgtttcaaattagatatggttaaaataaataaaattaaatgggacaagtttatgattgattgagaaataaagttatgaaaaaaattaaataatgaaggattatgattggttggaaaagaaatattgatgaagaaaaaaaaataaaagatttaattattatattatatgatagagatagtacggtatggctgtatggccttgtttagttaaaaaaaaacttttcacttatcatcttgtgtatgaagtattaaatgtgaaaaataaatcaattacacagtttgcgtgtaaattacgagacgaatcttttaatcctaattacgctatgatatgataatgtggtgctacagtaaacacttgctaatgatggattaattagacttaataaattcgtctagcagtttcctagcggaacatatattttattttatattatattacgtttaatactttaaatatgtgcttgtatatattcgatgtgataaccaaacctaaaaattaattttaaggccggggtgatggtgacgtgtaccgatcgttgcgtcatcgtcagcttccccctgccacccaggcatccactgctgcagggcaccgccacgtacgccgcgcggccgaaggcacggccatcaccaccaccagcagcagcagcaggcacggccgatgtgggtttctcgtccaaccaacaagctaagcgcaacgaacagctgctactaacgagcctacgatgccaaaatgaaaagaagttgtggaggagtaaattgcaggagctttttgttgagatgctgacacatttgccacgctgtattgatgagaaacagtaagttgtgatttagttttatagcgaaaggtgtaatttagttttgagacgtttacattaatgtaaaagatgtcgtactctaacagatgatcggttaaaatgaaacttattaaagggggacaatagtgggtcagtagattccctgtatctataaatattatgtatgtgtgagtccgtttttaataaaaatttacgggtattcagagtcagggctatgctgaaaataactatatgtatgataaaattgataaaatcttgttatgatcctgccttgcatgattaacgattgggccattaaaacattatattggagctcatgtttgttgcatgcactagtttcatagaagcaacattagcaagaaattttatcatatgtatagtagggcttgggctatgcggcggtttttatctcttcaaaacgtgtgttttggagcaaactggcaggtgagtgagtgagtggtatgtgtgcacatacgtgttgtgtgtaataaaaaaatatataatttatttatggttatttagatgaggttctacttctaatggccaaaatattttagttttattccgtttccgtaagttgtatagctctatggtgaaatggtgacatcatatatttttatgtattggagtattactgtattctttgtgtagtcgtacgtgtaagactcctccatcgtgtttaaatcatgtgtaattcctaatacacataaataaccatgagttagcgtaaattaagggtgagaaatacccctttctttcaaaactggaaagtattttccctacacctggccaggcgtcactgaaactactcacggatgtgttgttgcattcaatggaaaaaaacacccaagaaatgctcgcagctgctaggaacgtaacgtgaacctgacggcaacctcatcaccacaacctcttcttttgtctctaccaaataaggagaatgtaggacctctcaagccaagaaagagaaaaaaacgaatctctaaaatttaaattttatgagacaaggacttctcatatgttccctgataaaaacttaaaagagacaaggacttttcatgctcttgagtgtacttcaaagttttttgtgtggccggtgagttcttggagtcttagatcttatttatacctattagccaaagtttaaatttttaaccttaaatatagagtagattttaagtttttttttcatcgttgtttatttttcttagatcgttaagaatacatgtataaaagttttatttatagatttttttttgaaaatatatcgtttcactttttactctaatatacctaacgattgggctgttaataataaggcgcaacgtagcaactgcatgctgccttctttgggggttttcagtttggatcctgcagattgcagctgcagcgacgtctcgaattgttatgatctgaacagaaaaacggaatggtagcctcttggtcaggaagcaacaagcgtggctgcgtgggtgtggctaacaatttgtttgccgctccttaggccgtgtttatttccttgttaattttttttatgtatacggacaaacatttgaaacatttgaagtattgaacgtaaactatttacaaaacaaattacagattccgcatgtaaactatgagacgaatctattaaacctaattaatccatcattagcaaatgtttactatatttttttttacaaaaaacattgtatatatgaattcatgaaaaaaaacaattaaaatatatttcttaactttatagtatttaatacattcgtttgtgctatcaaataattgtaaaaaaaaaagaatcattcagtcattgagccttaaaaagcagaccctagtagctaaaatatctgcattttgtgtatagcagtacttacattgtactcccttttacctatgcgtaacaaaatcgtactactaagtacagttataatgttcaaaaaaaatacagttattgtgtacaagaaaaatcgtagccttcacaagatatttgttggtactttgcttggtataaatcttaaacaggacgtgctaatactttactgtctcgtacaattaattcggagagcgctacgtgtcggacgtacggcgcgagacgaaaaatcagacgcctccgcaaccgtccgatccatgcacagatgcaccatccatccatcatgcatgtatcaaacgaattttaaactattttttctctcaaaatatttatccaaatcatgatccgattgcaccattaaattcgttgcaattaaatctttaaaacaagaccacacatgaatataatccgatgaaaaaaaattttagcttattattgaattatttttaaatgttgcacgcagttgcaccaagtatatcggacttgttccactaggtagatcgaaaatgttttattggacgccgtttcgccttatatgaaaataatgttttagcgaatagcgaaatgatgtttcaactcactgcaatagttgattcatacatagtgaaacattatgagtacattaggtgaaacatttttaaattaaaaaaacggatggtcaaatgttgcagttgaccaacaagtaaaacatcatgttatatatatggtgaaacaaaaaagtcagcaactggaacatttaaatattttatgaaacatagtgaagatacatgttgaaacatgttgctgttacacatgaaacaacaagtattaactgattgaaacacatgtttttcttttatgaaaatataatcaagcgatatcttgttgtaaagatttaattacaacgaatataatggtgtgatcggttcttagattgaataggtaatttaagagaaaaattattttgaagcttgctaaaatacatgtatgtatgcatgcatgaggtggagagagagtagtagtaggtagtttcaggaattttgtgaaacacacttaaaacacatattgaaacatatcactatcacgtatgaaacattttgttttaacggtttgaaacatacgtttttcttttgacataatataatcatgtgatatcttgttgtaaagatttaattgcaacgaatacaacggtgtgatcggtttatagatcagataagtaatttagaagaaaaaatatttaaagagatgagaaaagaatgaaaagaaacaactatgtatatgcatgtatgttacagtacgacagtaccaggctgctgatctacaacattttgttgacgtcaataaagagaaagaagaaattagcaagcaaggactgagctgaccgtaggcgttcgatgtttttcatctgatcggacgttcgaagagaagcattttcgaattaattctgctgtaaaatacacacaaaaaaagatatgataatcgtgatctaagcgatgacggcgcctatagagtccagattcgctcatcaaggcagtgaaggcactggctatatgaagatgacaacgagactgactgtatgagaatatgagaggccatgttgaattatcgatgcaaaaatattgattaagaaaaatgagttttggagggagagacgtccctccaaatatttttttatcgaacatgagattttatggttaaaatcacacgctacttaccactgcactatcaagtacatctcgtaaaaatgttgattagtctcaataaagtttgatgctgccaggaatgtttcaaagggatgtctgtatttttttaaacgaagttctattgatagagtagaaaaaaattacaatttaggatcataactagaaaaaaggaatgcctgtaaattaaatttgatgagtcactgggtcaagatcacttttattttttacatttaccatttagcatgcggccatgcaaagcaatacaaataatgccccctacacccctccgtcattctctttccgttccactaaataagacatgatgaaatttaacacaatctttaaaactaatttttaactttaaatttctcatatacacaatgtttgtagcaagaaaataaaaaagaacaagtttcaatatcagtcaattgaatcgattgattattcttatcaaataaataattaatcctgaagattttaaacgatatgtacacacactaaatccattacattaaattaatctacactagctcctccttctgtttataagttgctttaactattctaaagtcaacattttaagtttatagaaatgtacaacaatattaatatttatagtaccaaattaattttattaaatataacattaaatatattttgatagtttattttatattaaaaatgttactatattttcttataaatttgatcaaaactaaaagaaaagtttaacttgaaaaaaatcaaaagcggaggtgtagctccaaagtccaaatgcaattctcagaccaggcaggcagctgacggatgaaacaaaaggataaaatgcgaatcatctgaaacatggctcaggtttaacctccagaatgttctcgctgattaaaaagtctgggcgaattaaccagctgacacgtacacgcacgtttctgattatattatcagctggtttattatactaatctcgatcggatcatgcagcataaatgtccaattgtctggtcgcctaatatgcagaggagggttgataattacttcctttgttttatactccgacttgatatgtttgaccattcatcgtgttaaaacatcaatactataaatttgcagaaatactactcatgcataaaaagcgtttttaatgataaaacaaaccacacgaaaataaataataattagtacatactcatcgaaaatatcattattttaatatgacgaaggtcaaatacaatattaatcgaaaaccaccattttaaaaacagaggaagtaatgtttaaaaaaacagaggaagtattacgcagtcactttcactagctcaggtagcgtttagttagtcgtacggatcaggtggtcggcaagatcaagattgtgattagaacatagtacagtatataagttggccatgtgttcgctgttcaggggtacaaagcagaataggcagctgccgttgcttgtgaggagttagcactaattatttgtactttgtcacgagtaagcatcgtcgaatgcactccctccgttcttaaaaacaacactgaggacaacaacaatatatatgacaaaagtagtccataaaactagaacccacatatataaactttaactattataaatttcacaatgtatatggatagcaaatagtattagtagaagagaagagatagagacaaataatatattttattctctataggcaggccatatgtttatgagtagcttttgttatttctttcctatgggctagtttcacaatgttgctaggtggctgaatcaaatattatattgcttatggaccatttttggagtacattgtggatgcccttaatcgaagtaaagatgtaatttcttctagcacaatgaatctgactcactctctatccagattcattgtactagacagactgtttaaatttattataaaaaaagattacatcttcttgtaggttttttttaatggagggaggagcacgtactccagttaattggtcggtgggaagtttcttttctctggatcgataagggaaattttcaatggcaatagaacgtactaatccgtagttaagtacgaactcgagacatgtacagggatatgtatgagtatgacgttgggatcaatatcacagtgtcatatagatgatcggtaggagagtatagctagtaccgacatagggaaaagtattatttcttgaccgatgatatacatagcattggttgtaaacgaaaatttaactatttgccacttctagaataaacaattatctagatgtcattcttatatttgcacttatttttttgcaaatatttttacccctctaaggtgatgacttctttaactatttaccatttttatccatgtgacataccaatgtgacaactcggggtgaaaaacggtgtggaacccactagtcaaactctccacttcccttatctctctctcagctagttgaccaggccgcgacagcatgcggagaggcccaggcggcactggagtggaggttgacggccgtgacggccctctccccggcacgcacccatcgaccttcatggcatcgatcaaattccacgatgacgaccattgatgcggggcaacgtaccaatcgggatgctcaggctgcctttccagtccgatctctctaccagcggtgactcgcgtgagcgctcttcggttcgttgtctccaccatctcctcctctagcccactgccccagcctcccattctccatctccgtccgcgtcaatgtcgggcccctcggctcccatgcctgcgccgcacgcccttctctctcaccgccgagttcaacctcgtcttcggcaaccccgtcttccccgtcttcttcctcttcctcaagctacggctcggtgttaatttagtgggaaaaagacatatatgccttgcatatttgcctttgttttgagggtgttgtgtttttgccatatttgtgccagcgtatcttgcatatggcgatggatattgcgcgcgcgcgcgcatatatatatatatatatatatatatatatatatatatatatatatatatatatacacacacacacacactcagcctcatcggttgtccatattttcgaatatgttaaaacagtttattaggaaacaaaaattaatttacagtaaaacttttgtatatatatttctggcaacttaagccaatataaaaaaaactatgttaaaaatattttaaatttaacatcaaaattaagtttgaaaattcaaatttgataaatcaaaccgatagaaccctcaaaatgttaactaaaagacaaatcttcacacgattgtatgtgaaggtgaggagaaaagaggtgcgacgggcgaggttggcggcgaggcaagcagaagcgggggaggcgacaattagagcaggtacaatagcagaatattagccagctacaaatatattttaatgagataaaagatgagagagaagagcagcgggatacagatctgtagctagctgcagcacggactccaagatgcaatgtatgtatgacagtgggaccatatactattagtatagtaaacaactattgtataaattggctattagattagctatagatgaattagagctagtagttggctatactattaaccttgctcttatagcgtgcacgatggctgcgacgacattgggcgcgttaggcggcgacgacgttggctgggtgctagggtgggcggcgatggcagagcggtggcgatgaagtgccgacgcatgcggttgctgggagcctgcctgcctggagactcggggaggagatgcggtttccgagaggaatcagggagggagaagcgtgataggcagagccgagtggggaggtcagggatgggacgttagatcgaaagatccaacggtcacaaaatatacgtgcggagtcatgggtctatgcggggtctggtgttacggaattttgttggatcctaggattgcacaactgcactactcgatttaatatcaaccctctgcaaagtggaacaactttttgtccatatgtcagtttatcgtttcgtggtgcaaaattattatattatattcgttccaaaataagtgtagccataagtacctttgaccgtttatcttatttaaaaaacttattaaaaagttgaaaaagtgcatcaacttagctaatcatatgctaggtgagttttttttttcacgatgtcaatatgccattacatagaaatcctaaggatattatctttaaaaattatactacacatccaattacctttaagaatttttgttttcttcaccttcccaaatctcaaccgaaatataataatttctacatccagcttaattgactttcagttattagttattaggataaaaatataaatatgcttatatacaaatccacactagtatattgccaaaataagtacttaaaaattgaatatgtataaaaaaaagtgctccaaataattaagttgtcgcataacttcttaacttattatatcaaaattgtacgtatcttgcaagttcttatgcgatcacttataaagttcttgtactaaattacacttacctaccaagttgttgcactagaacgctcatttcacaagtttttacaccaatttacacccacctgccaagttgatacattgtgggtgcaatttacttaaatattaatctaaaaaaaattaaatcagacaaatggccaaacttggacatgaccatcttgggagtccatccacttactttttgcacgagtgttttctatataaataaaacgctaaaagcttatgccagatcaaacgaaacatcaagtgctactgcattgaaagcccaaactccacatctatattccatattgattgccatgcaattttacaatcaaacagaacaatctaggagcaacaattcacaggctagagaacattgaaatctacatgtcacacagccttacagaccttcagtaaaatccagttgcttctgtttactgcatgcacaatgtgacaagttgacaacgtacaagcatgtcatatcgtacggccgatctccagctacagtacgatgtatatgaaagtatgaatgtattatgtatataatacaacggaccgctgcttgaggaagtgctatatacgcctataatatactcatccgacagaataagcagaaattcattagcactcggacaagttttcagtatctccacacctgggttgaatggcgtttgaatgcacctgcacgatggagacgaaacatttgtgaaactcaaataggtaaaataaaaaaaaggatgccatgaaatgcgcttaactgaagagaatttactctatgccattttaggtccaaagtacaatagatcgtgagtggtatttcaacagactggctagtagcctagtagttgaccacagcagaaggttagagagcaaattgttaattaagcccacaccctctatcatctcatctctaatcctgtgcacattcgctgcaatattgttcatttgcaaataatttaattacctgcaggtgcctttcttcacggtggctggaagttctgtgctttagctctccacggttagttgtcagctcatcaaatatctcagcgtcgtcacggctgccacagcttcctgaatcagattcaccatcctcctgtgaggaaccaaacttcagattaacaacagatgtggggcatcggagcattgaagaatgaaacacaaaatcgtcactacaagcaaataatccaagaaggtgaggtaaatgtataccagcgtgtgatcgtggtggacaccttcaagctcttcatactcagctgcgtccaattcccgaaggtcatttggctcaaaaaactttgggaggacatgctgcctgataagaatcataaggaagaatggcagcgggaacaggatccctgctattggtatccacgtaatgccgaagcatatcaagaggtaaaccaactggaagatcgtgaagacagtaattgtttttgaaggcactgattccatgaaagaggcatggggaccctcaagaaccctgcaaatgatgaagcatagtgtaagctgttaatcacttttctaacaaaaaaaatggattatcttttgattaatccaaaggaggcacataggctgcaccgcaagtagtcaagcatgcaatttcattgttcaattggggtaaacagatgcagatagagatattacttgtagcgtcggcttgatgggatgaatataagtcttaacctttcccaaaactggttgccaggtagactgtcaatagccatataagcaaagtaaccccagaggaccgatgtcggtatcatcttgatgactggcatagctccaacacaagcaccaactaataaggattgcagcaagttacttagtctctgctcattcactcgaacaggcaaatgtgcttcaatatgttttatagggtcaaattcttcagccaatgtcccttctttatcaacttcttgcagaatagcatccttcaagctctttaactccttgtcaacagaatcagtctgcaggacaatttttgacctataagttgatttgcttgaacattttccatacaagactaacagtggcatcaacatttcgaatagttggtgaaagaaaagcaaaagtatgaacccttaatcgttaggtgaaaagtaaggggttcaggcaattacatggagcaggactaagtttcttgacaactagtaattttgacaggaaccagcattcacaatagaagtaaaatgcagcagataaattaaagaggaaattatatggtaacatacttcagtaatgaagagtaaatacctacatttttttcgcagtccatctcgatgaaaaccccttgaatcttgccatagatttccaaactgctagcacgattcatcaggccttcgttggcagtttgaaccatctttttgcgtagcagctaagcaaacaaaggaacaagacggatgagctgatgagcaaatatggctaccgtagcaaacaaaacacttcggtctaaagttcaccaacctgccccttaaggactgcaaggcttcttgtatgcatcggagactgaggaagtactccattagatggagggatgccgatcaaaccacaaagcaggacctgtatcatttatgtactactatgagaaaaggagcatgccacaattttggactgataatgaagtcagaacacaggatagatgcagggtgtacattagaccagaaagcagaatctgtatcctatctgccattgccttgtagattgcagtagtgccataatcacgcaaaaaaaattcagatattacggatgttggaatttaattttctaagaaatgcaggtgtattttcaatcatacccattcaattggtgtaacaaatacaaactctactttaaaatatataagaacatttcttattcaaaagactatactaagagaaacttaagaagggtcgccataagcagataaattgtatcataaaaacatgccacacaccatgaatccgaggaccaaaatgtcataatggtaggcagagggtttcttcaagttaaactctttttgttgcgccaattgtgaagccacgctatgatcaaagaagtaaagtcctgcaaccatcaaagccggcagaatggcagcaaatatgtatgctggaggaactgaaaacagatcctgaaaataaaaaaagagaagatattattaatgatgccatgcaaaataagctgtgcgaaacttctaaaattgaagaccataaatattcacatctccagtatcacaagcaagtttgactaattacttttgctaccgtccaatgttgcagtgaactcgactcccagggaagtggactgaacagcctcctaggaactcctgaaggaacatcctttggtaacgtgtacgagaatgctgtccaaacaatcaccataagtgggacaccataatcagcaatgaagcctctgagccaccctgcaagtgtcaactcaaacgcacaatgatcagtgcacatacatgtgcttctcaatggttacaaattataatcatggagccatttacatactgatgtagcatacatagtagtttttttttttttttgaaataaagcaaaagctttgccatgtatatattagtagagaagatagtagtaatttcttgtttttgtttctaaatgttaaaactttcaaagagaaaaaaaactgtgcagcaactatccacataatataaaggaataagaatctgtcaatataagttcattaaaaaaaagaatctgtcaatataaaggctacaaaacaccatctcaagccaagccgtctactcaagaaggaaaaaaggagcccatatggtctggtccaaagctgagaggctcacaacacaagcttgtagcccagcacaacctaagcctgatctaaagcaggcccagtccaaacttcaacacagctaaagaaatgtttggcataaatctaacggttggatggatgattaatggaacagttgttgctaatttgattacccagagttcggtttgctctcaaaattggattcatgagataaaaataagatgaaaaagtgaccaaccttgaccatacacccatgaccttgcccttcttgaccttaatgcagtgtataacagcccaattgaaaagataacaccaagcaggccgttgacatacagccactggaattgatatataggtgaactatggtctgcatctctaggcaccttgaattcctctataattccctgcaatagataggccctggtctaaatattttcttccaagatagaaagaactgagcttattagatatagcatactttaatggcttgttgcaggaacagaacagtaatcaacatcccaaaaagttctcctgcaacccttgtaaacctgctaataacattagaagcattgaacattgccagaagaaacaacatgagcgcagtccagatgcagaccctgtcaacagtaggcaaatcaggagagcattaactttttttctgaaaagctaacgtgatagtattcagattcagttgttaccatccagcccatgctaaatacagtcgttcccccagagcttgctggttcttggcaaagttgtagagatacgtgtacatgattatagttggctctgcaactccaactatcaacagaggctgccctccaagaattgaatgtatgatgccacataatgcagtagatgccagtgtttctactgtggtgagtataccatctgaaatgaaccacttttcttttattagaaatgtgattaaatactaagaacaataactcaagaaatagcacgactgtagcatagactcatagtggtaagaaggtaagcatttacttgtttctctgctcagttgcgctccgaaggcgatgactgggagggcagaggcaaagaagatatacatggtaggtgccaatatcctaacaatgcatcaacataagcaattcagaaatgaaattaacaagcaacaaaagcagggaatacacactcaatgaattaactgtttgaaacaaaaatcaacctgaagccagagcggaatccagcaacccagtcatgcttgtaccaagctactcggccttcgatatcagcgacgactcccttaaagggagtccttagtagatccatcagctgtacttagctcgagactaaacagaagctgcaatagtaattaaaattcagaaacagtacataaatattacatggattttcaagacacatatttttttgactgaattcaagacacacatattggcatataaaaacatcagaagccccatgtcgtctacaaaatttgcaaactcgggtcaaggcgtcaagctacctcaagacgagtcaaatcgagagaaacctcgaaacaaacttatagccatcaaaatatcagacgtgtgcttaattgcttggtgtgttacttatataacatgcacggtttgaagtataaatatttattttgcgtgtactacgtacaccgcaacataattttccgaacttttgtattcggaggagacgaatatagattttcaacatacactttctacgaagattttaccaaggtgcaaactagttcgacacttgcagcacaactttttagcgtcagtgccacaaaccacttcaaaattgtcgtcaggtaaggtaaccgcggctagctagcttacaaacatgtccgagtacaaccgtacgatccaacacctcctctcatccctcatgcgtggtggggctcggtttaagccagatacatggaaaaccaatggcacgcagtaaaaaaaaaaaaaagcgcaacgctacacctactaattttttcttactaaaattttgatcatttgatttaggtagatagaagttaaaaaaaattaaatgcacacatagcatgacacaaccgtgttactaagagtttagtaagaaaaagttagtgaatatagcctttttcgaaaagaaaattcgaaacacaagttactcatcaattaataggcgataaaaaaattcagaaaacagaaaaaaaaactcgagaagcagacatccaaactgcaaactcgcaaagttttgacagaacaacttgtagtagatccatttgcaagcaaccccacaaaccacatcccggcagccgccgcaccttgcgaacaaacaaacgtagcgttcctcgaagaaatttgccaccgaaatcgatcaaaaaaaaaaacagccatggaaaaaacccaaacaaatcccccccaaacccagcgcaaacaccggcaggcatgcaacgcacagccaccaccaccagtccaccaccaccaccaacgcgaccaaaacccaaacccaaacccaaacctcgcagttcagttcagttcgaaatagagcggacacagtgcgaaactccaaacaccatcactcacatcagtcgtcgagcaaatcgatggcgcgcgtggcggcggcggcggcaatgctggccgctcgacggcgcgggagcgaaaccctagagttggagggtggtggcggagacgcgggtttctgcgccgccgcggcgggggagggggtatttataatcgagggcgaatcgaatggacgccgcggagaagaagagaggaggagaagccgcggcggccaggaaaacgaacacgtttacctagaataaaaataataaataaataaataaattcctccattattttctagtactacgtcgtcactctctgacatgtgggcccatgtctgacatgtggaggaccacaaagagatacgcgtggggcccactagcgatgacgtggcggggatgggaggctctgccgcgcatggtagcagtagccgtgacaaggttgaagggtcagcggcttgtggcccgggggtgtatgtgtggctgcaggtggggccggatggtggtgacgcgtcatcgtccacccaggcatccactgttgcagggcgccgccacgtacgccgcggcccaagggacacaccaccgccagccaccgcgcatgtggttctcggtttctcgtcaaattaactgatgacaagctaaattggaagttttcaaaaacatgcaaagttttttcttgagtaaagtgtatagccggtccctaaacttatacgactgtgttatttgagtccccaaactctcaaaatgtatattcaaatcccaaaacttgttaaattgtgtcaatccgatcccaaactaccatgacacctccaggatcctacatggcatgccacccggacaatgatgtggcagcatcacaaattctacaccaactgacaagtgggccccaataaaaaactttttttaatatccttttttgttcattcccatcatgtcctttcttcgtttctcctcttttcttcctactgcattgaccgtagccatggcctctggtcgagctgtctttttgatggcatgaacagaggtgcgtccgtgggcaagaaggcaccggcgcagcagccgcgtcgacggaggcgctgcaacgtgtgggtagcggcgccagcgcagtgatggacgcggttatgtcctgggcatcgaggagactctggccgggagcggcgcgactgcgtgtggctcggcacgtttaccggtgaggccgaggcggggcatgcctacgatgttgcggcacagtagttccgcagccgtgacgcagtcgccaacttccgcccctcgtcaagtctgacccgaaggctgccgtcgagctctgtttcttcgcctcccggtcaaaggccgaggtcatcgacatgctccgcaagcacacctacctcaaggagctcgttgttgaaacaagtgtgccttcacctccatctctcatcacctgttcgacaagacaatgatcccgaagcaaccaaaccccgaagaggccgcgtcgccgcctgccgccgccgtcggtactggtgttgcgcatggtacacggcctgctcaagaacggcggcagtggcgttgtcatcgccgcgagggtggcgaggttggtttgccgttgcgctcgtcggcagcggagccgttctggccgaagcttagggttattgccgctgacttagacttcggaattcgtcgccatcgtcgatccttgtccaaaattgaggtcttcctcatcttctctatgccaaactccccccttcccctctcctccccgagccgtcctgctatcggagctcaccagcaaggtacccgtgtgctgcggtgccgcctacctgtttggccgccattgtgtcagcacggtgcaccgccgctgggcgtccctgcccaagccgagaacacctccggctccaagtcgacgccctgatgctcctaggcagccgtgcccagtcggaagctcaccggagcgccgctacttcgcatgcccccgccgcttgtacaacaaaaaaaaaagagaagagaaaggacaaaaaagtgaaaggagaaagagaaaagggaggaaaaaagagtttttaagtgggtcctatttgtcagtcaatgtagaggtattgatgaggccacatcagtgtccgtgtggcatgccacatcagcgccgtgtaggatgctggaatggtggtggctatgttggaccgaaatgacatactttagcaagttttatgacttgaatctgtattttttgagttcggggacccagatgggacgacgtcacaagtttagagaccgggagtgtagtttactctttttttatttagaaaaaatattggaaaataaaatttatttgaactttttaaagaatatttctatataattttttttttattaaaaaacttatcctaaactaatttaggaagcgtgcttatgacaaagcagcttagcgaagattatgtttaaaacacatcctaatcaaacaactggtacgataaattctgacactggtggagaaaccatctttcgtcggtcggccgaattccacaatagtcccggatgcaataaaaatcggggctaaagatgatctttagtcccggttcaaaagggtaacgggcatatttgatcttaacaccaaccgggactaaagatgatctttagtcccggttcaaatgctgtcagggcctgtcaggccccccgggatctttagtcccggttggtagatcgtaactttagtcccggttggtaataccaaccgggactaaagtctcacccctatatatatgtcttcttcctcctccagctgcctgagcaagcttcaaaatttcttcaaaaaagaggggaggtcatgctaaaatttctagtgaatttattttggtgattacatacaaatcggaggtgcctaaaaggtttgcaacttcatcctccaatatttttttgtcatattacatttgcagctatgttttgcatacttttttgtctccaaaaattagttgtaagttgatgagggagaaaatttgtgtggggaagaaagaatatatagaaatttagttgatttgctaaagaaagttttataaaatagttgagaaggaaaactatagtgaaaattaatcttgaatactagaaaacaaactaaaatgaaaattaaaagaagtaaaacacattaaaattagtttaaaactttagaaatagtaaataagaattatttggtgtaatattttatgatttttgtatgaataaagatatgtcattattgtatgactgttgaaacagtttgtaattatcttataattattgtatgactgttattattgtaagaataattatttttgtatgattttttttcgactcatgtagatggatcggcaatggatgtacgctgaccggcggtccaaagagtttattgatggcgtgcactattttttgagagtggccgaagctaacaggcaaaggggttttatttgttgtccatgcaataagtgtaagaatcagaaggagtattctgcatccaggactattcatttccacttgtttgagtcgggggttcatgccaagctataactgttggacatcccacggagagcaaggtgttgaaatggaagaagatgaagtggaagacgacaatattccgaactttgctcagtacgttggatttgaaggaaatcaaacgggcgaggaggaaagggatgctgatggtaacgacgttgcggatgattttggtcagatgttgcaggacgccaaggaggactgcgaaagtgaaaagggggcccataaattggacaagatgttagaggaccacagaacttcgttgtacccaggttgcgagcaggggcacaaaaagttggataccactctggagttcttgcaatggaaggcaaaaaatggggttagtgacaaggcattttgcgatttattgaaactcgtcaagaacattcttccgaagggaaacaaattgcccgagacaacgtacgaggctaagaagatagtctgcccgctaggactggaagttcagaagattcacgcatgtccgaatgattgtatcctatatcgtggtgaggagtatgagaacctagaagcatgccctgtttgcaaagcactacgatacaagattagacgagacgatccaggagaagttgacgggcagctaacaaagaagacaattcctgctaaggtgatgtggtatttccctataataccacggctaaggcgtttgttcaggaacaaggggaatgctagaatgatgcgatggcacgctgaagagcgtcaacaggacgggatgctgagacaccccgccgatggttcgcaatggcgaaacatcgacagaaaatttaaagaatttggaaaggacgcacgaaacatacggtttggtttgagtacggatggcatgaatccttttggagagatgagcagcggccatagcacttggcccgttacgatgtgtatctccaatctcccccctggctatgcatgaagaggaagtacataatgatgccgattattattcaaggccccaagcaacctggtaacgacatcgatgtgtacctaagaccactggtcgaagatcttaagctgttgtggaagaaggaaggtgtccccgtatgggacgaggacaaacaggaggagtttaacatacgagcgctgctgttcgtaaccatcaatgattggcctgcacttagcaacctatccggacagtccaacaaggggtacaaggcttgcacacactgtatggatgaaacagaaagtacgtatcttaagcactgtaggaaggttgtatacatgggtcatcgtcgattcctcgcagcaaaccacccggtacggaagaaaggcaagcacttcgaacataaggctaaccaccgtatgaagcctaaacatcgcagcgggaaaacaatgtttgctatggttaaagatcttaaagtagtgttcggaaaggggcctagaagccagcctatagagagcgaagatggtcacgcggcgatgtggaaaaagaactctatattttgggagttaccctattaggaattcttggacgtacgccacgcacatcggtcccatgatccccagccgaccattcctcctgcaatggtgagcccgtcaggaaaccgtagcagctgcgcctcaacggggcaggtaggatcacagagcatggacgccatacaaacccaggacgaatccacctgccctgttgatgacatcactcagcggacaccatgtgagctgcatattcctttcaagaacttatcaataaaggtaagctcgtagtttatatattttagatttggccattccgctagttgctgcttatatatgttgattactaataaataacctctcaccacatgatggtggcatcgggcatggccatcccaacggacccttcaggtacttaccactgcaggccgattccagcaggatactccaaggtcgaagttgagttggtcgaaggcgcgtacgaggacctcgagctggattaccctggaggagacagtgatacgcatctatgagacacaagccatgccattattctatggcgcaggcggtacatcatcctccctgggcgacaagcggcgtctcgtgcaccatctcctccggctccgccatctcctcctcaggatcctgcaccgtctcctcctcatgctccaacaccgtctccacctcagactcctgcaccgactcctcctcaggctcctgcaccgactcctcctcgggctcctacaccgactcctccgcaagctcctcttccggcaccttcaaagtcaagggccccccaagctccaccgcctgcccacacaagggcaacgaagaaggcgaaagttgacgccgccaagaacaaggacccagggtacgattgcacgcaagaggagcttgacgcttacgtggcatcagaagtcaagagacaattcaagcctcgaagtccagaaaagaagattcctatagacccgagtgtcaggaagttctttaggggtatgtctgcacctgccaaggaggccattaagctatcggactatgagcgaacgctgaagaaagcatcttctggaaagtccaaaccagtccctcagcttggagagcaaccaaaccaggagatcgagccgttggtgaccggtgaagaaatgacgatagaagaatttattactgacaccagtctaactacggatcaattgctaggagtcgcaccaatcgaaaaggcggaagtgaaatacatgtacgaactcggtaaaccgcttgtcaagcctgagctgctgcagtccctacccacacaaatgtacaagttccatcagctgtacatggagatgagcgccaccggtagagagatgatcggagcgaggatcagggacacggacttcttgcaaggagatgacattctctggatcaatttcaagggaatctacgaactataccagctggacgctctcgacgtctctattatgagttgctggattttgtaagtatatcgttcagttagatttcttactacgtctcctttaattaattaggtccttgtatataagtagactatagaaaataatatattctcttttatcgttgtagaatggagattcaaagggcccgacggcggggggttttcgatactggattcatcgaccctcggaaagtaaacatcgcaatgctcgaccaatatccgcaagccacagaggacaatctcgtccatctcctgaaggcgcagcattacaagacgttcatactgttgccgtacaacacagagttagtttaattttactgtcttcctataccaaatttcattcccgtacgaacttgctaagtgtttcatatgtaatgcatcccacgcacattgcagattccactgggtgcttttactcttcgacctgtcggcctacaccgtcaacgtatatgactcaatggataaaaaaagagtctacgtttgacaaggttttcgaacttatggacaggtattgtcataagttcctctgttaattaagaaaatcttgttatgttaattgctactacgaatcatagctttaaactccatgtagggcttggtatcggttccgtcatttggtccgcggcaaatggagagaaagacttaggcggaagtttaaatttcctgtgagtacacatgctctacatttatattgctccgattcaaatatatacaagtgtatattaattagatctctcgtcgtttgtcatttatttgtagtgcggaaagcaaaagcagggaactaacttgtgctgctattacgtgtgtgagtattgccactgccttgcagaccaaatcatcaccacaagagagctcgatgtacgtacaaataaattcaaaatttcattacgtatcgatttcttgtttaattactaatcaatttcatacattcatatagtttattcgtatgagggataacctgaccacacacaaggaatttatcgtggcggttcaagaacaacttatgggattcatcaacgaacaagtccttgatcccaagggtgaattctactacgacggaaacacaattcataggtccttagcttctgagctagcgactactacgtcgaaatcgtagctagctaggacatataatggattgtaattaatacatgactacatatgtttctatatgcatgtgtacacattttctataatgtaaatatattttggtcacacacacacatatatatatatatatgtatacatatatatatatatgtatacatatatatatatacatatatgtatacatatatatatatatatatatatatatatatatatatatgtatatatatatatatatatatgtatatatatatatatatatatgcatatatatatataaaccctacagcaacagagccatgaaaaaaaaggtcagctcgatttttagtcccggttggtatatctttagtcccagttatttcatccgggactaaagatagcgatctttagtcccggattggtagtcccggtttgaaaaccgggactacaaagggtttctccaccagtgtgaagtccaaccaatatccactttcggtcttgctatgagcttgacgaataaaattttaatatatacttttatttttaacgttttgcttttatatacatgcatagaaaagagttgtgaaaatatatctctaccctagaatggagatgcgggatcaaggcagtgcttcccgcgcagcgtccgcgtggcaccgttgctcccgcggaacgtccgtgcggaaccgtcgttcccgcacgcaattcctcgctcccgcgcgaccggcgcggtccagcgcgctcatgacgcgcggccggtgcggcaaacaagcacatatgcatggatgtgcatatgttgcatacatgcatgcattcacgttgcatgcagcgatgacggcgcggcggttccgcgtttccaggctgcgggatcgataggttccgcactgctgttttgcgcgaccgctggttccacaacccttatgcggtagagatatatttgtgcaaaatttcatcgcattggtatataaacacaaaataacgaagaaaaagatatattgtgaaattttttcctgggcttgaccaccatagacaaacggtgaatctatgccgaatgcgcttacttagctgcttccacgaaagttgccacatgatgccaatttttagcaacccagccaaagactaagaacttgtttggagtgaagctaattattttccaaccaaaattttagcggcctaaatagtattgcattgatgtttagtttgcttttttttccctcactaatataaatttatggtaccaaattttgtagtcgcagaaattatcaagattttagcaccatcaaaaaaatattaacaggggaaaatttagctccaaatcaaacaagtgaaaaaaaaaactttgtgccacactaccacacccctacagtgagagtgtgttcttagttcagcatcacctctacaacgtattctctccgtccataaataatcaatctaatttcaaatatgatatatcatattactacgaatctggataaaaatatactccctccttccctaaatatttgacgccgttgatttttttaaatatgtttgaccgttcgtcttattcaaaaacttttgtaaaatgtgtaaaactatatgtatacataaaagtatatttaacaataaataaaatgatagaaaaagaattaacaattacttaaattttttgaataagacgaacggtcaaatatttttaaaaaagtcaacggcgtcaaatattttaggatggaggtagtatgatactagcttgattttttttatgagtcaagtcaaaggaagtacttgtatttggaataaccccgagcggtagctgatttgaacacggaaagctgtgaaggtcaattagaagaaggccctatgtgcttgtctcggcagaataagattcacttgtccccatctccagatgacctgatcttcgcttggttgttccaaccgaaatccttgcagccaatcaaatgcccagaaaaaaactgggatattattaccgggaccgtcaaaacttcccagaagatagtattgtattcttaacccaagaacgatcggagtggccggcacaaattactgtagtggaattccggaagcttatgttgacacattgtcaatttgttgataacaaacaattactaggttttaatatattttttggaagatgtaaaacggctgtggattgatgcagaggtccaaaaatatcattctcgtttttcaaaaccggaaagtatttttctacccatcgagacgtcactgaaaataactactcaaatgtatggttgcaatcaaccaaaaaaacacccaagaaatgctaacttcggctatagggacttgatatcccacggtatccacaccctatagaggatcttagctatagcaactagctcatcatcttaagaccacaaccttttttttcctctgctattatctaaaattctaaaatttttgtttttgaaggatcacattttgatactttctggtagaagtgaacgaaggacttcaagccaagaaaaatgaagtgacctctaaaattgaagggacaagacttgctcctgaattgtactttatgtttttttttctttctgtggccggtaatcacttgtaattcaagcctgtaataaggcacaagagagcaactgcgtgctggccttttgtgaggttttcagttcgaattttgcatatttcagcgacagctagctggagttgtcagttaccattcgccagtaactattgtcagtcaccattcgccagtaacggctcaaattgcaaactatactctgattaattgtatatctaatgactgattaattgtgtaccttctctggactttctggtccctcgatgaatattcagtgggtacgaaagctctccccgcccggttatcctttcaggaaaagaatgtcatcgggtggacaaatcaaaacctaacctcttcgatcggatgaaaccttagccaaatgttttgttggccacaccttagctgattagctgagatcgaaaaaaaatctattacctatacctatactaatcaaacttcctgagagctcccggttaaaagaatatatgatcgttaatttgatgggtcgtataggttggcgactagttataacaatacatgaaaagtatggcataatataaccttgacaataaaacaaatctttcggaggtaattttttttgagtcacaagaccgcgggtagattattcaatttcagctaatttttatcctgttaattaatatatcagtcaataattagataatcagtatgtatagaaccccgtaatttttggaatatgtccgccgtttcatgagggtgagttcgtgcgtgttacaagcgtatgcatttataccgtgtttctaaaaagtttcttttaaaagtttgataatattttggcaaacgataataatggaccagacaaatcttacaaaatcagatgagaaacaaaatactcttccgcgatactcctatacgactatctcgtcagtttggtggaggtatgaaaacatgaaatgtgcatcagtttcttttatttttctttttaatttttaggaactgtgtaccagttgttgatgcgctataggtaaaatatctggttgttgtggatactcctatatggctatatagcagtactttacatagtgcggagtattacgcagacataacaaaagcgtacaaagtacaccgtctgtgacttaaattaggctctgttcggcaggagggattgggaacccctctcggcacgtaaaacgatgtttgtattaacgcgtaattaattaattaatagctatttttttaaaaaatagattaatatgatttttttaaacaactttcgtatagaaactttttgaaaaaaaaacacaccgtttagtagtttgaaaaacgtgcgcgtggaaaacgggggtgaagagctaggaacctggggatcgaacagagccttagtagagcgagtacaataaaatcaaagatcctttcccttaagaaaagtcgtgtgttctgctttgatcttcaatacggatatttggtcatagatacgtgacatggatgttgttttttctttttctaagtataacctttcagaactgtagacttatattttatttctactctatcaatacaaaacgtcacactatcttgtgcgtattatttaaaaaataaaattacatgagcgtgctatacaagttatcacatcaccagtgacgtatatagaaattttatatgggtgatccaacttatataaacttttttaaacaccctaaatgtaaccaagttagaaatataaattggtcaaatatgcataataatatatcaataaaaaaaactttttaaaagttttttttcacatgtgtatatatatatgcattggattaggattttttttccaagtgagcactaggatcacccctagattcgcacacgcacatcacatttgtgattacatggagaagagatgagagagaagaaaaacgtgctacagattcgtaaccagctacaacacattctgtaataaactatctgagatcgaatgaattaggtattaatgatgcagtatatatatatatatagctaataattatatgaatggattattaaataagttgcagatgatattttaattttgagtaaagtccatcaccagtccctaaacttgtacccctgtgtcatcccggtccctaaactcgcaaatcgaccgttcagatcctcaaacttgttcgactgtatcatcccgctccctaaacttgcagatcactcgtttaaatcctccaacttgttcagctgtatcacccagtccctaaacttggatttgaatatcatctgtgtcaaataggacggtgtaaagactttatatttaaaaataattcataacttttatgtgaactctaataaagacaaactttatatcaaacttgtagccctcgacacgatctacaactttgtagttgaattttttttattttaagtcatttttgttccaaaatgtaattttaaaattaaaatttcaaaatctataaatatgcaacaatattttgggaccctaaacagttttaattcaaaaaattttcaactacaaagttgtaggtcgcgtcgagggctacaattttgatataaagtttgtcttcattagagttcacatgaaaaagttatgaattattttttgatataaagtttttagaccgtcctgtttagggactggggtgatacaactgaacaagttggaggacctaaacgagtgatctgtaaggaccgggatgacacagtcgaataagtttgaggacctgaacgatcgatttgcgagtttagggaccgggatgatacaacggtacaagtttagggaccggtgatggactttactctttagttttttataaagttagtagttgattatattattaaaattgctcgtggtatactaagaaaagtaggagccttttacacgatatttgcgtggtactttgctgcgataatattttactgtcccgtgcaattaattattctgtgaacaattaaacaggaagtatatatgcatgagctaagcggtgacgtacggtacatccatctgttgaagttataagcacatgatgattcgagtactcgctaggcaaggcataaacagattgatcgtcctgagaattatcacaggccatatgcttgaattattgatgcaaaaagattgatcagtctgtggctctgtgcaatgagtgcggcacatgacattttctatgctgtcagtcaagaatctttcgaagagatacatgtagatctcattagtcaagatcacaatgttttacgtttttccgtttagcatgcaggagtagtagatatttgtaatgcaatacaaaattaatggccaaacgaatgagtggtcggctgtatgatctcacaaatcatgggtttttttgttctttttgcccctcaagagtaggccctgctcgtagtgctgcggattataatccggaatcattttgaatttttatggattggttttatggtttctttttatcaactttcattactgtcccgctctgcttttatgattgccgaaaagattgttattaaaaactaagaatttagaatcattatatactataaacactatataaacaaactaaacgtaaattaatcatcttcaccagccggcttgcatgtataaattcatcatgtacttcaaaacatatttaagaagtttaagattataagaaatagctgattcgtgtagtagtaagtttctgagaatttttttaaaaaaatgtgtttcttagattttgatttctagtttattttatggattctataattatagtttttttaatctaaactgtttggagagcttctgattatagaagttgtagtagtctggaaatcaagccggcactgtcttttattgagctgtgattgaaaataattttattacaatttattacatttttttaaagccaaattttaataacgagctagcgagtccaaatgaagcaaacacaactttcatgcaaaattttatcattttagttttatataagaaaaaaacatatcacttgacaaaattttgacttgtgcaccaatctcactaactgggccgatcgacagaaaagctatctcatcctctttttacggcccaatctcactaactgggccgctccacgcatacacgtcccagcccaaaaccctccctgcgtaaataggccgggcctaatcactttaagtgggccgggcctccctctcctgccgcttcgtcctcgccacctccgccacttggcgcgagattcctatcgcgcgcagacgcgccggctagctaagtcgcgagcgttttcggcccatatcctcgcgcacggcccactagctacatccttctttttctattttttcgcaacgaagtgcgcaggacttttagaaaaaatcgtatacgtaattagttatcgataattatggtatattaagctaaccattctttttttctcagcaaaaaaaattgaaaattttgaaaacttttaagtcgaattttgaacttttaagttaaaatttaaaaacttttatctcaaatttaaaaaaatttaacccgaatttaaaaactttcgacctaaattttaaaaacttttaactcgaatattcaaatcttttgaccgaaatttcaaaaactttcaactcagatttgaagactttcaactcaaatttaaaactttcaacttaaatttgaaatttcaagtcaaattagaaaactttcaacttaaaatttaaaaactttcaattcaaatttgataactttcaaatcaaaattaaaaactttcaattctatatttgtaaagagatatgccaaagattaaaaaaatcggaaaagaaacaccgaaaaagataaagaaaaaggcacccgtaagcaccaaaatcggaaaaaaaaaagtgcaaaaaaaaaagacaagggagctatagggtggggcagctggcgtgcgcgccagcaatttagctggcgcgtatgcgcgcagtagccaccccccacgtggcggatcatgtccgtcaggtcggcgtgcgacgacccgccttcctccaccgccgccctcgccgtcgcggcgagctccctggcgcgcgccctcctcgccacgccgtccgcgccgccgtccatcagctcggccaccgccttctccacgccggcgccggtgacctgcacgccctcggcctcggcggggaggtacatgggcggcgccgtgacgcccgaccggacgccgacgccgagcacgtcgacgagcagccgctcgctgctgaactggtcgaggatggtcggccatgtcagcgccggcacgccgcgggcgatggcctccagcgcggcgttccacccgcagtgggtcaggaacccgccggtggccgggtgcgagaggatgctcacctgcggcgcccacccgcgcaccaggacgcccctgtccttgacgcgctcctcgtatccctcgccgtcgagccactccctcacggcggcggcggcggccttggcctccttgatggtccagacgaacggccgccccgacgcctcgacgccgcgggcgagctcgatgacctgcttcgccgccaggtgcgagatgctgccgaagctgatgtacagcacggacgccggcggtcatgcgtcgagccaggagaggatacgcccggcgtcgacgtcggcgcggttgccccggttggccctcgcgtcggcgtccgtgctggcggcggcggcggcgcacgtcggcccgatggcccacgccctccggccgagcgccgccgcgtagccgtcgacgaaggcgccctcgatgtcgcggaacgtgttgatgacgaagccatcggcggtgcgctcggcctcgaccgcgtcgcgctcctcctcctccaggccaggccactggaagaagcggcggaacgtggccgtgtagacgacggcacgcaccgggaagtccggcacctcgaacggctccagctcgccgtcaccggcggcgagcgcgaggcggccgtacacgccgtgcttgctcaggttgtgggtggcgaggaggaagtacgccgacgggcagtgcatgacgacgcgagcgatgccgaggcggtcgcagacgggcgccgtccacgggttgcagtagtcggcgacgaggcagtccgggcggcgaggcagcgcccggacgagccgctcgagccgcgccgccatggcccagatggccctctgcagggacaggtacatgccggggtcggcgtccgccagctggtccatgttctccagcccctccggcacgccgaactccgggccggggaaggcgacctcggcgaggtcgacggcgaggccgtcgcggcgggcggcctccacggcggccccgttgcgcgcggcgttgacgggcgtggtgacgacggtggcgcgcgcgccgcgggcggcgaggaggcgcgccacctccaccatggggatgatgtggccctgcgctatcagcggcaccaccaagaaatggagctccgccgccatcccgccgccgatgagtgtgaggaagcaagcaagttgcagtgtgcgtatacaagtcgacgcgacgaggacgacgcctgtgtcgaggcgccgcgccgcggcggcagaagcctcctggaaaagtcgggagggaggggtgatgacgtatgcgcctagcgaagcttcgtcgtcgcccgcctcgtagtcttcacagctgcctctgtcacgtggactcgtggctcccaagtccaatttcaacaagaaagttttttttaaatgcaacaaacaagaaggtaattaattgagttttaattatttcaaatttaaacaaggatttctttgatattttagagcagtttttatacagaaagttttcacacgaaacgtactgtttagttgtttgaaaagtgtgttaacaaaaacaaggtgtgtttagttcacgctaaaattgaaattttgattgaaattggaacgatgtgacggaaaagttggaagtttgtgtgtaagaaagttttgatgtgttggaaaagttggaagtttgaagaaaaaaattgggaactaaaccaggccaaagataagattctgcgtactggcctgaaggcatatatattgccctctttgtttaggcttataagccaacttataagttgaaaagtctaagccaaaacaaacaagtagctttttcatttggcttttttgaagccataagctattctaacactattaagccaaaagctaggttggagaagcttttttggcttaaatgagatagatgtatgactccactactaaacttaggacattaaatccactggcttataaatcatataagccaataagctgacttaaaagtctaggccaataagcctaagcctaaacaaagagggcaatagccatctgcttggctttcttatataggccgtgtttagattcaaacctccaacttttccgtcacatcaaatgtttagacatatgcatggagcattaaatgtggacgaaaaaaaaccaattacacagtttgcatgtaaatcgcaagacgaatcttttgagcctaattacaccatgatttgacaatgtggtgctacagtaaacatttactctactagtgacggattaattaggtttaatagattcatctcgcagtttacaggcagaatctgtaatttgttttgttattagtctacgtttaatacttcaaatgtgtatccatataattaaaaaaaatttagcacacgaattaaacacagccataatgagtttaaatgttagcacttcaaatcacatgaaaccaaggttacccttatcgatgggtttattgcacagttgccatgcggcaattgcggtaaccacaacaaaccatagaagccatacaaaatttatcaaaatttcagactattttttgaatctatttaattttatttttggtaccctagcaataagcacagttaccgtcagttttataaatcctgcttggaagtattttcaagctgttcattgagagagacaatagaggaatatctcatactcctaccttcttttggaatttcctctgaccaatttcgaatggatagtatccatagttcttctagaacttccattactacacactacactcccattcacgaggtcaggagtccatagatgacgagtgaacatgcgtcactccaagttgaaagtttattttgctattttcttctccggcatgatcgctccatccggcaagttgatacaagcaaaccggccctccgattgtttaatcgtccacacgtcactctcctttgatccgaagctcattgactcaaacgccataaaacaacttcgccacaattcactagcaacaaaccacagccatggacgacgacaccgccggccacgcctccggcggctacacgacgacggcggcggcgcacttcgtgctggtcccgatgatggcgcagggccacgccatccccatgaccgacatggcgcgcctgctggccgagcacggcgcggcgcgggtcagcctcgtcgtcacgccggtcaacgccgccaggatggccgggttcgccgccggcgtggaggaggccggcctgccggtgcagctggtggagctccccttcccggccgccgagttcggcctgccggacggctgcgagaacgtcgacatgctcccgtccaaagacctcttcagcaacttcctcttggcctgcggcgcgctccgggagccgttcgcggcgaggctccggcagcaacggccgccggcgagctgcatcatctccgacatgatacactcgtgggccggtgacatcgccagggagctcggcgtcccatggctcacgttcaacggctcctgcaccttctcctcctttgccaggtaaaaatcgtagcaaaagccactggcatatttctctgcatatgaataagggtatcccgtcatttttacatgtcacttaaaaagtcatcaaaatattttaaaaaaagtttggtaggatagatcaatatgtgatatgtaacttcacgagcatgcaaattcaaattcaacctatacaagtggaaataaaaataataaatttgactatgaataggacgcgcaattcacggtcaaatttgttatttttgtttcgaattgtataagttgaattttaactcgcatgtttgcgaaaagatatatttatatattgatctatcttgataaatttttttataactttttaaacgacatgtaaaaaacgaggggatatctcctcgagggacaaaaatctactttccatatgaacagagaatacttactccctccgtcgtgtccagatttatagctaaaaatgcttatattctgggatagagatagtagaaggagatacttatcaggtatgtgatctaagaactcacagtttggatgtgacctaaggttgtgtttagatccaaagtttggatccaaactttagttcttttccattacatcaacctgtcatacacacacaacttttcagtcacatcaccttcaatttcaaccaaaatacaaactttgcgctgaactaaacacatcctaagaacttggtccaagtttccaactatctcgcagggacatcatttatcgcaaaaatctattggagaacctcacggatgatgagatcgtcaaagtctcagggttccctacgccgctagagttgccaaaagctagatgccctggaacactgtgcgttccaggtctgaagcaaataagtgacaagatttacgaggctgagacgcgaagcgatggcaggatcatgaatagcttccaggagatggaatctctgtacatcgagtcgtttgagcgaaccataggtaagaagatctggacgatcggcccaatgtgcctttgtcacagagacagcaacgccatggctgctagaggaaacaaggcgtcaatggatgatgcgaaatgtttgcaatggcttgattcaaagaagcctggttcagtgatctttgtcagctttggcagcctctccagcaccgaccctcagcagcttgttgagctggggctgggacttgaagcttccaagaaaccattcatctgggtgatcaaagcaggaaaaaagtttccagaagtcgaggaatggcttgcagatgggttcgaggagcgcgtcaaagacagaggcatgatcataaggggctgggcgccacagatgatgatcctgtggcaccaggccattggagggttcatgacgcactgcgggtggaactcgacactagagggcatctccgcgggtgtgccgatgatcacatggccacactgttcagagcagtttgtgaatgagaaattggtggtggatcacctgaaaattggggtggaggttggagtgaaaggagtgacacagtggggaactgaacaaaaagaggttaaggtgacaaggactgctgtggagacagcggtatccatgttgatggatgaaggggaagttgcacaggagattaggatgagagcaaaagattttggcatgaaggcaagaagggctttggaagagggaggttcttcctataacaacataaaactattaattcaagaaatgggaaacaagcaaaatgcatctggttgatacatatggaaataagctttattttttcttaattgtaaatctgtaagcaagaactggaggatcctattgtgcttaccctgattttcatccctcaaactataaagaactgtactctccctctgattccaaatataaatctttttatacttgtgcaatttgtataagaattaataaaaacaactctaatgaatttgttgcccttcatctacagtatactatatcaagaaagataaattatttatttttaagagggatatagcatttatttagcaaccacaaacattgaacaatagtaaaaaaaaattgctaagaagctctgaaacgatatatatttgggtaagaattgagaaagactcaaatgacttacatttggagcccaacagtcccaccagcttctgcagtggacgaggttcccaggaccccttgcggatgagaagagtattctacaaatgatcagtgtatagagtggattagacctggtcttacatcactttcgtaattgctgcttcgattcctctgaatatatgaatgcaaattttgtggtcaaagtcaggcatagacttataaagatcacaaaaggaatttccttgtaccagataatgcagaggccagggagtatctttcgattttaagtacgtactgtattgatagcaactgtggcctctgtggttgcataaagaatggaagaagcttcatgtacgagggatctagccacgagtccatgactagcatgcgtcactgaaactgaagttgccaaagtctagcaatactgttctttttcagcacgagctcgaactggccgagttgatagtagtacaaactgttggcgctgcaatactttcaacccgtcactttcctctgatccgaagtggcaggcaccacatatgcactcctcggttgctgtcaagtgtcaagcttctcatcaactcgagcaggcaagcagcacacgacttctcggttaatgcatacctccaaggctccaactgttcttgtcacactctcactgtccacgcttgtcttggccgcttgactagatacaaccacacagccatgtcttttgccagccacgccggcgccggcgccggcgaccagcagcacaggtgctgctccaggacggtgcacttcgtgctggtcccgatgatggcgcaggggcacaccatccccatgaccgacatggcccgcctgctggccgagcacggcgctcagatcagcctcgtcaccactccggtcaacgccggcaggatggcggggttcgtcgccgccgtggaggaggctggcctgccagtgcagctgctggagctccccttcccggctgctgatttcggcctgccagacgggtgcgagaacattgacatgctccagtgcaaagacgacatgaggaaattcctcgaggcctgtggcgcgctccgggagccactcatggcgaggctccggcagcacgacctgccgccgagctgcatcgtatccgacatgatgcactggtggaccagtgacatcgccagggagctcggtatcccctggcttacctttagtggcttctgtacctttgcctccctcgccaggtaaaaatcacaggccactggcatatttatctctacaagaacaacaaatagttagaattgatcaatagacgaggcaagacatgagaatgatattggttaaaggattttaatcaaaaccacacattaagccttttatctaaaaaatacttcaggtcaggttggcaattggttggcagcactactaactcatttcagaaaatagaaaaacttttcatggtatcttaagaactgccggttggatgtgttttaagagctaagactgctatcttgaagggacattgtttaccgtaacaatctattgcgggacctcactgatgaggaggaggtcgttaagctctcagggttccctacgccgctagagttgccaaaagctagattgcctggaagcttgtgcgttccaggtctggaggaaatccgtgagaagatctatgatgaggagatgcgaagcgacggcaaggtcatgaacagcttcgacgagctggagactttgtacatggagtcctataagcaggtgacagataaggtctggacgatcggcccaatgtgcctgtgtcacagagacagaaacacaatggctgctagaggaaacaaggcgtcattggatgaagtaaaatgtttgcaatggctcgattcaaagaagccaggttccgtgatctttgtcagttttggcacccttgtcagcaccgcgcctcagcagcttgttgagctgggactggggcttgaagcttccaacaaaccgttcatatgggtgatcaaagcaggaaataagtttccagtagtcgagaaatggcttgcagatggattcgaggaacgtgtcatagacagagggatgatcataagaggttgggcaccacagatgatgatcctgtggcaccaggccattggagggttcatgacacattgtgggtggaactcgacaatagagggcatctgcgcgggtgtgcctatgatcacatggccacactttgcagagcaattcttgaatgaaaaactggtagtggatcacctgaaaattgggatggaggttggagtgaaaggagtgacacagtggggaagtgaacaaaaagaggctcaggtgacaaggaattctgtggagacagcagtgtccacattgatgaatgagggggaggctgcacaggggatgagaatgagagcaaaagattttggcataaaggcaaggagggctttggaagagggaggttcttcatataacaacataaggttattgattcaagaaatgggaaacgagcaaaatgcatctggttgatacatatatatgggaataagctttttttattaaaattctagatctgaaagaatgaattggaggatactatcgtacctatatacttgtaaggatgggaggagtccatatttggccctttaactatggtcttgcccggattttcatccctaagaattgtgctcccttcaattccaaatacaagccgtgtaaagacttgtgcataaatatgatttatttattagaaggataacatttatttagtatggaaaatctggaagaatagtaaaaacttctgtattctaaaatgacttgatattgagaaagaatcgtgaagcataaaatggcttacatttgcagcctggcagtccaccagctcctgtagtggaggggatttccaggatccctgcagatgcaaagagggagtattttacaaatgatcagtattattgtatgaggctcgtttgtggcatgattgtttacagtctggattattaaattatatcactttctgtttctgacactcttgcccaagtttcctagttacttctgaatatatgaagataaaaattaggaatagtggtcaagttatgccgtagacttcgaaagaaaaaaaatactgaatagtgagactgcagaggacagggagtatgagtatgtatagcaaccgtggttaacctgaccaaccgcgttgtccggacggctcaaagaatggaataaactcgaggactttggctatgagtccataactataacatgcacaccaaagttgccaaagttcagcgatgctgttatccttttcagcatgagctcaaactggctgatttgataggaggacaagctgctctgcaattatttaattctttttttgaaagaagctgcaattatttgattaatcggcaacattccactttcctccgactccgagatccgaagcatcaggcactactccgtagcacctcaaagcaagtactatgagcatccaagcacaagccccaagatgtcacataggactaaattgtgaggtggaggagagaagaaggatgagagagaaatagtcacctctcatgcaaggggcagcccctacacaaactttaataaacatgtgagagtgttagaaatattagggattgtgtggtagagatgacctattatacatatcacctcttaatttaattatctatgttatgtataaaattagatgcgatagtcacctccaatataaaacttgccctcagactgcttgcagtcatcaactcaaacagcatacgacttctccagagttattgcatacctccgcttgactagatacaaccacagccatgtc

SEQ ID NO: 4707 - DNA, 26592 bp, Oryza sativa
gcaacagagagaggggctatttttgccagaaaaggaggaatcgttttcatcccaagtacttccaatggtttcatgcccccatttggatctcctctctatatctacagcctttctggttaagctagccctcttgtctccatgcatccagatgctgcaggttcagtagtgacagagacacagagtgagtgagtgagtgagtggagcctagagaaaaccagcttacaattgcatgcatgcatgaagggaattgatgctgtgcatgcaacagtccaatgccagtatgccactgtgctagtgtgcatgcatatgtggctctcattgcatatgcatgcaaaaatcataaccaaattgtatctcaggtgttgatctttcagtttcctatagcaatgcgtgatatttgaagtattgttagtcttagaaatttcaggatggctagtgtcatgaggatggattctaatctctcgggtggacatccactcgtttcttgcatgtcacctaaatgattatgaaaaaatttcaaaaaaaaacacaagatagtttaatatgtaatatatcacttcacaaacatgcaagttgagagtcgatttgtacacgtgggaaccgaaataacacatcagactctagctactatacgtatatccacagttaaatttattgtttttgctacaacttgtaacgttcaattctggacatgcttgacagggaagtcctttctcacatattaacctatcatatcaatttttttgaaattttttcataaccatttagatgacatgcaagaaacgggtggacatccacccgagtgtttaaaacagtttcccctagtgtcattgattagttgggtggtcaaaaggggagcaagaaccaccagattttgattgctcatgagacatgtgcattagaatctataaaattctcacgcatgcttgcttacattttgggggtcacggttcaggtgtgccacactcacactggtttggttgaactatgatgtgcaattgtgcatgcatgcatgccaactgagagcaccagccaacaccaggtagatgaaaggatataaacacgggtaagcaaaattatcaaggaagcctatgactaggcagacaagtatttaatttgagcaaagttcagcatgatccctagctgtatttactgaattatttagcagtttttcaccccacgtatatgtgagaggcaaatggccatctctgaatttttagattgtttttttggtttgtgaataaggctatatagtacattgcacaatgtacttatgatctgctagtgtgtgttggtagatgagagggttcttcgatgggatttaaccacatatgctgctgtgaagaggtaaagacaaacatagcaggacaaggatataaagtaaaaaaggagattaccacaccatgctgcttcagaagttcagacacgctctggctgctgcatttttcctgggccaatccaaacttcagtttagctcacctagctttcagtgttatacagaattacagtttactgcacgaagaaccttcatgtattcactgcacataggaggtttctaccctgcagtaatagtagtactaagtactgtaactttggttagtcagagtgtcagatgctcatgccaatcgatcttcatcatgttcatggcatgcacattgctctctttgcccacccctgctgaacatgatagagaaattcatcacttaccgtgctgccatttgacagaaaatatctcttcagctgatcagctcgccaggaaaaaaaaatctgagttgatttgctactgaactgcacagcactgtaatgataaattacacggtctctttgcttatagccttaatactgcagtactaggagtaacaacaactatatgcactccagttactacaagatcgaaccagtaatccggtataccgccaaaatcgccacgtttcacttcgggatttcgaaattgctctgaattcctgcgaatgagagaaccatttggcaatttttaacttgtaagcaggagcaaacgaacatatatgcaggaacaaaacatcacgactcaaaaaatgaaagatggtaaaagcctgaaatgtaatcagaaattgttctcttttctacttttctcttcagaagttcagaggaagtctctctctctctctctctctctctctcacacacacacacacacacacacaccaaatcatgtcaggaaaaaaacaaagcacattcccaactgcttgtccctgaactcccggttgatttgattctcctttcctcctcctgctccacctgcacctaggtttcctgggattacgcaggaatttactctgctcccgggggaagagaagagaattttacagctactccagtctccaggcttgcagcatctgatctgatgactgtctgtgagctgcagttcatccggcgtctcagtccaaatcgatccaatcaatctcattctcgtggctgttcttggtggtgatgattgggcgggaggaaattctcggcgccgcagccttcctcctcctgcttggaacgccgcgaaaggcgtcggcgccatgacgtctgcttcgtcagaatcgcaatggagagagagagagagagagtcgtcggctagctccatggatcgacgccgccacgcggactgcggcaggaaccctcgcttcgccggccggctccccgccgccggcctgaggaaaagttaggttttttttttggaaaaataatggattcttaagccttctacttttattttttttctaatcaaacttctttaaattaaaaaaatgacaacgcatacaacaccaaattaattttactaaacctaatatttaatattttgtgtggaattttttatatttttctataaacttattcaaacttaaaaaatatgaaaaaaaaaaaaaacgacttatatgaaacacttaggctgctttcgttgctgggagattgagagagaaaacacatctttttcgcgcagacgctttccgaactactaaatggtatatttttttggaaaacttttctatagaaaagttgttttaaaaaatcatatcaatccatttttaactttaaaataattaatacttaattaatcatataccaataacttacctcgttttacgtatctcttttccattttcctcaaacacagcttagggcttgtttggggagctttagattctgagaagcagttgtttggtagccagcttctgagaatctggaaaagctctgaaaccccgtttctccagcttctggcttcttaattcatttttcagaatatgtaactacagattctcagaagctgtgaactgtttggggcagcttctagcagaagcagcttttgggaaaagctgcagctgggataagctcccccaaacagggccttaggctcctcttgattcaatggtatgcactatgcaggtatattttcagcgcactcgaaacaagaaaactcagtagcacataattaattaagtattaactattataaaattgaaacatagatttatgtgattcttttaaacaatttctacatagaaacttttagtaaaagcacactatttagtagttcgaaaagcgagaaagttaaagtttggagatgagaaaaggtactaaggcctaggtactctataggcttaaatacgctaaataggcttaacatgttagcccagcccaagatgtttcctgcaagaaacggtgggcctgaacagagcggccatgttagtccgagaccatttgcgaattaatgggcttctctgaaactctgaactttttccttccttttttttttttttgcggggactgaaactctgagcttttgatgtgcttcttttcttctcgtatcctatcatcagttcagagaagttcaggtgcgtgtatcaaacgaagaagaacaggatcaccgtccttttctggtcgttccatcacacattcacattgccaagaagacattttcatcgcttgtgaactctgaagcctgaacatttactagtactacacgggcgaggcgatggttttggtttttgtattgttttctgcaggcagaaaacaggtctgaacttttcctgtcacgcactcacacgggaatactcctggatatatactttcagagtcaaagaaatacgagtatttgcaagtttgagccagtagtaaaatgatgaaaactgagacaagacccagcttcagccgataagcagtagaaaaagcaaattacaaacttggctctgattgtttgaaagctcgtgccggaaaacatgcctccgattgtttgatttgagactaataaaccctagaaaatgagtaatccatatgtaaaacttttatatatatatatatatttttaaacggtttaaaatccaacattaaaaggactcaaaatcaactttaaaactaggttctactgtaaacttcaaatttggctatgctgattagataactaactactccctccgtactaaaatataagagatttagggatgagactttttctaatactatgaatttggacatgctctttgtctaaattcgtagtattgtaaagtgtcacatttatctaaaatctcttatattataggacggagggagtatcacaagctaaaaaaaaatcctaaaggccattttggtttgatactaaaaacataccctaccaatttgttggcaaattaaatagtatatatgtattagtttggattgagactaaatgtttgttagtgcccctatcatatttagtcatattctaaaagtttctcaactataccgtgagaatttagctttatattggtagcgatctaaatgctagctaaataattttaccctaccaatattagaatttagctttatattggtagcgatctaaatgctagctaaataattttaccctaccaatattagaatttagctttatattggtagcgatctaaatgctagctaaataattttaccctattaatattttggtagtgccaaagtttaccaataaattggtagagtaaagaaccaaacaaaccctaaaatcaactctaaaattgtcagcactaaaattaagtttgaagattttttttcttttttgataagctgactagtctaggccctattgtttagattccaacttttttcttcaaacttataacttttctgtcacatcgaaattttctacacataaactttcaacttttccgttatatcgttccaatttctttaaacgtctaattttagcgtgtaactaaacacagcccctatgtctgatttggtgggcgttattagctgatgccttgatgagctgattaactagcattgtcacatcaaacctctaagcacagtgaggtcaggccggtcagtggggtgctcaactgcagcagcagcagctgaaccaaaaccaaaacagcccaaaggttcgtcagtattcgtactcttcctctagagagttcagttcacacgcccaagaagtacagtacaccatttgactgcaaaaatctactgctagtaggagtgtggtacttgctagtacttctacggctgtgttcgcatgtggatgatgggaacatagtgtctccgcacggaaaacggagcgatctattagcacgtaattaattaagtattagctaatttcttttttaaaaataaattaatttgatttttaagcaacttttgtatagaaactttttgtaaaaaatacaccgtttagcagtttgaaaaacatgcatgtgaaaaactagtgatttgggttgggaacctggaggtccgaacacacccgtaatgatgatgaattttgggaaatttcagcactcacaaaacactcgaaggctggaaattaggctgcctttggcagtgagctttcccaacttttacccatgttttccccgtgcgagttttttaatcggttaaaaggtgtgtatttttttttgaaaaaatctatagaaaagctacttttaaaatcatattactttattttttttaagttagctttagttaatccttaattaattatatgctaatgagctgtttcgtttttttatgttggagggaaaggttcccaactcagggcaaccctatgtttatgactttggccgtgtttagttccattttaatttttttaaagtacaaggacacacatttgaagaattaaatgtaactaataacaaaacaaattatagattccgcctgtaaactgcgagacgaatctattaagcctaattaattcgtcattagcaaatgtttactgtagcaccacattgtcaaatcatggcgtaattaggctaaaaaattcgtctcgcaatttacatgtaaactgtgcgattggtttttttcatccacaattaatgctccatgcatgtgtccaaacatttaaagtgacggaaaagttagaagtttaaaagtaactaaacacaacatttgttcaggaggatgtcaaaatcaacattattaaattttttattcttaaatgtttggcacattttaacggtaccaaatttcgataatgttggataagtttagttgatagcctgatcaaaatttggtagtattttttataggaaaaagtttttgaaaataccaaaatttactaaggtgtcaatgataataaattatttaatttgttactttaccaaattttgtgacacggagccacggatgcagtgcactactccctccgttccagaaaaagacaaaccctaagtttccatgtccaacgtttggctatccgtcttatatgaattttttttataattagtaattttattattgttagatgataaaacatgattaatactttatgcgtgacttgtctttttaatttttttcatagtttttttaaaataagacggatggtcaacgacacaaaaatgtagggtttgtctttatatatatatatatatatatatatatatatatacacacacacacacactaaggaagtaagtacgagtgctacacttgcctccattgaggatgagagctcgaggtggctagtagtcccagtgaggcgcatttctccaaatcctccaggatcacaagtggaacgctaagggcccctttgttgacgaaaaaaaaatcgaacacaccggtctgggagatctgcttagcttctgtgtaggtccaaagattgatgagatgcgggcgtgccagtcagtttgatcctgcaactgacaagatatgtaaacagcagatcaaaacagccgatcggctgacaagccgatggagtagttccagccggtagccaataatagccgatgccgataccagccgatagcgatagggtttaagcaatcggctatatgtccaatgtagataacgatataaaggcaatcggctgatgatgatgcaataaaataataatataatccagtataaaccaatcggctagcaatgatatgataaataagcatcgatccgaaggttaaagcacacatcggctggaggtccgatgtcatgaaatctacaagattagattaaacagtgaaacctttgttgtcatcggcgaaatccaacttatatgtatgtgtaatccttatgagccgatgcaacgtccagataactcaccggctgaaaccccgatgaaacccttattggcaatcaagaagcaggctagagattatggttctaagcacgacttagtagatcaaacttaaccgatgcagcactaagtatgaaaagaaacataatatctagatttttaggatggtaaatgtctgagctaatctaatctagcaacgcgatttagctgatatcggcagaaaccctaaaacgagaagcagccgatagagctaaattgatatgctaggactagattaatagagacatatgataaataggtaggcaaatatatcatccaaactagagcaatccaagaggtcgaatgtgctgatgcagccttgaatgacgccgatgtagatgagacaattgcctgggccgacggaacattggacttatcccttcgtcggagatcgaagacgatgcagccccgcgtcgggtgccaagttccgccggaacataaaaaacaaaagtagaagtaaaaagggtagcgatgcaccaaattgtattgatcgtagagatagattacatagaccccgggtgtacatatttatacccatgggttgatacaagtccttgtcggataagaaagaaactaacctaaagataaaaggaaaatataaagtccttatcggacactaaacacactttcctaaagataaaaggaaactaacaaactattcttaattaatagataaactgccatgccgcatcctttttaaactcgttcaattagggataagcttcctttagtagattgatttccttaaccgaatatagcaggaatccgactattggcgacttgataactcccatcggctgattccgagatgctgcagccgataatgattctaagccgatgacgtctttgccgattaccaaatttcactgttaacaccctttgaatcacagggtagaaaaaacagaggaataggaaaaacacaggattctgacaggaattaaaatgtaaaacaaaggattgcaaaacacataaaaaaacaggaatggtcgtttgattggagcgcagtaaaaacgcaggaatcggatgagagagatagactcaaaagaatttttccaagaggttggagctcttgctaaatttcctccaaaatccacatgcaatgtgccattccataggaatttcataggatttggaaagcttcaatcctttgaatcaaataaccaaataggaaaattttctatataatttaaatcctataaaattcctatataaattctttgatttaaagcggtcctaagtaagggtggggaggttgctagctccatgtcgaacagaaagaagcaagagtctcgagtctcccactaggcgagggaaggagacacaggtggcacccctggtggccgcggaatgacggttgtgcccctggtggcgaggggtggcgtggggggcaggacggtaaatctgcagtggagggggaggcgactgggcggtgagctgatgagggaggggggcagactggtcgctgacacgtcgtcggcgagcgcattgaccgttcctcccctgccacccgccacgtggcccgtcgcctgtcacgatgtcacatgccccgccctactgtcctctcctgccctgccctaccggtacgtgctccgtctgtcccttaaaaaaattccatgatattttgagacaaatgaatactccctccgtatcaaatgtttgacattgttgactttttagcacatgtttaaccgttcatcttattcaaaagaatctgtgaaatatgtaaaactatgtgtgtacatgaaaatatatttaataatgaatcaaacgatgtgaaaagaataaataattacttaaattttttaaataagacgaatggtcaaacacgtactaaaaagtcaacggtgtcaaacattatgaaatggatggagtagtatttacgcttttaatcttaaaataaaccaagtcttgtatatgaaaataatactgatagatattatcttcgttccaaataggtactccctccgtactcatcaagatagtaacacagtctccaaaacacaactttgacttattgtttctataaaaatatttattgaaaaatgatatatgtatacttttatgaaagtatttttcaagacaaatctattcatatattttttacatttttaaactcaacaacttaagagttattcatgatttatatttctaaggtttgacttaaacattgtcctaaacgacttcctttgcgagtacggagggaatatccttttaggattcaatttttttccaaaatatttgtactctaaaatattacctctgtttcaggttataagaacggaggaactatttatcctatccatcttcttatattaaatttctccttgttataccctccaattgccactccgattctaaccatatcatttacagaaaagagaatattgagaagatacgcaaaacgatgtgagccattagtgcatgattagttgagtattaactattttaaacttcaaaaatggataaatatgactttttaaaacaactttcttatataaatttttttataaaaatacacgtcgtttaatagtttgggtagcgtgcgcgcgaaaaacaagttgttttctctctcgatctcccagcaaggaacgcaaccttagtgaagagtagtatagtattttaacttaaaccttaatttatgctaaactaacaaaaaaaaacaattattttgggatgaagggagtataacctaacggagatcctctgcagggtagtgctactcactgggcacaagggtttatgccttatagatccacgtgtcagtgaacagtactgcagagaatcctctttcaatataaccttattctactaagataagcatattatactgctgatgttggtcatcggagatgatcagcaaacatttactaaagtttcaaagaaggaaaagaataataaagctttaatactactactacacatttggtcctggatgaatggggaaattagggcttatttgaattaaaggatttttatgatgaggaaaaaaatggaggaatccaattcaaaagaaattctcctactatatgagcagtttagtttggatcatacgattgtttcaaagggatttcaagggataggaaaagtctctccacatcttcgaggaattctagcatggggtctaacctcgttgtttcgaattcttttgtgatttttaaggcatgttctctcctcctctctctagcaaattaaacatgtaatctcaattttctctcacccgttcgatatatccaaacacttgtgtttgaatgattcctgtagtttgattgcttggaggatttttcatgtcgtgacatttcaatcctaagttttcctcttcctgtattttgagtcatgttccaaaggaacccttaaagtggacttataactttcatcaatacatatttggtaactcatggtaaggagattggaaatttagagtaataagctaatgaagggattgatcctgtaagtttcatttttaatctctgtcgtttgataggagatatgagaattatgatgaatttgagtgagaaatgaattttaagtgatgatatactaacttatttttttctctcagttacctgcctctacccaaatattgaaaagacgagagttcgctcttaaaactcctcacccctcaaacttccatcatcttcaaacattccccctccctcctaaccaaacactccctcagcgttctgaatgcaacgtgctattcaattaatcacagaatataactttgactgacttacaaacttagtaccagaaggggataagaagtgaaatccgagtagaaatagggagattcaaaatcacatataggaaagtaagaataaccaacaccttcactcttggataaacgttgtcacaaaatacgtaccgtcaaattttaaaaccttaaatggccaattaataaaaacatcaaagttttacacaatgatgaaatatgtctgttatacctattgatagtgagacatctacatgattttctttattaaagatatgttggtgcaatctctgaaggtgctctatgcacaagtgtacatataagtgcatgcatctgtcatgtgttaaaaaaaagctcagagatgatgagatatgttcattacattaccaaaacaaagcataacaatgaattaagtaccagataaatcttggcaattgggctcttgaaaacctggtgcacagtctcatcatctctactgttctacagaatcacctcccttatcttacctgcatgacaaatgcctcgagaaaaaaaatatagccacgatggcagtagcgaaatatcgtgcaaaaggaggggcagtttcgaccgaggagctacagtgagccgcaagtacgcttttttctgcaggctcatcaatccatgcacactcattattagccctagaactgtagcatcatttcacatttattttctttctctctctctcggccttaatcgcatataacgataattgatatggataattggattggattatatgcagctgtatcacaaattcacaatcccacaatctcattttcttttttactcggtgaaccactaaaacagtgtgaaatgggcagctgtttggcgttttcaagaaagaaaatattgttaaactgaccttttttgacagtcatcttcagttttttttttttgtttaagcccttcctctcctcactcacactgccctgttcatctctttcttttttattcgattcctctattccattccacacgcattgccgctggtagtagaagtatagtatctctccgcgaccgaagattttaaaaaggaagcaatttgcctcttttttttttttggcgcacctcgattagtagtagattttagaggcgaatgtgagcggtcaaatccttcttttttagcttgtgcgcgttgtgttttgtgctctccttttgtcagttcctgaggcgctctctcctgtgcctttgtgtttagcgtgcgtgaccgcgagcgaggtcgaggagtgagagggagtgaggcggcggcggcggcggccatggcgcagcagcagcagcagcagagtgcgtgggaagcggagaagatgtgagctttctcctatctctcttctgttcttcgttgcttcatcattccttagtttgttattgcgatcagattggtttgatgttcttcgcacattcttttttcccttttttttatgttggtgaaatgttctccgttttgtcttgagatttttttgtcattccatttggttctcttggtgtccgcatggttatctttccccaagattagtttcttgttttcctctgggaggggtttcggattcgtttcttggcggtttagatcgtctttttttctggtgatttttgcaagaatcttgtccttcatcttcccttgttgttgtatttcagagggctgcagacgcttgagattctgtttgagttccctgaaatttctgcattttccgttctgcattttggtttctccttttgcaaaagccatgcctcttttttttttcttgttcctcttgttccttttatttttctcggatacagtactagtttggtttattgcttgctagcttttcaactgccttttccttttaccttgcattgcaactgccttttcatttctcgaaatttatttgctctttcacactttaatctgcattttacctttttattttctcatgaaaactttcgatcccctccttcctgttgctgctgtgcttgcatgcaaacccccatgtttccttttttacttattatatatccccgcactgaacttatccatgtctgttcttggaagcaggttggacgtgtacatccatgattatcttttgaagaggaacctgcagagcactgccaaggcattccaagcagaaggcagcgtgtcttccgatcctgttggtcagtgcatcaatttctgaattttgtcatactactgtagtttgcaatctttgctctttctgcattaggaccagatagtttgttcctcagactgccattgttcttgggccaataggatggttacaaattgatcatttgattagcttgattagtactacacttacatttgtgcatgtgcgagacacgagtattattagctactcgtaccgggcagatacaaaggaacaatactacagccacattgttttgtctgatttatgcatgccagtctctgatgtttctgcattgtaatgaatgcgattttaatcttcttgtactgaaagatgtcagcttttgttttgcaaaaaaagcaattgatgccccagggggtttcctcttggagtggtggtctgtcttctgggacatcttcattgcaaggacgaacgagaagcactctgatgttgctgcttcgtacattgaggttcttgtagcacatgcatcttggttattacttgtccttgttgtttgcttgcactcacttggtacagtggtttactgcttatcttacaataaacatgtgtaaatgcttgaattgtgtcagtcatagagatcatgttcactgtaaaaggatttagttttttgcctaaagcaaatggatttaaattccacacaaacattgaaaaccaaattcaagaactttccatgtcactcttgaaaaaaaagaagaaaatgcctaattcatctatgtaggaaaaacttgttatggtggatatttttttttaaaaaaaaaatcaaatgtttccccatatttccaaacaaaacatgctgcatcatatcacacaattatagaagaacatgtgtcttaatcattttagaaggtacagaatgcaaaacactttctcgtagaatacatactatgttgtctccagctattatcatctttaaaattcaagtaaaatttcaaagtcaacattttattatcaatatgattaattactttgaaggcaatggtcccttccctttgtagtaggccgtagctaatacctgttcattttctggtgattactcatttgaaactagccatttcttggtatatgatgcgtcaatcttattgcaaaatgctattttcatgttcctgatgttgttacacataaattttgtaacccagacacagtcaattaaagctcgagagcagcagccatcacagctgcagcagcaagaggctcattcccagcagtcatcacagcagatccaaatgcaacaactcctactacagaggcatgcacagcagcagcagcagcagcagagtcagcaacaaccacagcaacaacgccgccagcagaagcaacaacagcgtagtgaaagcagtcatttgccgacaagtgcacataatggtttggtttctgctgatcctccaacacgacaaagcacttcagctgcaagttctttgtctgcaaagatgtacgaggagagggtgaagaattctgttcaaagggacaccttagatgaagcacctgcaaaggtagtttcttcatggcaatgtgtattgttgctttcatgatctaaactctcataatatgaaatgcatatctttatactgcagcaaaggtttacagaaaatattggacaactgctggaatcaaactcatcatctatgctgaagtccgttgcaataacagctcaggcttcagggtaccaactgctcaataatgcttgctaatcatttacttctcttttttttttttttgggggggggggggagtgtggggtggggatgggaggtttggagcgcaaaataaataccatatcagtcttaaatacagcctataatgtgtgatctaataggatttcctaccatgcttgaattgtgtttaccgcctttgtttttacctaactattttgcggtcttcaaattgcaactttgaccattaattcttattgtacactaaaatgtgctaataaaaactattatattactttcatattattcacaataaatctatccagcatgtagtagctgtttgactaaatttccgtaatcaatgctatcttgatggttcatactgtaatggctgtttaacggcaattatctctagcttctgttttcctgttagcgtgtgtgtattgatttgctttgatcaattgtttttaggcaaattttccatggatcaactggtggcgtgtcaggtactttgcaacaggttcaggcccggaaccaacaactccaggcatcaacacaggtagtcttatttcagatgtataatctcatgcattattgtctataactagacgagtcaaatttgtttcaggaaataaaggtagacacaaatgctgctgtacacatgagagctgcaggggcagatggatcattaattggagtaccaggtttttttgctttgaactctactaatttttgttgtttctggctgctaactggaaattcttagacctgctgtactgtttattcatgtacttagtgccattgtttgataccctgttgtctggcaggcgctaacccagcagggaacaatttgacgttgaaagggtggcctcttactgtgagttcttcacatcattccttaactggcattctaagctataaattaggagcaagtttgaatacagcaccttctttttttttttgtttttatgatgttttaccatttgattataacttttcagggcttagaccagcttagatctgggtttctccaacagaaatcttttatgcagtctccccaaccattgcaccatctacaatttctcactccacaacaacagcagcttctgcttcaagcacaacaaaatatgacatcttcacctggagagatggacagcagaaggcttcggatgcttttgagtagccgaaacattgttcctgggagggatggtcaatcaaatgcctacacggaagttattcctagtgttggcccttcattgcaaaatatgtgctcacctgtgcagcgcatggagacagatatgctgatgaaggtaagtttcacttgtatgttttactatattcatgcatttatttatttgcgaggatacattggatgtaagtaatagtaccttgtaaaccaccgggttatgcataattttgttctcaattgatatcttatatgtacatagattatattgtttaattcttgtcagtgatcagtaatagaatttcatttaaatttatcatgcttgttcttgttatgttatgttgccaagtttgcataacacagtaccatttactttctactatagcatagtgattaaatcatgaaaatatcggtcttggtccttgtgtaatataatcttttgaacagaggaactcatactatttggatttcataatgatctagctgctattaatacatgctcacatgttttctgaagctacctttttcaagataacttctacatctttggttttcgaccttaacacctcgtcattatatgtagtagaagatagcagctatacagcagcaccagcaaagcagcaatcagcaacagctccttcagcattctttacttagccagcaaccaccaatctctaatcaccttccaggccagcaggaaaaaatgggagctggaagtgttactattgatggaagcctgtctaattcattccgtggaagtgaacaggtttcacttccttctacatatattcaacattaccaccttgatttgttactgtgcctatccttttgttaagacttgtatccatcataaatatattgttttgcaggtttccaagaatcaaaatgggcgaaaacgcaaacagccaatctcatcgtctggtccagccaatagttctggcactggaaacaccgcggtcccctcctcagaaccctcaactccttcatcgcaaagcccaggagacacaatttcaatgccctcgctgcaccacaatgctagcttatcaaaggctttagttgtttacggtaccagtacagcagggacaatgggatcaccatcaaatcaacttgtaagttacaactggttctaaatccaaacagctatggccctattacgtggatatattatgcatgcaacatagtttggaaatgtttcattgcactgatggtctgtttgatgcctgacttctgaacatctgataactcacactgcaggctgacatggatcgttttgtggaggatggctgcttggaagatcatgtggattcgttcctgtcgcatgatgatgcagatcgaagagatggcagtcgtatggaatctactaaaggtgtgataaggctaactgttttgtaacttatggctagttgaagttgaatggttggctttgacatattaacatcattggcagtggttaccctggccagtttagtcttgaatgtaattatggctggtgtaaatagtaccaacaagctgaactcacttaggtgaatttagcttggaaattgagcagttggtgcggttcaggctatggtcctgtgagaggggaaattatctaatatgtcatgtggtaacatatattggttcagtgggttagatttatgatgtattttgtagggaagtctaacatgaatttgtgttctgtagagctttgattctgtttatatgtcttaagcaggattcatcttccgagaggtctcttctgtacaagcaagcacgaacaaggttgtatgctgccacttctcatcagatggaaagctacttgctactgggggtcatgataagaaggtaagtgcacatgcctgggcttgttaagatgctcagcctagttgatactcttggaagtgggcaggcatatctttgacttcatggtgatattgaaatagatacttgcaatgtttcaatgcaggtggtattgtggcatgctgaaactttaaaacagaagtcagtattggaggaacattctcttttgataactgatgtacgattcagtccaagcattccacgccttgctacctcctcatttgataaaactgtcagggtctgggatgctgacaatgtaagtacataactgtttagttcttttttcctaccatctatttgcctcggtgattgcctctgtgttatgttgcaaaaacctgccaactagcactgaaaccatatcaaattgccatttgtatatttagccagatttttttaccttttgaactgccctttatgtagaaacaacatcataaagttaagtaggctataaattctcaaagaatacagtaagcaatgtccatctcaaggtcatatgtcgtgaatgatctacaacatcaattttgagattcataggcatggcatggattcattttgtagaagtggaacttgtttgttctctaggggatataagcatgatacttctgaactttcagattcctgggtaatgtcagtacttgtaatgttaaagctgcaagggcagcaaagtactgttgtgttttactgctcatcatattctaatgctgtcattgtacttttgcagcaaggctattcaattcgaacgttcactgggcactcagcatctgttatgtcactggatttccacccaaacaaggatgacctcatttgttcttgtgatggggataatgaaattcgattctggagtatcaacaatggaaacatcgtccggatatttaaggttactcagtttttcttattcagcattctgtcaatctggaagtgctgctttattgtgaacaatcctaacatttccttgacaaagcactccaacgtatacttgtagacttttctctttatagaaaatgtgcatgatgaatgtcaatctgttgaaaacatcctaaaattacgtaaaagaaaacatcctagatgttttccatacctacttgttaattggtttcaatcactgtcataacccctttgtagttaatgggctgttattaggtgtctccatccataatcaacaactggtctcaaaaggagatgccttgtaggatacactgtttcttgatttatttgtttccaatccctttgtagggaggatcaagccagctgagatttcaaccacgtcatgggggatatcttgcagtagcttcggagaatgctgtctctatacttgatgtggagactcaagcttgccttaggagatttgaggtttgtagagactttctaccttgcagttggcacgtgcattctgatcttctaaattcactgaggttccagtaacatatataccgaccaacaaatctatgtgcaaggatgtatttacttttcaaatctcgtttttagagtgagttttggatactgcaaatctatctatttattttgtaattagctttgtggtgttcatttcccttgatggttagttgtccttgcttggttgtttacatattttcaaagtcgcatcgtgctagctgtagccagtgttcacttccatgttaatctttagagtttccgagtgatggtaaccaatcactttaatctgtcctctttattgggaactgcagggccacacaaagcatgtcgattcagtatgctgggatcccagtggcgaatatgttgtatctgtcagtgaagacacggtgaaggtgtggtctgtgaatgctgggagcgatgatcgctgcgtgcaagagcttagctgtaccgggagcaagtttcactcgtgtgctttccacccttcatattcatctatgcttatcattggttgttaccaggcaagtactttatattcgtggatctcttttatgctcatgcgtcacgattcattcaaaactaatctgcactgatcatcctaattcctaagtagctggttaaaaatgactttttctagatcaactcatgactactcactcacactgaggatcattccacaacttgaatttcagtacatcattacacatatatcaagttcctcaaatattccttcatgatacacatgcaattattttgaagatttactgcaatgaaatacttttcctatttaagaacaagcattcggccatagagaccacttatgttttcaccgcggttcatgtttacaatgcctgtagtacgcttacctctggttttgtgtttgaatgccgcagtctcttgagctgtgggacatgtcggagaacagaacgatgacgctcgcagctcatgacagcctcatcacagccctggcgtcgtcaagctccggtttggtcgcttccacgagccacgacaagttcgtcaagctgtggaaatgatgtgctttcaagctagccgcgccctctaaccctcttctaaggatgggcctttttcttcctcattttttggtcacaccatcagctctgaagagctattgtgtgatgatggtataaacactctatatggtataatatcccccacaaagtagctggctactgaatgactgatgaaaatattgctatcctagtataccttttgctgaccctgggaaagtagcattttgtacagaacatgaactatgctttagtattaatcatagtctatctgaactactgaagtgtttatggtctgaattctaagaagttattctgctgcatctctgctatgaatatgaagaatgtgatgaatgtggcattctcgtaggaatttcaagggactttttttgtaagaagtatgctcaattccagcaagaaattggaaattttcttactgaattttacaaacgtggtttcgtcacggatgcttggtgtctggggaaagcaatgaatcggcatctctggcctgcaataaacgaatgtatttgccctgtttgcatgttcagtctttgcacggctcttagattccccagcctgtccaaaaatacccatgacacggtttgatcgatcgattgcaacacaaatctgtgaacagatcattggttcctgatcagagatgttcagttacttctctgaacattgatttttcttcttatcagatagggaatgtgcatctttctctctgatcttcagtttggaagaacactgcatcctgtagggctttcacaatgatagctacacctacatgggaatttttgagaagagtcatatgcatcttcatcagaatgatcagaggtaaatacaatgcttagttgttgcaaccatcatcacaggtttaacaggttctcagattctgttttgtttagtttaccacttgactttataggtttataacctggagaaaaatgtatttctcgttcataaagtgaggaggataaaatgccgtccgagtagatggaaaatactggtttagtaatccaaaataatctagaggttctaaccgtttctaaaacaggctgggtggaatgtcatctaatccaactttacaagaactttttatcggttttgagtagcggaaatgcctatccgtataattatcaggaggaaagcggcaaattccactctacattatttaagatcttgaaggtgtttggtacatcgctctagctaataaaatcttggagtagtagtgccaaactgttcttaggcggcattcgggaggaggggttgtgaacccttcatcctcaacaggcaaaacgaaaaatacgtattattgtatgattaattaagtattaacttttttttaaaaatgattaatatgattttttaaaacagctttcttatataattttttttaaaatacactgtttagcagtttgaaaagcgtgcgcgtggagaacgggagaggtgagttgggtatactggggaagaacacagactttgcaaaaaaaaaagtccccggtgtaattgggaaaaaaaatcattagggatagatggatgtatcattttgtttcacatatttatccctggttactattataagccgtgttgatattttatagccaatcctttttgagtttgatcaagtttataaaaaaatatagcaacattttcaaaacaaaacaaatatattatcataatatattaaatattagttttagtgaaactaatttggttttctttataaacttaatcaaacttaatgaaacttgattagaaaaaaacaaaatataatatcaaacaaagaagtactccctccgtcctataatataaggaattttgagtttttgctcgtagtgtttgaccactcgttttattaaaaaaatttatgtaaatataaaaaacgaaaagttgtgcttaaagtactttggataataatgtaaatcaaaaaaataaataatagttctaaaattttttgaataagatgagtggttaaacagtgcaagtaaaatcttaaaatcctttatattatgggacagaggggtagtatttgtgccttttctgaaagaaaatctaaaaacaagacaataaatgcgccggcaaaagccaaactaacccccgtgtttaaatcgcctcccgtacaagtctcctgcccctaccaataccaacttaacccctcttcttccatctctaatctaatcactcctcccctcttccaccctccccccacctcgtcgcctcgccgtctccacccccaaaaccctagccgccgccgcgctcctcctcctccgccgccgcccggcgccgcccgcggccatggatctcctccgctcgcacctccacaaggtccgcatcccggagcccggcagccgcatccacaaggacgagtgctgcgtctccttcgacaccccggtaaaccaaccaaccacccacccacccacccacgccttgtcccccccttcgctctggtttcctagggttagggttttgacgccgatttcgccgtgcagaggtcggagggtgggctgtacgtcgacatgacctcgttcctggggttcgggagggagcacgtggcgtggaactacgagaagagtgggaaccccgtgtacctccacatcgtgcagcgccggaagccggagcccgacgacgaggcggatcgcccgctgaagaagcccacgctactcgccatcggtatgagtgacagcgctttcccactgatcaccatcgtgtatttcatactgttaaaattgtgaacgcatgaatcgcgttagggtatgtgattgtgtttggatgatgtgatcgttttcctattgcgacttgtttttaccctatgatcaacatcgtatttcatactgttgaaaatctgtatccccattatctgttcccctttgtggtagagacttaccaaactatggtagttatcatatatcttgtgttctgtttgatctgttgagctactgtgctgtagagaaaaaatatggtagtgcattgctttgtttgctaatctggaaacagagaccaacatatggtggccatgttggtgaattgtttgttatgtgatatctgtatgctagttatttgtaattagaatagttgcctatgtcctggatttagatctatatagttgtattttctctgttctgtattcccatgatggcaaatagatgaatgcgttgaccatctttactaatccgggttttctacaatttataggagtggagggaggtttcactgatcaagaacccgaatacgatgaggcttttgaaattgttatcttgcctgaatttacttctctcccttttccatcaattgacttgccagagaaggtaactgtgcttgacataagagattgtacttacttactacatagtagttacttactactctacaactccacaggttaggattgcagttgacaaagttatacttgccgaaagtgctgatcgaaaacaacaattggcttcttgggttgctgacaagaaaaaagtcagtgcacatgctatggatctgaagcagctagacaatggtgtcattgtgccacctacaggatggaagtgcagcaagtgtgataaaactgagaatctctggttaaatttaactgatggcatgatcctatgtgggaggcggctttgggatggaagtggggggaataatcatgctattgaacactacgaacagactaaatatcctcttgcggtaaagcttggaacaattactgctgatttagaagcagcaggtaatgctactcgtggaccttttacatatttaggcttcctcttctattatcgaatacaacttacggtgacattgggttgtcgcctgtgaaaaattgaactaaaccccttttaacctctcacaaactgtatcctttgtaatatctaaattaaaagtgtcatatatatgatgctcaacttggaatgcacttttagaatactatactccctctagttttaaatatacaaaacggtggaccttttaaattcgtttgactatttgtcttctctagaaatatttgtgcaaataaacaaacatataaggcactcttaaagtacatttgatgaccactttacttaactaagtaattgaataaacattgttggtcaacgtttgagaaaagaagtggatggtgtcatatatttaaaaccagaggtaatacttaaatagcttttagagatatgtttgttataaatacttgtctttattcagaggcacaaaaagttggaaaatgttaatgattttgtgattggagggagtatattgcaattattattgaatattcactttaatcagtaagactcgttcttaaattccagagttgttccctggatacatactgctcgtacttcataatttataacacacagcccaattagctactataaaagtaatttacactgatattttaaccttccattgaaatattttgctttcgtcttattttagttttaacaaagaatattcttaaagtcctaaagcaaccttcctatcaagggcatgtgctgctgaagttactgttgttttatatttaaatatacctattcatacaagcttttctgtgacagctcagacgttttctcatacccagaagatgatagcgttgaagatccactattagcgcagcatttgtcacattttggtattgatttttcttcactccaaaaggtgagtagtatcattttcgatgacatttatgagcgataatttagctctgctcaatatgacttgctttttttattgggatagtaacagaatagtactttttcatgggaataatatattctgtagcatctcatgctcatactgggttttcccctttttatgcttgtctatctgtctaagttaaaagctatttgatgtgaccctttgttgtgcagaccgagatgactactgctgaaagaaagcttgatcacaacacaaattatgactggaatagaatacaagaaagtggcaaagatgccgaacttttataccggccctggttatactggccttgtaaatcttggaaataggtagctttggttcattggttgacgtcatgaattttcttttgtaataatttctcttatgtaatgcatgcgtttccttctttgcagttgctatatggcctcagtaatgcaagttatgttttcaactcatccttttatatcacggttggttctactttctcaattgatacttcagcacttcttgtctagagttgcattttttcctttttagtagcacatgctcttgcatttatttcttgcatcatttcagctactttgagaagcagagcttgaaagctgcatttgcaattgccccagctgatccaacattggacttgaacatgcaaatgtaagtgtacaccagctgatctgtgtttttgcgtgtattggtattggattagtcactattctgaggtagttggtgtgagatgcagtgttaccttcttctaatgctaaatgtaaggataatacataaagcagttttttggccatttatcctgtatggttgtatgtgaagaaaccgtaattcgggtacaattacttttttaaacacttgcaatcacaaacaaagtgattctttctaggatctttttttttttggtgaatcagcactttcttgtttctttgctcgcgcttggtagctgctggagggaattcatcctgggtgctgtagtggtccagtgtgttagactcatagcaaatgctgtaatcaaacatatatcatgctgtccaagtgtccattgaaggctttgcattttgtttctaagtgaacgttttcctcaattcagtgctactgtggtatgataaaagaaatctagaaagaatctatttttatggaagaagttttagtaaaaaatatttccgctcttatactcatcacttgacattttcaggacaaagttggctcatggaatgctctctggcaaatactctgtgccaaatcaggaggtaagaatttgtttgtatatttgcctgttgttacgctttgtgttgttggtagttacctacttaccttagcaattttgtttgtttcagtaatggttcaatcttcgagtagactgctttcttgttttattttggatatgtgcacaaattacagcttcttaattctctgacaaat

SEQ ID NO: 4708 - DNA, 37295 bp, Oryza sativa
ggacccagctagagatcagcaatcagtgggggtgggttggtgaagtgggtgggagtgggtttttggtttttggttggtttggtgtgggaatggccgaattggaattgccgctggagaagtttgatgaatctttgccgttcagggggtgacgcagcgggtcgtggaatcgtcatacttttctccgctccgtctcacgtctctaattgttcagtgcgcgtgcgctacatacaagacggtgcgcacggtacaggggttggatgaaacaagcgaaaatctcttgtccgttcctcgttgaaataagcttttttaagtacacaatgcaatcgcaaaaatatcgttcgttttattaaaaaaaaccgtgattctaagtactacgtagacccttttctaccatcggaaactaatagtgtaagggtatgatgaacatattggcgaagccaggattttacaaattggggtgccaaccaggagatgtgagaactgactttagctcaggtggacattggtggcatcatgtcatggcaattagaataagaatcaaaatctacaagttacgattcgcattagcatcttgacagctcggctcctactgagagtggcagctcgtactcacccagatgccctcgttcagactaatatatctaattgcgtgtataaatttgatatgcccaaacactcctctataattgtttgtactaatatatgcataaaatgatggttgatatagttttgaatgtatttcaacacattctttgtttatgtttatatgtctccgtatggataacaaaatataaaaagcagtttattacataacaccaattcaattgagtaattcatatataagattacatccattcatctagccaccacattgcttagttaattatggaccaaataatgtaaaacctgttagccagggtggctagctatctggtttgtttgcgtctatcaactcttagactgtcaattggtcgacatctacgcttatcatttctccctctactattgctgacgccaccaacgcccatgtgaacaccgaagaaggagaaagcgatggcttagcatgtagggcgccgcactgccggagttggtgtcgtggttggggaaaagggataaatgaagggaggaggaggagaagagaagacgctagtatgtaggacatatgtctcttttttattttatttagtgatggggctaccacgtggacaccacgtcagcaaatactgccaatactgctctgagagtctttttaaccggtgtcaagaattggagttgttattatatccggttttgtggttgagggatactcactcctttccaaatttatcatcatataatggaatccaaaatttctcaaattgatcatcatataatcacatggacacgaatttcatcggaataatgcatcatgggagaatgtgtgcatgctaaggtgtaattagtatggtgttttaatcgatacatgtattgcgggagaatatgtgcatgatgtattaattgatgcgatttaaattatctttggtcttgatgtataaacttatatgatgatcattttggatggagggagtatagaagtatgaattagatggacatatatttgagagagttaaagtggactttattctccctgacgcttcggcacgaattacctacaatgggctgtgacgtgctagcctgggtcggcccaagtcccacctctggcttacgcaatgctccctccctagtccgatgtccgatctcccctcggcctcggcctcccgtctcctcggctcctcgcccacttcgtccgccgcctgcgctgcgccgagacgccgccgatccccatcccgcgagcggcggggccggcctccatcccgtgaccgcgagcaggagcgccggcgcggggcacgtgctgctgcttccaccaatatcatcgccggtgagggcacccggtacggaaatcctcttcctcatttatctctacccacacgctctctctttgcccttaaccttggcttctcttgtagatctggaagcctttttctctttgccctaaccaatagaagttcgtttccaaatcaagattttgggggttcaagtaaacccccatgcccaacgtaaggtccgcccctaaattaccatgaccgcatattttcactgttttgcatttgtacctatagcctgtggttttctatttacattactttcttttttttacaaatttgcagaacttgttaagccataggctctggttccatatgagagaagatccatatgctcttttgagatagtttggaaaatggcatcaaagaaagtataagtgggttatgtcaagaaggcctgtgattttctagaatcaatttggtgagccgaatgatggagtgcaacaaagaagaggccctcaaggccagggatattgctgcaaagaagatggaaagcaaagactttgttggtgccaaaaggatcgcgcttaaagctcaaaggatttttccagagcttgagaacatatcccagatgttaactgtctgtgaagtacattgtgcggcagaagcaaagatgaatggactattggacttctatggagttctccaagtggatgtaatggcggatgaagcaaccattaaaaagcaattccgcaagcttgctttttcgcttcaccctgataaaaacggtttcgctggcgctgaagctgctttcaaattagttgcagaagctcagtcaacattgtctgatcgaacaaaacggcgtgcatatgacatcaaatggagaattgcatcaaagcaggctacgcaaccaaagcagggtgcccaaccagcgcaggctgcccaaccaaaacagtgtacacaaccaccgctggctacaaaacgaaatcagagtgcacaaccaacgcataatacacagcagagtgcacagccaaagcagagtacacaaccgatgcaggctactcaaccgaagcatgctactgaaccaatggagaaaacagatgcaaatagagctagtaatgctaaggaaggatatggatcatcagttcgaccacccagtgctggagaagcattctggacaatgtgtgttaactgtaaaactaaatatcagtactactccaatgttctgaatcataaactccgttgtcagaactgcaaaaaagattttcgagcagttatgctaaatgaacaggatgtgccttctgtattctcatcaagtgcagccaaaagtgcaggacaacattgtgacgttcccaaacaagaggactgttctacgaagttctcttctgcagcgaatagagatgcaaagcccatggtgaatggaggacaacatgatgaacaaatgaaaaacagtgccagtgtcagagcaggtggtgaggggacagttaaccatacagagtcaatcagaaaagggggacttgaattttcaacactgcatgtatcttctgcagcaaatgttggtagtaaggcagggggaaagatgacatcgtgccctactccagatgttgctggtagacaaaaccctggtaatagggtaaatacatcagcagagacaggtgtgatgaatattcctaatccacggagatcggctaggaggaaggaaaatgctgatgccagcatcatccaggatacgcctagcaaaaagaggcgaaccatattagattggttttcaaatcctgactcaagtcgtaagaaagtggctgatgataatgttgtccgtgctgatggacaagcttgtgaacctcatgtctccagcgaagcacacaaccaccagaaaggaactactagcaatgaaggaaaccaggaaaaaaggaaagatgttgcacatgatacaaatgctcagaagaaatctggcattcctgggaacttttcctatcctgacccagaattttttgacttcgataggtgcagggatgttagtatgtttgcagttgatcagatctgggcactttatgatgaccgtgatggcatgccacgatattatgctcgtataagacgcattgatacaaccaacttcagagttcagttcacttggctggagcatgatgcaaagaatgaggaagaggacaaatggactgatgaagaattgcctgtggcttgtgggaactttttcttaggaaaaacagtggtgtcacaagatgccctcatgttttctcatattgtgtcatgggtgaaaggtagaaaaaggagctcatacgaaatatatcctaggaagggtgaggtatgggctctatataagggttggagtatgcagtggagctcagatgcagataagcatagagcctatgagtatgaagctgtggagatcttgtcaaatttcacagtggaagctggtgctgctgttggccctttggtaaagattaaaggttttgtgagtctctttgcaaaagtaaaggagaaaccatcattcgttataccaccaagcgaaatgctacggttctctcacagtatcccattttttagaacaaagggagatgagaaggtaggtgttgctggtgggtttcttgaactagatactgcatcacttcctagtaacttggacgtagcctttccatcggttactcttgattcttgcatgcctgtctgcaagacaatgaacagtggatttaatgatttcactggatatgagcaaggtgcgctgaaagaaaatttgatgaacgaaggtaaacgtaaagatcattcccttgaacgaaccccagtgcatcaacagagtgctgcctattcctcccccagtacttttgattacccaaactctgaatttcataactttgaagaatatcgatcatatagtaagtttgaacgtggccagatatgggctctttacagtgatcttgatcaatttccaaagtactatggttgggtgaccaaagttgatacagatccgttcagagtgcatttgacttggctcgaagtctgccctcagctggagcaggagaatatgtggttagagcagaatattcctgtgagctgtgggacttttaaaatccgcaactggaggataaagttagacacgaatgatgctttctctcatttagtagaaactagccaagttggttggaaacgatactttgaaattcatccacaagtaggggaaatttgggccatctacaataattgggcacctggttgggttccttccagcaaggatactttcgagtacacaattggtgaaattactgactgcactgaagctagcacaaaagtcttacttttgacccgagtagatggctacagagctgtgttcaagcctgacagtgtaaggggcactctggagatacctacaaatgaaaacataaggttttctcacctgataccttctttccggctgacaaaagaaaacggtggcaaactctgtggcttttatgagctggatccagcttctgttcctgatactttcctgttccggagcggccgctgattggcaaatgttgatgctgactgtcctggagatagtaaggatctggtctcttgtatgctcttctagtagggtgttcatacaccacgcagctgtggtgcaaaccaaaccatgctatcttttctaatgttgaggcctctgtgctcattcagttagttattaggttaaaattgcatgttgcattggcatttggcatgtgatgcagtgattatctggttgtcaatttctcttgaggcgttgccctgagagcaaatgggaaatgtcatgcatactgcaatttttctggagccaagcttcttttctggccagtggtgtcatgggcctgtgctcaaagaagtattgcaacctgtaacatataggttgcttcttgctgtgctttaatatatttgtgccctttcatttggtaggatgcttctgtgttgtgttcatgctatgtctttctagatacaatattgctaatgtgatggtcaatggttatatgattggaaaacaataatgcaaccttagggcttaggtagaaaaagataggggaatcctttttttgagggctgaggtgaatgagatggttttgtctatctgtttggttaaaggaatgggatgacccggatcctggaggcccaatatggtagtatttgcttggggggattagatgggacatgaactagaaaatactagctctaactgactaggctagagaaaaaaattggaaaagtatgtactaaagtgatttagttatcattaattaaccaacttaatttcattagtactattgatgatgtgctaatattccttgttgataattatcatgtacttcctccgtttcacaatgtaagtcattctagcattttccacattcatatctagatttattaacatcaatatgaatgtggaaaatactagaatgacttacattgtgaaacggagggagtagtatataaacaaaccttgcactaatagtaggctagtagctgcttccatgtgatcgccaacagcaaataaacctgacagaggatgagaaccatggatgactgagaatggaacagctggttcatgatgatgcagaggagaatggcatgtgtcttttccaattggcttgcttcgatccttcaatcatttccttggtattcatatgaacacagggactgccagatgatgctaaggtccatgtggaggcacccttttttttcagcagttcctttttggtgttacaaataacaactcatcctgtttgctcctctgtaatgcaggtctcccaagaccagggagtcttgacacagatgctgagatggagagaagagtttagaaccaacacatgccaagcaattagctaaaagatttggtgattatacaagcctgaattttcgcaggtgccgtttactgatgtgatatatggtgttgaaataaattttactgtttctagccatctttcttctactttattagtaactgtaaaattaaattctttttataagcttttttgtgtttttatgcacacgtcatttcttggacagagaaggccgtggctacaaaatggctgttactgtagattcttcgtcacattttgctaggatgagaagtgaggtgttctggaattctttgggcacagttttttggaagataggactcgtgtctacatgatatgcaatattctgctgacatggatgaggagagaaatttcatgcacaagatatggtcaaattgtatcaatctgttgtatggtatatagtttcgaacggtcttcatttcggctacagggaccaaagaaaaatgtttctgtccaaagattgaattttttttttggttaaatgattctggagttggaaaatgtttgtatacgagtattggtgatgatggaggcggaggcgtactccagccgtttttgttagttactcatccgtttcacaatataagtcattttagcatttcccacattcatattgatgttaatgacttacattgtgaaacggaggaagtatatattaacccttgtttggatgactggttctgcaacctttgtggttctgttgatgatggttttagcaaggaatggtccgtactgaaagttttgtactgattgtaaatttcactcggttgaattcacttccagtgttcaatttcagtgaaacataatggcattgttcacttttcagggttgaatggcattgcactataagaaatcaagcagagtaattttttagccacaatctgtagggaaaatctgatagtactgatgcacgtgcaggacaacatcaattcagaccatcatagaataagtgtataatataaaaaaaaatcagaccatcgcataaattcagagcattgctatatcttgttgcatcattgaacataagtattgatctatttcatatctaagttcatgtctcaaagttggacttgtagttttcctactccttgtcattggtccagaattaccaggtgatccaatttgttcatgtcctaaagtaggacttgcaactgctctactcctcatcattggtccagaactaggtagtgaagtagttggtggactgcagggtggcagttttagcccttcctgatgcaaccgaagttccagaaacttcaattattatatacatttaaaatcaaagtcctcttttacataaaggttgaataaaattttttaactaagcaggaaataaatataacacataaaatcttacaaactcacatgtaaaagtgttaaaacttagataaaaaaaaaggaagcaacaccatatacaagtacaacatattctattatatactaaaaatccattagactttttacaaatgctctcaagctgccacgtgacattctacaaacgctctcatgatgccatgtggcgctctaataaattagagaaaatataagaaattctggaaaaaaaaatctagccattgatttatgcgcaaacatatggagccattatttttagccattagattagatttgttaaaatctctctctcctaaaaaccggctaatgtaacaaatctaatctaatctaatggctaaaaggaaagaaaaaaatctgtccgtacgaatctacggtccattattcatatgttaatgggtatatacggaggcgacgagactgtcacgaaccaacgagtcggatcggaattatctcctgtagtgaacaaaaaacaaccaccaaaacacaaattaagtctagcacccagcagtccagcacgtgattagtgtacgtttgatcagttggatagttgagaagagtattagaatgatatatatattgacacatctaaatatctcgaataaatgatagatatatactaaatatttattaccgtataattttgattagttgtctatataacataatcgtttaatggaaccctacattctgtattttacaatacaactacgtaggacccggccgtctggtagttttctctttccttcgatctctaagttatttttcaaactgtgcatatgtaccaaaagtactcctacgaggtcgagaagaagccacaccacggcggcgcctcacgttatccattgctctgctttcttaccgtcgatctatctattatatactaaaagtccattaaacatactataaacgctcctaaactgccatatggcactatataaacgctcttagtccgccatgtgacaggaaacattcaaactctctattttcatttaaatcggtgaacccattattttagaccattagattagatcttttaaaaatccaccactcctaatcttcttccgtgtatgtactaggttgtatacaacgacgaaaaaaaaaacctccctcctaatctactgcacgtgcaggtatgacacaattatgtgtgtgtgaacttctctttttgaacaatttttatgcacgagaagttttgtaggagttggtcttagcaagatggacaagcctagctaccttctgaatatcttctgaatatctgatacatataacaatttagcacgacacacaatccatacattaatttgtacaccaattgaaaagcatccatccatatgtccatacgtgtatgtacgacgacaagaaaaatacgtgcaaattgttcgccggataaaagccgaaaaaatgcatacatacgtaggacacaccattctcccaaaaaaacatacataatacctacatatacaagatcgggcaaaaaatcaattctcccctctcgatactcagattaaatgttgttatgttcgtatgcttatgatctgtccgcctaaacttacatacgtagtacaagctattcgctgaaaaaaaacatacatgctacctagggatgtaatattgcacgggaaaaaatttaaaaaagttcagatataatacaagaaagaaatattgaaacccactaacccctgtgttagtgagagattgttactcaagcaaatgtttttttcacatggttcttagaagtgttagccggtctcacatgttagagagacattcaagtttaattttaattgtactaccctattaattggtaggaatagcttaagaatatctacagatagatttggacataagatagagaattatgtgtgaagtgttcgtgattattttattgtattacttatgtgttagactctttttatggtactaatacaattccatttatgaaaagggacccaactttcaagacaataataatctgtagtggtgataggtgagtttatatctaagcatggactaagagatttttgtttgaaatttgagagacattataatttagtatatcaaagtatatgatctatttcacggcatgagtattttttcttctattttagttaccattataagaaaatttaccatctcttatggtgaatttataagatgaatatggtaagataatactacttttagtattctcattattattaaaaaataaaatgcccacgcatcaccgcgggcttccttccttgttgcagttaaaatgaaataaaattgcacattgtatttgtatagcattgcaatttaggattagctatgtgccattttaggtgactggaaacttaaaattttcaggtgcatccaacaattagctattcatatactccatccgtcccataatatagcaacctaggaccggatgagacattttataggacaacgaatctagacagatgcataggttactatattatgggacggagggagtacgtagattttcttatagccctgttatatagctcacgtttatgtagacgggctactggttccattaacaatagtctgcaagcttacaaaatcaataaggaattagatgatgcctcacgttttactgcgggatatatgttagatattggagaaatgatgaaattatttggattgaaatattatgaaatgatttgtgaatgatgatttatcatgtgtagcatgaataaattgtagatataattactatatatttgtatgttgagctttgtgtgttcattgggttgatgtgacatgcttgtatgtagattttagaaatctatgctgagttttaggtatttagtggcattaactttttagaaagaagggttttctgagttgataggaacaaaaccctggtttctgttgttcaatttatttcattttacttgtgatgctcctgggacagaacaacgggagaccacactgaagcatatatactgtatcatttagggagcctgcaaattattcactgactcaaaatcgagattttgggatggaagtagtattattctgtctgttttacaatttctgttatttcctttcaagaaagaagctggtctatgcgtggcagaataaggagaatggagtactcctgaacacgtgttgacagagaaacacaaatcacttgcgcctgaacacatgcggtgaacagagacatttgcctgaattgacaatggaagatgaacgatacatctgcaggctgcatcctctacacataaatacataataatgtacccaggcaagagtacagcaaaaaactaaaacatccagtagagggtgtgccgcctttatcttttcattggtcatctttgtcaagattgtcaagattaacatatataactattatgctttggttctgatcgtttaagccgacaatccataaaaaaatgaatgaagcaagataacaatttatggtaaaactttttcatatatgtgttgttaatgatttaaaagccaatagtgaaaaatatactacgttgacaagactacaaaattaactccaaaattaagtttcaaaattcaaaatttggcagtggcaaataagctaagaagctaataaatcaggattgaaaatttgtgtaatattcagttttgtcccacatggtcttaggtttattgcgcattgctgaattttgttcgttctttttcttgatagttattccctttttctaatgatagagaatatatgatggattggctctgaggtccttctaccggaagaaaatacttcattgaagcttatattggttaacaggtgctacaaaaacagtagttatatgcacgtcttactgtgtttgaaaacaaaatcaaaattaaggccttactccctccgttttttaatagatgacgccgttgactttttctcacatgtttgaccattcgtcttattcaaaaaatttatgcaaatatataagatataaatcacacttaaagtactatgagtgataaaacaactcataacaaaataaattataattatataaattttttgaataggacgaatggtcaaacatgtgagaaaaattcaacggcgtcatctattaaaaaacggaggttgtattttgtaacagaataagttcactttaggtcctttatgagcttgaattgcatcattgaaccgcaataccaaatataatatgtcccttatctttcaaaaccaatataactacggttctaaaagcagtattgaaggttattttggctaacatgacattgatgtagcaccagaagcaaaaattaaaaagaaaaacatatgagacccacatgaaagtgaaacaacatcttcttccttcttatctatctatcggatgcgattgcaagatggacagcaaggaggaggtgaacagggagcattggtgggggagagtacaatgcgaaggacagacgcaacggggacattggggaggagcgccacgaggagaagcggtgggagtggaggaggagcgagaacgggggagggtggccatgtccaagcacgaccgcgggtcactcgttgatgctggtggtggcggttgagcagcgcggtgatatcatgctccatggacctccctgctctcctcgccgagctcgtgcttccctcgtcgcattgttgatgacgattactcctagcttccctctctctcctttatccccctatcaccctctttgttctctcctatcttcccaacgtcgctgcccttctccctaccgaccaccggccatccttctccctattgggcgcacgcttggaggcctggatagagatagggaagaaagtggagggggggggaagactgggccactaacatattgggcctagccagtgcctcaacccgtatcgccgctccctactactgcctcaacccgtatggctgctccctaatcttcatgcgggccctcactcttcgcgccgtacatgtgactggggctcatccccggtcaatggcgtcctttgggcaaggtcgacacagaccctcggtgtgtgttgtagtccgcgacaagggagtgggaggaggagccgcgatgatggggagggtacgccaagacatgtcgaggggctctcttttatgccctgcaagtcggtactgctcgattctgcacgaccaagctggattaactacttcggtaggtggctacgatgatggctgtcacgtgggataggcggggaggaggtaggccttgtccaccactccactccacgctctccaatcctagatcccaatccaccatgctccaaacccttgttggcgccgcgaccatggcgcaaccgcgacgcaatgaggaggatgtgctcgtgggcttcaccgttgacgagatactgcgacggaccgagggacagatggacgctaggatgctggactccaacattggcatgatctctatggtcgtgcactacttcgtcctgctaccgcttgttgacactagcctcctcacctatgcattgaaagcgagccgtggcagcttcaaccgcatcagcagcctccccgatgtgcacttgcatgacatcgtgtcccacctccccgccaaggactcgcccctaacaaaggttaggtgagctcgccggctgccttccccaccgcccgcctttcgccctcaccttcgatccccacccctcactgggcatcgtggtccacacgtaggcgggcacaccaccccccatgttaggtcgctcctcaactgcactatccatcagctctccaagctgcacctgcgcgctgcttgctcctctcgagagttggagagaaaaggggataagagatggagaagaaagggggaggagtagagtgaggatgacacgtggggctcattttttccccacgtaaacgtctagtcataaaaaaaacagccatctatactgccggaggatctgattttaacgattttaataagttagggggtgaagatttctcgtattgcggtttagagttgccgattaaactcgacggaaagaggaggacgcaatgtggactagttccttcctcttgtaacagaagggtacttacgtggcagcccaatagccaccacgaccctccgattttacggtcggcccagcccattactgagcggaaccacgcgcagccgccagctaaaaccctagctcatctccctccaacgcctccttcctctttcctcctcctcccctcctcggcccttccttcccttcttccctcggcggcggcggcggcggctagcaatcgcgaggaggagaagatggtgaagaagagcaagaagagcaagagcaagcgcgtgacgctgcggcagaagcacaaggtgctccgcaaggtgaaggagcaccaccgcaagaagcgcaaggaggccaagaaggaagggaagagccacaggaagaaggtcgagaaggaccccgggatccccaacgagtggcccttcaaggagcaggagctcaaggccctcgaggcccgccgcgcgcaggcgctccaggagctcgagctcaagaaggaggcgcgcaaggaaagggtgagccgggcaccgcctttctccctctttgtctttctttctatccttgctgctgctaaagttgttttgccagggtcgatttctctggtttcctttcgattggcgattctagtcgttgaatgaaattcttggattagatgttttaactgaacgggtaactgttactgtaagcaaggtgtttttgggggtagatttcatgccatatgtcattgtctggggcgctaatttttattcctgtaaaaaaaaaacgatgattgtgaaattttgggacatctgttcagaagtgtgttgaatgcacatatgaatggcactgaactttatgagatttcattagaatgttgtatgcaaacactacacattcagtgccttaacatggacttgtgtgagtaacacatacctgcactgggaagagaggattaaatatttctgcaccttatttagtttcatttgtattatacatcttgcttgtactgtttgaccaatggtagaatattgtgaccacttctgttcaggctaggaagagaaagcttggattgcttgaggacgaggacattgctaatttggcctctgcagcttctgctcagggcagcgagtttgcagagaaggatgcagcaaaggagaatgcctctttagacgtggttaagagccaaggtgaggttcaatgttcctacttgtcatgctttgctgacttactgtttgcagttacgttattcctaaatctgctggttgtatctccagatcattcagagagagccttctacaaggagcttgttaaagttattgaagcgtctgatgtcattcttgaggttctcgatgccagagatccactgggcactcgttgcattgacatggaaaagatggtcaggaaggctgatcccagtaaacggattgtgctacttctcaacaagataggtacaattcaagttttctttgagttcggacttcactcgtgttatgtctactttcttgtaacatctcaatttcaattcgtggcatccagatcttgttcccaaggagtcagtagagaaatggcttacgtacctaagagaggaaatgcctactgtcgcatttaagtgcaatacccaagagcagaggacaaaactgggatggaaatcatcaaagattgataaatcaagcaatatcccacaaagcagtgattgtcttggtgctgagaacctgatcaaattactcaagaattattccaggagtcatgaggtaactgatcaacgttcacatgtgtatcataacttcagtgggcagtgtaaatggattgttgttagagtctgcttgttgaaataatctgtagtaattgttaaaattgccatcttagcaaacagtacctttgatacctcacctggcatgaaaatattgaatttccattccgtttgttctgtgtactgctttatgcaaaccatattaacattgatgataacatcaagtagtaataattttctaatctcaagaatggcctaccttaatttgttatatgggcacagttgaatttgttgttccaagtagttctctttcattttgtcatgtttgtacagtggtaccgtcgctagggaattcatgagcttttaattctcattttgcacactctgacctgtagcgatgcatatgagttttttttttcttttctgctttatgttgcccttttagataatttttattatttatatgttacagctcaaactggcaattactgtgggtattgttggtcttcctaatgttggcaagagcagtctgattaacagtttgaagaggtcccgtgtggttaatgttgggtccactccaggagttactagatcaatgcaagaagttcagttagacaagaaggtgaagctgctagattgtcctggtgttgtgatgctgaaatcttccaatagtggtgtatctgtggcccttcgcaactgcaaacgagttgagaagatggaagatccaatcagtcctggtaagtgttgaaaaatagcttgcatcattttggtgctattcagatagttttgctgaaatcttcatttaattagctatatatgtttttattatgtgtatactaatactatctcattcaacaatatgcattaaatgttgctggaagtgcactgtattataacttgttccatttttcttcactttacatcctctcagtaaaggaaattctcgatctatgcccgcacgagaagctgctatccctttacagggttccaacatttacttcagtggacgatttccttcagaaagttgccacactccgggggaaattgaaaaaaggtggtatagtggatgttgaagctgctgcaagaattgtacttcatgactggaatgagggtatggtcgatgattcctcctgtactgatttttctttactcttattccgtttctgagtcatgtgacactgttattttttaggtaaaataccctattttacggtaccacctaaaagggatgctgtagacgactccgatgcagtaattatttcagagactgggaaagaatttaacattgatgaaatttacaaagctgagtcatcatatattggtggtctgaaatcactggaggagttccgtcacattgagattccatctaatgccccaccgcagattgacgaagagatgctagaggtattactatggttttcgtcccattgaaaataatctctattctttatgggtgtgatttgcatgacatttgtgctaggaataggattgccatagttggcatcatcgatgagtcatgacactgcaattagataatgtacttgtcttgtgcttgatataggatggcaagaagcagaatgaacctgcgcaggaaaaccatgatgagtcgatgtccgatgcaaatgagcgtgaaggagccaagacggccagcgcgagcacacagaatgacaagctgtacacagcagagggaatacttgatcctcgcaagaggaaagccgagaagaagaggcgcaaggcaaacaagttcagcgtgctgaccgacatggatgcagactacgatttcaaggtggattatcagatgaaggatgccctggccgaagagggcaacgatggtggagatgaggagcccaaggaagctgaccctatgactggtgtcgatgatgcgtgaactgatggaactcggcagattgagaatacgaagtagatcatataattataatatgatggtggactgccatcccaagttttgtaccctattagttgaatgagagaagataatggacgctgcttgattcacatagccactgagctggaatcagaattttttgcccatatgcatgcaatggttgcaaaattgcaaaccatcttccagcgatcactctattgtttgggctggtggagagccgtgcctatcagtctcgcatgatatctccgcgactgtcctctgttggggctagcgaaaaattcacaggtaatgtttgacatatcctagttacctcttctacattaagtaaataaactcacctaaacttcatttttaagatcaactcatgggtttctcgctcctatcctatgttttttaaatagattctctacttaagtgaactaaatttcactcctaagatcattccatgaatctcttgcgctcggcgtggagtgcagcctaataaataaatgaaacttccttaaatcctagtagagatattttgtattaaacataaagcatcaagttatacttgttgaactatcaaaagttcacaaaataggtttaggtcggccttttcctctattatggtgatcagatctgagccctctatactctccttcctcgctttgttctggattctagggtgttcggtgtaaatttaggacctccacataaattttttaaaaagagagctaatataaaaagtatcaaggggctgaaatataaaattaaatctactcctagagtcacttgtactatgaaaaacttagatcttatatccattgccgtagcctacgtgacgtgacattactgtgaacgccaaaaacttaactaaccacatgcatgaacctcaaagccaatataatccacatgccattttgccgctcaacgtgaggattcaaagcgagagtaaattagatctccactgatcaacgctacaccacgttgaacatgtccaaccaacccacctgaactatagtgcattgggtcgatttattaggggtgagactaatcatggtcaatgtggtcgatcgcccataaccgcgggcacggctattcgaatagttttactctggccagaggtatacgactgtacccagaagacacaatccaccggcatgtcaccgtgtcatcatgcacccatgatgaaaacgtcaccatgtcgagtggttgtgacaagacccttcatataactccctctgaccaatcgcaccacacctcaggtttcacccccacttctcgcaaggcagccgacagttccctctcgtgccacggtgaatccggaagccgatcaaccgaacaccccggccaacccaactccatcacgcccacccttgcctgggaacgtcagttagatgaaagctatacttcaagtcaggcagttacacattcccgcctgtggcaagcgttgtatgtcttccagtgcatcccgtgaactgatctttaattgccatgggtgcgactagcaaaaccatgcatccacagcccaccattcagtcgtattttagttgaataattacggccaatgaaacatggccggatgtctcgagcacacagctcgttctgctactaaaaaggtctaatactgcaattattccatcaactgagctagtggcaattaagcatggctaagcatatagttctagctaggtcacataagtaacatgagctagtcgatttattacccaaggttgacaaatgacatatattaagtaaacatggcacaagcaagcagataggtaaaccctgatcctatgtaattagcaaaacatgcacatttatttgcaaacgataaaacatttatcaattgggatcaacatgctcaagaggaatgtgtgacttgccttgcttcttcacaacaatcttctgaactcttttcctcgcgaccgcgatcttccaaaatgacggattctacacgctggcacgcaaaagaggaaaaaactctaataaacaccaagaaaacagtacataaaaagtaaacaaacaggtagagctcaattttagatgaattttgcaagttgaatgacccaatttgaagttcgtatgaattagatatgaattttagaagttttgagccatttaaataaatttctataattattaatgatttattgcgcaattattaatggattatgacgtcaccaaggggaataggtggcaccgacaagcgggtcccacctatcggtggctcaaagggatgggcgcacggtggactcggtccacgcgcgcgatgccggcgggcgcaccacgtggtggccacgcgggacggggaggacgaggtggtgccgacgtgatgccacaggggcggcgacgccgagcggctcggggagggccacgtggacggcccatatccacccggggtgaatcgggcggccacgggcgagcgggaattggctcaccggccggccggccggccggggggcggcgaccaccggcgcggcggcacagccgggaggtagcagggggaggcgaggggttggaggggagatgcccaccgagcggcggccggcggaaggggcggccggcggcaaggaacaacggcggcggggctcctcgggaagacggcaagacggagctccggcgacgggcggcactcgggaaggggcggacgggctcggcctcgatctaaggaagataaaggaggggttagggaggtgaaagggcgaccggagcggctagaaacaacggccggcggcgacaacacgagttggagctcaccttgggctgaggaagcggggttccagcgacctttggcgaatgaaaaggggcggccgggctgcacacgattgctgcggtgctgaggaaggcgagacgcagcacggggtggaccgggacggcggcgagaggtgactggaggcggctgctatggtggcggttcgggtggtgtggtggcggtggggtttcggtggcggattaggggagtggagcggcggacggcgtgcagctcggagtggcgaagctagcggtggcggcgacgcagtgcggaggtggctagagcggtggtgaggggcggctggagatcgccggggagcagcggcgcacaggagcagcgtggggagagcaatggagggcacggcgggctcgggtaaatgggggaaacgagcgaggggagtgcggggaggagttttatagcgctcgggggcgacggggaggccggggcgaggtggatttggggcggcaaccaccggcggcgtgggtggcatcgtgggggagttggcggccggtttttgcgagcgcgagagggggagaagagcggggacgtgggcggcgaggtcccacggacgagcgtgcgcgcggggggtggaggaggtgggcggggtggcgcggaaaaggcggcggggcgtgggatggtttcggcggccatggcaattgctgtggggtggctggaggtaggagatgacaggtagggtccatgggtcccacctgtcggggagagagggagagagagttggaagggggaggcagaacagacttgagggagagagagagccgagcgggccgagggaggggaggacttgggccgagcccgaaaaggaggaagggggagttatatttgtttcctttttattttaattgataaaatgaactttgtattgttaaaattatttcttgagctccgaaaattcacaggaaattccaaagagttcattaaggcacagataatattacaaaatattctcggccaatgattttttaaaggaaattttaatttcctctattatttcacttgattaatttgctttcaattttatttaatttctagaaatgctttatttaatgatttttaatcccgaacgaaaaccggggcgttacaatggaggacaagtattgccacggtaggtggtcgcatctggctcaggcgaccaacggagagtattatccaattaaaggattacacttctttatctactaactccagacttgctgttttacaccgtttatgtttaacgtttgaccgtccatcttatttgaatttttttatgattagtatttttattgtcattagatgataaaacataagcaatattttatgtgtgactatttttttaattttttcataaatttttcaaataagacggacaatcaaacgttggacaaaaacccacgactacacttaaattgggacgaaggttatagttgtgaaggtctgtttagagaaccagtttcttcgggatgcactcattaataggcctgtttgagacagctgaattgatggatggatggattatctgatttcttcgtagcaatttgagggtataaacaaataaattaactactacaaaattggaaaaaagttgctttcaaagagtagtccagaaagttttatagaaaattttgctcgatatccatcgtctagaagcttgggaaacgttcaaatgaaaatccaaaatccaaaatcctaaaaaaaagaaacaaagctaagttgtgcctaaactgttttttacaggtgtgttcgttaaggattatatagatatgcaatactataatagaaacagttcaattctcactagaaatttccagctgttctcatttctgacctctctcactagcaagttatcagcagtgcaaacgtgcaataccacaaaaaggacccaaaaaggattgtcgatctacataaccttgtaatcgtaagatcttaagcatggtaaatgtagcaccaaaatgttgcctggctagtcttcccagggacacgccagttggaggaaaaacttccaattggtgacatcatagaacaataagtgcatccactagaaagaacacatcgtatgctcttaaacacatcaaagtgatggatgagtaactaaattagaacaagaaaacgattgtcccctgcaaaaggcttgaaccatacaatctaaaatagtgtcttttccaagtaataagtcgagtttggtggtccaaacgtagacaattaaatcccagtaggttcatcctttaacaaaatatcagaaacagctttgttgctaccaggtaacttccgatttccccttcccgaaagcacagaccttttatatacacatgacacatgtacaggtagtttgcttgcaatcagatgagactttattgaggtgctgttaactgctgagatccttgttggggaatcggtttgttatcaacctctatctcgcgaaggccctcaacaggttgcctgcatattgggcatttgttggtctgatattttaaaacttgagcacactccctgcacaggcactgcaaaaatggcacatgctatctttaattgattttcataaaactgaactgatcagcaaaattaaaggatataatcgttatttctctatcatcatccctagctacttaacatggtgcaatctattcacgaagttcttaccatggcataaaaaatgaaatagcacaaatgcatagctgctgagaaaaagaacagaagggtaaatatttgggcacaaaatgctacagccattcagaagtacataaacttattgtcattgcttcaataatcagtacagtgccaggggggttgcaagtgctaatacctaatagtggagcagtggatgttactgcatatcagacctttgatgtgctttaagaaaggtctgtctttcactttctggaagagagtaaagcactagcaattttttttcttacgtttaatataagccatgaactttggcatagaaaactaggaaagaagttaagagaaaatggcaagatagttggcatactcactgaaagaaaaaatgggttttaatctaaatatctatgcccgctaagcaggttccttaatatgctggacagtgactgcctttatttattattaaagtgggatttgacgaatatcctactcctttatcttagcggttcaactatccctcttccagcctccaatggcacactccaaaccatatagcagtagacacaatccaaaccttttcatattctcttccagtttaaagcaaatcaaagatggaaaatgcccgaagaatgcaacttcaaaattatctgataagttgaaagaatgctaggagaaaatccataactattttttttccaactctatctccataataatatatgtatgcttaaacagataagtcttatggcaaaatcgtgattctttcaagaatacttagtaagaaagtaacttaccatatgcctgcatggaagaacagcagtatctcttggttcagaaaggcaaaccacacattctttcccggaatcatcctcatgagcattcttatcagctgtgttcccaataccatatatttcctgcaagacatatctgattccatttacccaaaggatctgctgcacaacatgaactccatattcagcattgtctttcttcacaaatatagcatatttaacaagatatttcgattgttcggtctcatgtgccccttctgattcttggttgcctgacacatccatttgtactttgaatgctacagggaatacaccaccttccccaacattagttagctcagattcctcaaaacgagagacatcgattcccgacccacttggttgcttgaactcctgacctcgaccttccttaaaaggcacggtcacaggttgaagcaaattttcctttgcggtcttcaaggcacacttatcttcttgtgcaaagaagcagacagttatgctgtttgcatgatgaataggtcttttagttaaacataacacatgacaatcttacaaaaaaaaaaaagaagtgatgacaacaaggaaagccagtaaacgttcaattctttaaaaaggttcaaggagatagccatactaattgtgaaggtcccagaaaattggaaatttggaaacagtacaactctattttcaaacaataaattaataaatcaaagagcatctaagtttgagctttctgcaaaaaagaaaggctattctgaaaaaaatgatgcacatatataaaatactaccaaattggagaagtctgcaattggaaatacacctaaggatgatatcatcctaatcaaggtatagaaggtttcctttcaatgtttatcatggattggaattccacaaaacatggaacaagagacatatgaagttgtgatcagttcagtttcaaattgtaaatctagtatgacctggtctgcataaggcataacttttgaaaacagagttacactcaatatgcgcaacacaaactggattggttacaactcctaatgtctcatcttctgtttgttagttccattcaatctgccagaagagtgaacaggagatttcttttaaacctttcagaatacatgggttaggtggagaataccaatacgtgcccaaataaccacatactccttaagtttagatatcttgcacatcaggacagacaatatatgcagaatgaatccaataagccatgattttttttggcggatattaaatgctctagatcacacattgttccatcagttgaaagtagaaatgaataactcgatactcttttcaagtacacaagtcattttatgatagaccttcataattggtatggatctttatgagttctgcagccacaacttcacgagtgctatcttaccatgtcttaatctttgttgggaagatgaaagatgtgccaaggataaaatactattaagcatggaacattttgagggcgtaaaaatagcttaaacatcagaagagactgaaccatgtaggattagtaacagaagtcacaggaattaggagaatctcaactaatatgatttggcaatggtgacaatagaaatgagagtagcaggaatttggagaatctcaattactataacatggcaatggtgacaataaaatgaaagtagacatccaaaatcattaagataaatcaagctctgattctgacaagtctggagtacggtgagtcccatgtcactacctaaacaaatctaattcttagtaagaattatagattgattcttgctactttcttcaacttcatttttcacactcaataccaagttatgtgaacgattttattttacatttctagtatatatatattcaagtaagaaacatttgctttagcaagaagaatcaagcagtatgcatctgatctggtactaagtttaattgaattctacattgaagcattcttacatttggacaggtaatcacgacattatgccaaacacaagatgggccaattttgtaccccaaaaaaaaaagagaagaagaaagcagtacacaatcgaaagcatcacgattgcaacaacatttgtttgtgctgagctctctggcagaaattttagtaatgtagtataccaatgttactacgatctaaagatcctaaatcaaagctatagcaacgaaattaccacagcgtctaatcaagaaacccacttagcccggtataaataggtgagaggggaaaaagaagaaggagcgggaccttccggggccatcggcgtcgaaggagaaggcgaggagtaggctgcggccatcgtcgtcgtcgtcgtcgggcaccagccgcagggtgtcccccttgacgttgacgccgacgctgaccgccacggccctgtgccgctccacgtgcgcaggcaccggcaccggcggcggcgcggcggcgccggggggcggacgagggtagctgtggtagtacgggggcggcaccccgtgtctataggcttcgagatgcggcggcggcggacgtgggctagcgccgccgctgctcgcgatgttgcccattgggaagccctcgcctctggagtctggaagtctgggtggaagtctgacctcggcgcccgttgctacgctgctttagcccgttccgctttttgttttttttttgttctttttttttctctcgtagctgaaacagttgaacaggcttttatttttgtcatagttgaacgataagtagggtttccaaaccgccggggccggggttactgtgccccggcggtaagcacggttaccgcgcggtaaccgtgaaaaaccgtacaaaaccatgtaaaatttataaaaaattcaaattatttttaaaatttatttgaatttaaggaggttaccgcggtatttatattaccgtacctccgcggtaagctcggtaactgcggtaaccgcgcggttaccggcggtaagggaaaccctggttacaactcttgcaaacagacctacctaaaacataaacaaagacaataaaataataatttacatttaaaacttttataattgtgtttattattaaatttgagttacaatgaggccctaatacttaaacccttttacgtacatgggacatgtgaactgatatgtctcatgtgcgacttctctttacggttacgcttatagaatacatatgatggtattcagttcgtcagttttttttattgagttcagctcatcgctactttttttctcagcatagtagtgcaagagttacttgaaaacttctaccaaactcttgctaagattagtaagggcctttacaatgcggtgagctgttattcagttcggtcttttcacgtcagagattcggtgtcaatctttgccacgtttgtgggcaggcctaccaaattaaagcccgcatgatcttctttgatcacctgttcttggcgaggggagataaggctacagacgcgttaggagggcgaggcttcgttccactttttctacatgcaccatggacctttgtggcttttctaggtcttaaatcttgatggcctcttgcgccaatcctatacgtgacctgtattgtaaaggccctaacaatgcagatacatggtgtttggcctcgcagtgaacacgtaagaaaaacgcgtacacgtctatgtgagtcgaattcccagttggttgtccggcccttcacagggatgacctgcacctcgcctgcgtccaagatcagatgtccacgcgacacgactccacgcccgtattagatgcgtgatctcatcatatgcctttttaactctatgctcatctgaagctatagacattcgcttgccgctatgcgctgtaggaggtgtagccataattatttgctctttgcatatttgacacataaatacacgcatctaagtagcttgcaatgccctaacaagatctcggtcattcgattcaaccagttggtggttatgaaaaatcaagacgccgtcatagtgtgctactttactttttctaaagtgggataaaattaacaatccttttatctttggtggcaaattaataaatataaagctaaggaaattgcttaaaaaaactatcacaaagttttttttataaaaactttcaaatgtaactatatcaaagtaatagtgaaagtaatagtgtaacttagtaactacattgtaattacgcattgttacattttaacgacactgatagtataattacaatgtaacaatattagtaaactatataacttacgtataaaattgtattatgttttaatcctatatatctataaagttcattcccactaaatgtagttaatgctaattctctcttctctcatgaagccacatcatctcaattgtttttagcctttggatgattcatcaagggtgtaaattccttcttttcacattacctcaatttattttagtatttggatgattcatcaagggtgcaaattgcatctctttcccccaaaaggcacaccatacaacccaatcatttataacttttggataattgataaaggtacaaaaatatataaaaacatgaaaaaaattataaagtaggtaggaaagaaaattttagaactcatatctattgtattatcacacaattctcccgcagcaatgcgcggggtatgcatcttgtatatagtatatattttagttgcgctatggttatgatataattatagtactccccccgtttaatattataagtcttttgactttttttagttatttttttacatttgactaaatttatagaaaaaattactaacatttacgatatcaaattagtttcataaaatttaatattaaatatattttgatgcaatgtttattttgtattgaaaatgtttactatattttgttacaagtttgatcaaactttaagcagggcatgtaacctaatggttgcagtgagtagtaccctatggtcctgagtttaaacttttatagcagtgaattttagattgggttgtttgcgaggctaaatttcctatttcaatagccgtatatatccagttagatgtagagacagggtaaaaaaaacccatctctaaaagaaaagaagtttgactaagataaaagtcaaacctcgacaattctagcggcgctgagtgatagcacgcatacagacgcgcatagcaatagcaagctcattttgcgagcccggcatctaccccgtcggatctcatgtgcgttcatcttggcctgcttttcctcttcctccccgtcacaagcggagcgagatttccaccatggctccgcgcgccaccaaatcgcctatcctctagcctcgttattcttctcttccgttttcccgcatcgtgaaaactctgctgtgtgccaaatcactggccccccgctccagattcatccggtgaggcgttatttctgatcgatatgacaactctcaccgagggtaggtgaagccggtagtcaaggaggaatctgtttcgatctggactcattctctgccttttttgctcgtcttctccggtgcttgattcgttgggtttggggtttgattccagcaattcctctctgctgatgcatatgctttctggacggagtccctcttccaattggtttatgattaattgttatttgttgttttggcaatactatgttaagattcttaagtcgattcttattgtcagatcattaagcatagcgtggatattttgggcatgatcagggctaagatagagtgaagcttttatgatttttgtgatgttcgagcatccggacagcatgtacatctacggacagtgctcgttggtgaaaaattcagacgacgagaggacaaagactttttatacgtagtactatatggacaaactactcatattcatatcacaccataaaatagccacaagaatagaacacacttttgattaatatgcgtatggaggaattgattatttggttaataagatacaatcaacacaggagcctatctattatgctaattggctttagtattagctgtaaaataaaatagagtttgttatagctggctgactatactattaattaaccatgctctaacgcggcgtgctcgccccgcgaccgctatctcccactaaaatttagcgactgagtcgcatgcaggcctgcaaatttctagcggctttgccacaggcaaatcattacctcttgtactaagagttaattatgttaattacagtacaagaggtagtgactaggttaaaaaaaatcttatatcactactggagaaaccatctttacacggtcggctaaaaaccacaatagtctcggttacaataaaaaccaggactaaagatggtttttagtcccggtttataagcagaacaggactatgtgatatttagtcctggttcacatgctgtcagggttctccgggatctttagtcccaggtctcggtttgtattatcaaccgagactaaagatcaaaacgcactatataatccctaggacttatcatcttctctcgtccacacacaaactcctctctcttttcctctctaatccttatctctttccttagagcatcttcaacagtctctccatcccactctccaagccaaattttagccattttagccaaaaaaaaaaaagctccaatagcctctagccatccggcatccggctggccaaaacccccctccactagccaaatttggccaactagaaatcactggccaaccatgggccccacatagattcctccccccatctccttcggctcttctccacgatggcgcaggcggccacgtccttgacgccgccgccgacgcaagcgccgtgcaccgccgcgagcaccggcttccatgcgccgcctgcatctccacgatggtgtggtggagccccttggccacgggcgctgggccgctgccgcccagtgaggagggagccatggcggggttcttggggatccaagctcgatgcggcgcagaagtgcaggccggcggcggagagcacgacggtgcgcatcacggcgagcgtcttgaacccacgctggagcgccaccattgtcgacgaggtcgccagccgctgtcgccgtcatctgcaccgtcgccagtcgtcgccatccactgtcgtcgtccccgaggttgccgttgccgttgtcgacggggtggcttgacggcgcatgagtccttcggcgtcggccatcagcggcatgacaagggcgacggggcggctcgatggcgagggaggaacgagaaaggctggcgaggagcggatcccgtcgttgcctcatgcacccgtcgtcgtcgtcgtcgtctggcggcctggcgctggccatcgtcgcgtgaaaacggtgtcgtcgtcgccggctccccatccacgcgccccctcgcctcacgccgccgcctcctcatccgctaggtgggttggagatgggagggaatgcggtggcggcgttgctcgacggcgaggttgagggagacgaggcggccggtgagatgggagacgaggcggccggtgagagctcggccaaaggggcaccggcggacggagcccgagcgtcggcggtgagcgaatggggagagtgagatttagagggactgttggagatgctcttactcttagcttatctctttcctcccttcacttcacaggaagagcgagcgtaggaggagggcgggccgggcgggcggcgaccggggaggaggggaggcggcagcggctgagcctgccgtgggcacgagaggagggcgagctggcggatgggagggcggcggcggccggcggccggtagcgccctctcctgcagggacttttgtcctttcttttcttttttttgaagaatttgtgattcattgtatggattgagatgaaggatttgtgattcattgtatggattgagatgtataatttcgtttttgagaatttgtgattcattgcatagatctgagatgtataatctgtgatgtatttgatttgtgatcattgcatagatctgagatgtataatttgtgatgtatttgatttgtggtcattgcatacatatgagatgtataatctatgatatatttgatttgtggtatttgtgatgttactttgatttggggatatgtatcccacttgatttgggagaaaatagttagggattaagtagtaagtagcaacagaaacaatgaaaaaaaaagaaaaggaaactaaccgggactgccgctgccctaagatcgatctttagtcctgggtatttgaaccgggactaaagatagcgatatttagtctcggattcatagtcctggttgaaaaaccaagactacaaggggttacaaaccaggagtaaaaacgatttctccaccaatgtataagaataagcgaaggacatcttaaccgtgaaaaattaatccagtgtaacacaatgtatagcgctgggaattaaaatagccaagatagcaagggtgtgtgtttataaagaaagacgtcgtaatacccgatccactgaaaaaaaacattatttagttatattcgtaaattgaataacaaaaattccaaacttacatgatagaacgaaatgactaacaattacaagatgacaaaatgccttcttccttttcagccaaacaaggaaataaaataaactaaaccactaaatcaatgaacaaaataaacaaatttccgcctgcttgtgtttgcattttccttgaaccacggtcgttagcactctggcatgtttggaggacgaggtagcatctgagcctgcggcgtcttgccatccttcacgatgaacatagtgtccatcccccacaccacgtgacgatcaaaatggcaatgcatgaaccacacacctgatcaatgaacaatcaaaataaacacaaaaagaatatttaaaactgtacatgaagagctataatccgaaattaatctgaataattgatctcacctggattgtctgctcggaagcggattgcggcccagctggacttgggcacggagacagtgttctggaatggtgggtcgatgaggttgtaggtggctgggtccctgcgctcgtcgaaggttccggaccctcgtcccacgacgtagaaggtgaagccgtgcaggtgcatagggtggttctcgatggacaagtcctggaacaccacctccaccacagtgccatattccagcaccttcaccttggtgccacgcttcgttagcaagggcccgccgccgttgatgtcgccggtggggttgacgatgaccgtcagcttgttggggaagttctcctcgtacacgccgcggccggagccgtagtagtaggcgtcgaggacgtcgatagccgggttctggaagctaacattattgaggctcgccgcgaaccggttgccttggggtccctcgcacaatttatttgtcgcattgttagcgtcgcaagggagaaagttgatgtcaatgtcgatgagcatgtgctcgtccacctgctttggtacgtgcaccgggtggtcctggttgcctaatgacctgagctgcttgacgaacgccatcgccgcgtcctcgtccttgatggccggcagcaggacggggaattctggtggcccgaccggcctcgccacggcactgtccgtgtactccacgatggccgtggcggtgctattgttgaaacggatggtatcaaccggtaacgtgataaacgtcctcgcggccatgtaataccggctgttggatcccaaggtgcggttggccttgaggagcacgtccatggtctggcctggcgcgatcatgatgtagtcgacggtgatcggcttggtgtagcgggcgtcgatgccgaccacggtgagacggtgccccgcgatggcgaagaacatgtcgttggtgagccccgcgttgatgaccctaagcaggtacgtgttgccctgctgcacggccaccttgaacgtgtcgtccctggagcagagggggaacatgtccccgggctggccgttgatggtgttcgtgtcggacggctccacgtctccgccgatgcgcttcgccttgtcgagcacgtgctcaacgtcgtcattccaccactcacatgcacaacatcatatcatcataaacgattaaacgatggttcagatcaaaacacgtacttacgaagcattgcatcgcatcgcattgcaggatggaactaacattgttaaacaaaattgattaccgaggatgacgggtatctccttgtctagcttcctgaagaggaaggtggtgccgcgcttggggtggatgacgatggcgccgtggacggttgcgcggtcgaagtcgctgtgagcgtgccaccatagcgtgccttcctcctcgaacaggatcacctggtaggtgaagttgccgcccggccggatcgggcactgtgtgatgaactccggcccgtcagaccacgggttccgaggctggtccacaccgtgcctgcgccacagtaaaatcatccagaacgtacatcgtaagtttaatttcgagccaaggatcgatatataatgctcttcttctctgcagcaggtggggcaacggaccagtggatggtgatgtttttgttgccgttgttgtggacgttgacgatgatgaagtcgcccttgcgcgcgtagatggtcggcccggggaactgcccgttcacggtgaggatgctcttctcgtggcagagcctcgtgtagttggtctccgtaatctgcagatagcatcacgcatggttaaaagttaaaacttcgtgcattcatgctgcctgtacatcaacatatccatcacgctagaattcaagtagataatcacttacgaagaaatcgtagtggcgagtcttggctccatgagcggggttcactgcaagtgctaacaccaggcctgctagtaggaaccaaagcaatgcaggtatcttggctgttcccatctcgccgaacgcatacaattcaatcgccaacccaagcgtaagaacacacacagctaattgagattcgtgtgcgcagtgccgtaagctgctgctttgcctgagctgagatggccatctggccaatgtatttataggaaacgcatgcatgcatgaatatggtagttgtatgtatgcattgcatgctgctgtggcgatggtgtccagcctttggaccagccacggaaactgacgacgacatcttgaagttcaaagtatctctccagtctttcccggacatgcgcatccgtttcctgccctgcgtatttacataatcatcattagatgagttggttaacttaattaattgggcatatggagtagtcgaggttgttaacgaactgactaattaatcaacgcggaacgaaattgaccttgagcagagcaggcactcatccgtgtttcgtcgtaccctgaagcactcgattaaaggtctcactaggcacgtttgcatgcattcggcggctaggaagattgtcgattcgattatcatatattgagtaggtggttgtcgtgatttcgtcgtagcctagcgaggtaagtaattaagcatgcactcgatcaaagtctcaaagggcatggtttgcatgcgttcggtggccaggaagcttcttttttttaaaaaaaaaaaattaaagaaggcccgccaggaagattttgaaatagactatatcaaacacagaggcccttcttttgacacatctctggatcttaaaattgagtattcttaacttcaaaattacatggatgtatatttatgattacgtcaataatgtatggataaatcattgtttacattttaggtgcattttaaaattttaaatcactattgtcgacgtttgatgtcgtcattctggtatttgcatagtatggggatcgtcggtgctaggatatacgcgagactgagataaaagagatggagataaggatttttatataggttcgggcccctgagttgtcaggtaataaccctacatcctgttggtcggagccgatgatgctctttattcaccataatcacacccctacaatatgtagggtagcctatctaactgttgtcgacatggcggtctgaaggtctgactcgtattcgacaacagggtagccttcctcctcgaatccgtgtccggcgagatcagagatagcgctttcgtatctcctgacggtatccggagacaccgtaggggaatagccatgcttatccctgaagtcgatatccggcggcgtgtcttggcgtatgtaggcttgtatgttgattgtgttgggtgttgatgaggtggtcgtcccgatagtggtgatcgtgttgatcgtctcatggtgagtgtgtgtcctcctgtcctcctaggggggcttgtatttatacccataggttcccccttgtccaagtataactagggaaactaatatggatacaatccgagtagtccttgtcgtttccatgtagaactctggttctttcctcatcggaactcctcctatatccgaaggttgtttccgtataggacatggtatgtggtgggtcctgccgagatttagtcaactactattaggtatgtggtatccataaccatgacaactataatttaatatacaaactttaaatttatcgtggttttgagatttgaagttgtgccaaacaagatttaaatatctttctcatatttatttacaagttattggaaggaagttttcaaattgatctagtgcaaaagtgaagatacacaacaatacaaacgcaagattttttttatcaatatatttatgttactataatattatattaaaaaataattcaaattttcaacacgcgtttacacttacactaaaaaatcgtttcttgcacagtgaacaaatcaaaagccctgaaaattaactgtaatccactaaaaatatgtcaacgcaattttagtttttcctcacaaataaacaccgaaatttctatacatctatcgcaagattttttctttagagatcttgcaatttttttgaccattggatttttattgagattcatgctaggaacctcccagaaaaatgcaaacgcacgagagaagggagtcaacctcataacctcaaggtcacacgggttgttttcgtcggatttctcccgagttacagttaccagcacgggctctcgctcactactaggagaacgtttttccctactgtcaaatccgatttttgtgtgcaggtgggcggtccgcacccacccaggggtctgcgaaaattgtaatttttgtgtgcggcaacaaaaatccagaaaaaatgaaaaaaaaaaaatgaaaacctagaattcggcggtggcgccgccgcctcttccttgtcgtcgtcctcctcctcgtcatcctcgtctttggccgaggacgccactcccgtcctcgtcatcgtgggtggcggcctccgcaccgcccgccatcggctccgcgctcccctccggctgcaccgccgctgacgcccctcccctccaccggatctaggaaggggaggggaggggaggggagcgcttgcccgatcccgcgtgggggagagcggccggccgccaaatccgtgctcccgctggcctccgggctccccttcgaccgcaccgccgtcgacgcccctcccctccgccggatctggggagggaaggaagaggaggcgaggggagcc

SEQ ID NO: 4709 - DNA, 52315 bp, Oryza sativa
  unsure (1)..(52315): unsure at all n locations
gatattgtgtcacaattaaaactgtgtgatgatgatgccgtgcgtttgcttcattcgctttcttgtgcaaagtataagattctcaacaaagagcctagcaacagagtgatttctccagaggacgagtttgagttcaattccaaattaccgataggatgcgaaggattaaggtgccatttctaactatttacccattcccccctggtttttcgagctaactaaacgtaattttttttttgtgtgcaggtaccacttcctcaaatcgatgagaagaaaaaggttgtcgatgatgtcaacaaggacaggaggttcgcaattgatgcatctcttgtgcgcatcatgaaaagccgcaaagttctgggccatcagcaacttgtagcggaatgcgtggagcagctcagccgcatgtttaaggtacacggcagaacacatacatgtcgattctgctaacctactttttgaacattctgccaatttgtgtaaagctttcagtcatctgtggtgagaagggagagaaaatccatgttttcttaagacttgtgttgtcagatattgacaatggggatttgttctcactcttgtgcagcctgacatcaagatcatcaagaggaggatcgaggatcttatcagcagggagtacttggagcgtgattcggagaatgcccagacctacaaatacttggcttgatgattggtcctgaggcgacttgctgactgtttgtctgtttactcaccctctggattcctagggcagtgccctgatgttgccaccagtagtctctgtttacttacatccacgcatcagggttgtacactcttttcctgctcaagtgaatgattagaggaaaaacagattaggagaagcagctatggctcggctgtgactgtgaaccacatttacatgtttagctttgacgccctttgctctaccttttgagtttctataatttttgttgattactttcttcttgccgatcattgtgttaaatcgcaactcatcatggagaaagaactttattgcagagtcactggcactttacctgcctagtgcctagcattagcatatgtggtttattaagctcgttattattaaatctaaatacatgtcgatgacacgccctgcattaattgttctgcaggcctaataaacgacctagtactgtataaaataaaataaaaaatgttgggggtaataagcagtttatatctaaactagacgtagtagatcatgccgacttcgataaggctgatgtgcgggatgttgagcacgaggccggggcctctgcaattcttgcggaggaaagcgtaggcgacgttgacggcgaacttcttgaacaccgacgagctcttcctcgccttgatgtacgagtggcccatgatgtaggcgacgccggcgtgcttggcctccaccagcgcgctcagctcctccttcaccctggggtccgtgtgctggttcgccacctcgaaccgcacgcgccgccggctcgcgaaccccggcgactccgcctcgtgcatcgtgtgcatcgagtggatgagcgactccggcttggcggccgcggcggcgcgcgccaccacgctctcctcctcgccgggctcccgcatgaggagccccgtcctggcaaggtcgctgggccgcgggaccacggccatgcggccctccacctccacggaggcgacgaccccatcgtcgctgatgctgcagcgctggtcgaagtcggcctccatctgcacgaactcggcgatccgcagcacgaggtcgttctcgaagtcggtgtcctcggcgagcacgtccttgtagccgtgccgaacgacgcagcggtacatgcggaactcccgcgggccgatgcggccgacgaggtggcgctcctcgtcgcggacgtgcggcaccggcacggccttgacgcagatgaagacgagcacctggtggaacgccggcaggttggtgacgaagtgcgagaagatggccggcacgccggtggccagctcggagtagatgatgccgatccccgggacgcgcacgatgcccaggctggggccgagcgcgtggatccacctgagcgacaccttgttctgcacgtcgaactggtgcttccgccgcgtgccgtagtgccacacgtacatgacggcgacgaacaccagcgacagcaccagcggcagccacccgccctggggcaccttcatcagcgccgccgacaggtacaccgcctcgacgacgccgaacgccaccaggaagagcgccgccaccaggcagctgtactgccagacgaagacgatgacgagcgccatgagcagcgtggtgaccagcatcacccccgcgcacgccatcccgtaggcgttgccgatgagggtggtgtcgcggagccccatggtgacggcgatgcacagcagcatcaggatccagttgatctccgggctgtagatctgcccgtggatccgccgcgacgtgtgcacgatcttcacgcgcgggaagcagcccagcgccgtgcactgccgcacgatggagaaggtcgccgatatcaccgcctggctgcccacgatcgccgccagcgtcgcgatcaccagcaccggccagaagatgcccgctgcaaaatgcgacatttcattcggatcgatgtcgtcgtatcacgattcatgtcacctcaccaccagtgattagcagtagattagaggagtactccacttacttggaatggactcgaagaatacgaagtggatgtcgcagtggggtgatttggacaggaaggccgcctgccccatgtactgcagcaccaagcacgggtagatgagccccacgaacgcaacctgtcaacaagtgtacgtacgtacgtgtcaaacaaatgtcaagatatttaacctgctcttaaaatcaatctgcattatattaaacgagacgcagtactgcactatcagtgctctgacagcaagcataaacagacacatatacccttatggatgcagctgtgaagtggccaagatccgcatacatggcttcggtccctgcacatacatacatatatatattattataaaatatgtagttgatgagtcgcagtgcagcgagcaaaataaggtttgtttgcctgtcatggagaggagaattcccccgagggagatccagccgtccttgccggtgtgctggaagaacctgacgaggtagtaaggggagagggcgcgcagcaccctggggttccacaccacgatgttgtagacgccgagcgccccgaggaggaggagccagacgatgaccaccggcgcgaacaggaacgccaccctgtgcgtgccccagtgctgcaccatgaacaggcacaccagcaccgtgcacgacaggatctccacctccccgctcgtcagcgcggtcgagtgcacttgcagcccagagaaggacgacagcactgcccagccagcagccaggacaaaagatcgatcatcgatcacatcagcaacccaaaccacacaccaagtagtagtagtattacggtacgcgcgctcaccggacatgggcggcgtgaggacgccgtcgccgatgacgagggaggcgccgaagaggacggtgacgaggaggaaggtgcgggacttgcggtggttctcgaggaaccgacggagcgcggtgaggatgggggtcttccttggggggccgtcagntcctgngnngtgccccgtgactaacgcctaatgggccctgggggtggccccccaaaaaagagggggggcgccctcgggggggggcgcccctttttctggggggggggccccaaaaaaacggggggggtccccccccttaacttccgtaaccgataaccgggagacccggaaggcctnccctttccttcccttggggggggggggctcccaccaggccacttttcttttctttccccggcaccgtttttttttccgcactttttttggggggggggggggggacctatttggaagngccntgnanacanttggcgtggcgccacccatgcagcgagtagagcgcgaacgtgccgccctcgccgttgtcgtcggcggcgagcacgatgaagacgtacttgaggagcgggatgagggtcagcgtccagaacactagggagaagacgccgaacacgatctcctcgtcctggaaccgccggagcgacccgatgatgaaggtgctcttgtacacgtacagcggcgacgtgctcaggtcgccgtacaccacgccgcagctctggtacgccagcagcagcacatgcctgtagtagctcctccagtgaccctgtacccgtaattaattctactgattatttattattttatcagattattactttcattcttcgtattatggccctgtttagttcccaaaaactttttcctaaaaacatcgcattgaatcttttgacacatacatggagaattaagtatagataaatcaaaaaactaattgcacagttagagggaaatcgcgagacgaatcttttgagtctaattagtccatgattagccataaatgctacagtaacccacatgtgctaatgacggattaattaggctcaaaagattcgtctcgcggtttccaggtgagttatgaaattagttttttttattcgtgtccgaaaaccccttccgacatccggtcaaacgtctgatgtgacacccaaaaattttcttttcgcgaactaaacaggcccaatatatggagaaatacgtgcttatttaatttagggaagattgcaaaaatcaccctaaatatatcatcctaagttcgagatttcttcatgtaaaacgacttgttacaaattccatgtcttaactcaccttgtttcgatatatattcctcccaattaccattgtttgcgcgttttttctcctcgtgtcttacttggtttagtgtattttttgatggacatgacccaaccacatcttttgcacaatgtaagggcatgtttggttcaatactaaacttaaccataccaaatacttggcattactcaaaaactgtcatccatttgttttatatccaaataatttgtcatgccaaattatttggtttttggcatacttcataggtagcaaataaaacacataccaaaacattagcatccctttgtggtaacaaaccaaattcaaagcctagccaaaaacatttggtaacaatccaagcactttgcagaaaaataaataaataaaaaaaatgaggcaatgatcaaatcttgccatgccaaataaattggcaaggccaacaatggccaagaaccaaacatgtcctaagtttttttttttaatctggttcggctgaggagagacaaaatcggtaggaaaaaaaagctgtccattttccttccatcattggtcgcactaaagtgatacacattgcaaaattatttaactagcgtcagtattcttcatggattggtaatactgtatactactgatgccctctgtgctcacactgtctgactcggtcacaagctatttttaggacggtgttagtaactagtggtgtaaaataacaatgagctactcctactgcatgccactcttaatgtaaatgttctccttgcatgatccactcttggaaaaaaaaacaaacaaatcactctgttattgtcaaataattcagtcaagaataacattttagttgggatcgttcttcctgattaggtactagtaatatattcttccataagtatggtcagagataagatgcagggtacattaatcaacaccatttcctactacacctcagtaacataaaggaggaaataaagagaaaaggaaaaaaaagggtcagattccgttgatggaccagcaccgatgttggtttaggtaacagaaatgcaaaaaattgcaaacggtaggggtgcacatcatgtccgtatgcttacacaatatcacaaattcatcacaagaggcaaataaataaattatttggaaaatgcgatttcaatgcacgccagagcaaggggaaatgtatagctcaccgggttcccgtttgcggcacctgcaccggtgacatctgccggcgagagaccgctttcgcagtcggccaccggcattttattttattggaagatgaaaggagagggaggaagatggccgggatggagtcaccaattgcggacatgcgcactctctctcactgcgtgcttcttctccgattcgccgtcccctaaatctgttgttttatttgggttaatgagcactcgtcggtattcttggggttatgtggatgagtttgtattcatcgaggcaaatgtagaggggagagagagagagagggggagagcccccggtttataatgaggtgttaacagttgtggccatggagtcatgcaaagatgaagcattagaggagtagtagcgtatagtactctaattttgtagctgtgccgctttttaagatattttactttccttggaaaagtactggtacgtattaaaatttacactaaaaaatttgacaccacgaaataccaaatatctagaggtaccaaatttatattatcatcttcgggtacatttttaagaacagtaaaattactcatagtccatgctgtttgtactttttattcgggattgttattaatacttaatagtgtcaaagaccgttacaagtaataacaatgtgttgaggcgttgagcgaatccatttagtttttaacttaaaaatagcacttcctccgtttatgtaagtttggccaggctttaattttttctaagttaacaattcttataacaccaaatttcattaaatccaacagtcaatatattttgatggaatatttgttcggtgttgttcttttataaacttagtcttaagaagtttgacttaaaaaaagttaaactatattatagagtgcattatttatttagggaaaagtccgaattacacccctcaactattggatgagtatgaattatccccctaaacctaaaaaccagacatctttaacccacaactatcaatatggatgaaaaaccccctaacttgactcagtgcgaatttggatcatacgtggcggtccagtcagcttaaaaaatggtgggacccacctgccagctcttcctcttcttcctcgttgccactgcttaaaaaaagctatgtcgagggtgaggcggtgacaagcgacacgggaggagccagtgaaggaagctggggggcagggctggcgcatctcgccgcaccagtagaggggggcgactgacatcgacaccgggctcagatatgatgattttgatttgggggagtcggtcgagaatttgagagcaatggcggagaaagtgagccaggggagcacggtaggggaatgatggcgtcctccggggtcgccgtcaccatgaccaccgtgcccatgacggaggagcacatcgatgccttcactcaccaggtccgcctctgcttggtccccctcaaggatgtggctgggccaccgctgacgtcgccctggcaccgaggcggaaggcgatgacgaccaccactggggaggagcgcgtggcggtggcggccgtcaagaaggagtgcaactgggggcggtgggactcgagtggcggaggtggaggagctcgagcgacactagctggaggcgatggccggaaagggaatcggcggcgatgtacaggtcggtgatgttcatagggagctccacgcagcaggccggcatgagctttggcggcgagcacgcacaacagcagccgtgcccccccaccgccgttcttggctccccctccgccactccgagctggctccatcgtccccgcctgttgccgctgcttcgaggtgccttccccgtccctgcccgctaccactgtcctcagctccccttccgccactgagctgcctccctcgatgatgcccgccatcgccatccttgactcctcctcggccggttgctcggtgatagagagagggggagtcgagaagagaaagagaaagagaaagagagaggtgaggggaaagagagagaggatgagactaaaaggtgggacctatcgatttaaagaaaaagaattgctgactggattgccacgtaggacaaaaactgctccgagtttgagttagggggtaattcgtccggtattgatagttaagggtgaaagatatctggttttcgggtttagggggggggtaattcgtactcacccaatagttaggggtgtaattcagacttttcccatttatttatcggctccatgttgacaggctaggtttgatcaaatgatgtcaaatcatttcaacgtaccagaacactgcatataaggggcagatgactcggtatggcgagctgtggcgctcgccataccttgatctgctagtgagacccccccggggcgcgtcctccttcctaggacgccgcgccgcaccggcacgatcgagagagggagagtgagaacatggcgcgatcgagagagagagagagagagagagagagagaatgggcctaattagttggcctggttcatcctttatgtgcgaaggcttgacgagttcaaagtttgtcatgatttagcaagcctagcaaaaaagatggctgaacttgagagacacattgtatttccattggtatattgtctcattgagttagtattgcttttactggtggcgactagatcagttgagagggccttctaggtaatgaagattatcaagacggagctacgcaacaagatgtccgatggttggctcaatgacttgatggtgtgctacatcgattcaaaggacttgattttcaaaaaaaatcaaaaaaagtatttcagaaaaagaaaagtaggcaaatgcaattgcctaaatctcctagacctctaagcaattaaataaatgtttggtataccttcacattttattccaatcattgctctttatgttatcaatcttaagtatatagtatactaattaatctttgcaatttgttttgcagtttctatatgtctatctatcctcactagtctctagttcttatatgtgatgcattgctgacagctggaatcttagaggtattatttacaattttggcaaatggatgatgaatgtgaacctatggctagtgcttgttgccatgtttgagattgcgtcatgatcggataatgttgcgtcatataatatagtgcattaagattgtttttttttctttgtgctagtccatgggccacaccggcgacaccgtcacacctaattttttttcccgtcctccaccactgtgcatatataaagataagcagcattattaatttgaaggtgcctctaggaaaaaaacagaacaacaattttctacggcgagtgcccgagcggaacgccacaccacacaaagataagcatgcgagatttaggcacaatgctattcttagtgccacaatgcagcaccgacacctgccaagcctaaccgtgaatcccttcttaactcccgccatggcgctcctctccaactcgaggaggacacgcacgttgccaccacaggctacgcaaaattctctcccttcctcctccaccacctccactccgacgatcctcctcctgatcctgtgccggccggcgatggcgtaccggttgctggagctcacgctggtctccgcgagcgacctcaagaaggtcactctcttctcgcgcatgcatgtctacgccgtcgcctccatctccgggagcaacgtccccatgcccatgcacggcacccacgccgaccgcaacggcggcagcaaccccgcgtggaacaccgtgctccacttccccgtccccgcccgcttcgacacccgcggcctcgccctccacgtccagctccgcgcccggcgctccttcggcggccaccgcgacgtcggggacgtgttcgtgcccctcgacgacctcctcgccggcgcgcacgacggcggcgagccgaggccggctagctaccaggtgcgccgccccatgtccgcccgcgcgcacggcacgctctacttctgctacaggttcaccgacgtcaagcatcccgccctcgaagccatcgaggccgcgaccgcgaccgcgacgagcagcgccaccaaacaagggcagtacgtgcccatgtacgcgcaggactctgatgagaaggcgacggagaagagcgtgtcgtcgccggtcaccgcctacccgccgccgtcgaacgccgtggtagcgcacccgccggtcgtgccgtacggcgcgccgtacggaggagggtacccaccgcatcagcagcagtacggttacgcgggtcagccgccgtacgcgtacaacgccggcccaccgccgccggcgacgtacagctacgcggcggcacaacagccggcggcgaggaaaggtggacgaatgggcatgggcctcggactcgggctcctcggcggcgcggtcggcgggatgatgctcggggaaatggtcggcgacatggaggctgacgccgcctacgacgccgggttcaacgacgcactggaattttaggtcttttgtcgtgttttcctgtgtacatgggcaatgcacctgtataaatttgtcacgtgcataagaaatttcacgatccaacaatgggaaacgcgatgtcaggccacaagggtaagcagatcctaaatcaacgctatatatatatatatatcatccagtacgtacaaccacacatctctactccttaaaaaattcaaattggtgttggtgatagtgaagccaaagcagatataggatctaacatacaaagcagacatgcgatccaacatacaaaccatcgacacgtttggagcgacaaaaataaaagaagacgtacacgcgatccggaacaaaaaaaaaaatcgtaaaaaacagaaacgccccgcaacctgcgccccctcctccgcgcgcctccatcgccgccccgcaccctcccatcgcctctcctccgcgctgcccctccaccagcaggcggcgcggtccatcgccgccccgcgccctcccctcgcctctcctccgcgccgcccctccaccagcagccatctccacaccgcgccggcgcccctctcctctccacccgcgccgccgccgcccctcgcctccccaccgcgcctctacccctagccggagaggcgccgcccctccacctccaccagaagccgtccccacaccgcgccggcgaccctcgcctccccaccgcgcctccacccctagccggagaggcgccgcccctccacctccaccagaagccgtccccacaccgcgccggctaccctcgtctctccacccgtgccgccctcgacctgcgccgcctcctcgccgccgtcgaacgccgacgcccctcgacgccctcgaccgccgctgcctcctcgccgccctcgaccgccgacgccccgcgccgccaggccgcagccacctccgccggtcacgatcgccgtcatctgaaggtatgtatcccctgacgatatggccgcaacatgttccagtaagaagctcaatccgtggtgtgattttgagccagctgttacgattaacctggctctaggacatctgctgataatatttattttctaaatcatctatgtgatgacgtcgaccattcctgtgcacctgtccaactcctgttttctactccttgatttccatgtatatacagcttgagatggtttgattttcttttttgatcaagctatctgaatcgtcttgttctcgaaacatccctataatgtggtttattttttttaccgtgtattaaaccaaatgttaggtgtaggcaatgagctcaagtgttcatttatcatcagttcatgtttcaagctttgtgaatcccttctttcatcacaaatacattaagtaataatttttgcaatcaagtagtaatatcccattttttatgactacgtggtttgtcatgtcatgctcataagtaagaatattaagtttctttgatttgtgattgttgaatgactatgtggtttgtcatgtcatgctcataagtaagaatattaagtttctttgatttgtgaatgttgaatgactatgattctgaacgtttacatcaaccgatgagaaaaaaacaaccatcagcagcactgagattctgccttatggtttgtactggattgaactctaataaatttggacttgtgcatttcagggttccaatggatgatgctaaattaattcttcaggtctatgatgctaaattggttagtccatgttttgcactgatattatcactgatctgtaattgttcttgcagaactcttaaggatcatctgaagattgaatttgaaagagcagtggactgatgtgctacttcattttattactttgcatgctctgagatcaacaatctctcatgatagatagcatattacgtaatgctggagacgtggatagagattagtacattcattacatatgatagatagcatatcccatttttgatgactatgtggtttgtcatgtcatgcacataagtaagaatattaggttgctttgatttgtgaatgttcaatgactatgattctgaaggtttaatcaaatggtacctttttttttctaaagggtttcagcaatccatattattatccatttactgttagtgccactaatcatggttgctgctctttcaaatatgatgctgtgcagcatggaaacaaaaattggtttctctttcatgttaacagaagctatgaaccatcctaatactaatttatcaatggctattatgcatctgttcaatagtgactcgatcagttatgtgatctacatcagtgagataaccgagatcaaattattatgtgcatgtgtgacaaaatatttgctgtttaattttccttccacccactatagcatacatcagtgatataattgaaatcaaattattaatgtgcatgtgtgacaaaaaaaagaagttattatctgcatgtgtttctcaaatttagatagcaggcctaatcttttatcgagctaggagaagccctgagtgccctggttaggaacaacctggagctatggttgatgaatcatgagtaaagagttttcggttctgtcagaatgaaaaatgcctgaccatagctctgaagatgagtacatcttttgcaagtcttgatctgtgcacctcttcagctgactgccagcatgaaaaaaatatgattatgattaggctttttgcaaaacttggatttgtgcacctttttaattagggatggatggcaatatgccaatatgattgctgtatagtagcttgaggctttgaggttgatgaagggtacagtgcttcttcctgactttttttttgtttcaaaatagctttctcggtgcctttttgtttgcttatgaatttatagcatttgtgtagagttaatgattttatatgtcattataaatcagttctttcatgacccaaataaaaatctaactctaaagctacaattttattatcgttttttgtgaacctaaatatacaattacccacagatttgtatcaggagaaacaatctcattatccttaaaattatctaggtattcaatatgaattttatatgtgagcatgatcatatgttcagattgatttcgtttaagtttacatactgatattaatttgatgatctactaagttcgaatgccttagaagaaaataattatgccttttatttattcttctgacacagtccaagtctgtttggagaaggaaacaggctaggaaaaaaagtgtgatcatggtccgctgcaagaaaagaggtgcatttcgtactatacttcttttctctattggatcatttagtgtgaaaatccaacatttttttggctctaagtgaacagatgtttttttaaagggctcgggtcatgaaaattgaactgtaattatacaatggttattgttattactgttgcaaccggacgccatttgatgttatgcttggacggatgaacacattcagatttattattacttggagacaagatgccaaatatatgttctggtcatccatgggaaccgtttgggagggttgtgtttgcacacgcttttgcttgtacataaagatttatgttctagaaaccagtggaaatcatttttggtcggcaattgactgtcgtaagctgaatcatttttggcaatgggaatgagatcaatttgcacacatttaattataggtatttgctgtgtagcatgcattggtttgtacttgtgcattaatcttgaagttcactggtctacgagggaaacttcgttggagggcggcaactgtcatggttcatggatgcatacgaggtgaccctcctaatccagtggattggccaccattattggttaatattgattttgattcctgatttccttgcagcacaacgccacctggtggctgacaagccggcaagtacgagtatgtcgattagttgtgcatctttattccatgccgctatcatatttctgtgcattctaggaaccattgaccagtggcactctgccaggaaagtggctaataatgtatcttgttgctacttatccagatctacatataatctctttggtagtaattttggactaatccctgctgcatcctcggtttattgaattgcattttaggaaaagcaacaatgggaatctggagcacaagtcatcaatggcgatctgcagaagataaatcaaacctgtgatctgaatgaagctcatagtttttcccaactccttagtactactacttgctagctgattctgattagatataattgttgatggtttcgaattaatttctaaacaatatgatattttgaacttttccttaaaaatatttgaaatatgacattcatcaaattaaagctcaattggactatatctgtgaaaattaatttgactaacatttcttatgaaatttcagactttggtgcgtcttatagtcacaatgtagcaagacttgttcagtctggattgtaaactctggaaaatggtttggggtggttacctgctgttaattcattctataattaaaattttaattatcttcaatttcctttttatgagtcttatatctataactctttccatgcttgcttgccaaaacatataatgccttttgtttgttcatgttactaacatccaaaatttgtaattattttgcgtgctatattaagttttctattccaagaaatttacactcattgattatttaacatcatttgacccatagtgattttaaatttatgtataatttttcccgttgcaacgcacgggcacccaactagtaggagtactacatatataacttaatatcaacttggtatatatttgtaattaaactcatattttggaagttttaaatcatgaaaaatgttataatcaagattccaaaccaagcacaaattggtagttaacatttaacaaagggaaaaggaagaacaaaaatagtagaataattttgacgattgttttccctcaaaatttgctctcaaatctatcctaaaccggattaaattgtatttacaaatgtcataaaccaacttggattggaagttccagtctctaattcgaaaattccaatatgataagaaagtccaaattcctcaattctcaagctctctgtttaattaaaatattttggatgaaaggtcctatttttcatcgggaaagtatcatacatttcgtccttatccaaaactccaagctatctcctccaccacacattcccttccttattttttttcttttcctcttactctctatagtctcaaagacactgcattgccaccattgccgggtgtagtggcagagacagaaattaacaaatcatagagttgggtagggctcaactaatgaagttttttttttcaaaaaattacatggtgaattaagagaatttaagcatgattatgaaggcaagcctacggctcaagcccaagcttccctaggcttgcctctacttctgccgggtgttatgagagaggccaaagctattgttgtcggtggctacacgtattgcagtggtaggcggtgttgatggcagtgttggacttggcaaccgatagggaccggatgcggacactgctggtcctagctaaggttgcctgcctcgtgccactactcatctatgtcattccctagacatcacctcctgctgccgcatcagccacttagtagtttcggcggttggagtatgagaagaagacggtagtggttttattttgttagagttttagcgatgttgcagtctattgtttatcttattgcactttattgtatcaaggtgtttcattttgttttgaatcgatgttgcatctactgattcttcgtgttgtagtcagtatgtttaaaatgttgatttagttgaaacactttcgttcaagtgatgaaacattttttcccgattgataaaatatatgaaacatttttcatcgagtaatgcaacatgtgaaacattttgcaacaatatagtgtaacaccttctggtgttttaatgaatattggacgtctgatttgtagcgctctccagagttcagttctggtatgaaacccagtgttttaaatcgccggctaagacatttagcaattggtcttctcaaatagctaatagcgggctaaatggggctagagcatctaaattatacatgagagcaaatagctagatcctcaaacaactatatccagagatagcggaatggctctatgtcggtgtgttgtggtggaggcaaagtagcttgccaggggtggtttcttggttattttggttgtctcgtttatggtttgatcataggaagttggagcttctctttgggcttgacaatgatgagttgtgtttgagcttcaattatgctgccgcaagtgtatagttagttctttgtgtggttttctttgccagttttacccaattacctgtgcatttatgaggtttttgttcctggtttaccctaaaacatgagtcccatcatcttttaaggtttatcctaaaaatgacgactggattgttttggccattggatatgtttgtgtttcctaatcgcttctgcttcagaaaggagatacaaaaagagagtgagaagcatgggctgggctgcgccttgtcaaacttcaccaccccaagcctctcaaagcctagctacgccatctactgcttcataccattgctagctaccactgttgtcgccacacagtgtagccaccaccaccatgggctgcgctaatgcttacctcttctctgctttcttgtctgctcgctgttgctgtttttgctggccaataacagggaaaggggtaaggaagggagagaagaagaaaaggaaaattaggggattttgtggaattataggattggtaccaatgtggtactcaagtttatgacaaactacttgttgtgataaatggactagtttgctctatttattttctttcattttccttaacttatgcattaatgctaccattctagttatatatgcaagtttcaagttgatattaatgtaaatgatgctcttattgttttatgattctatattctcaatttggttatgtaattcaagtgccataggtaaccatgatggcgccatttggttatttattcagaatccttgagtaagcattggtgatcttgcccatttcttgtggtagtttgttatatgaaagagaaaaataatgtttttaggtcattccttatcagtagttgtcatggttacgaataaggcataccctctattctactagtcatggaatatacggatatggcataccttcgtatgtatgataaagctccgtatgcgataaggacatcgacaagagattatggaaataatcctcatgggcaagtgcatgacagagtactactcggaaaggattctgatatatcatatcgtgcagtgtctggggtctctgagttctacttggagaccaagagaattcacaatataaatacataccccctgagggtccaaggcatcgaatcataacaccaataacccgtcaccatagaagtaatccagaagacttgaagcctgctcgccagtagatcttgtcgagaatctcttgacaaggatcttgcttgtaatcttgtaatcagttgttctctattgtactatgtggtttccatatcaatctcataaaaccggattagagctattaccttacaagggatctgaactagtataatccttgtctctttgtttgcttgacgtcaaatcgtgtagatcctcgtatcaacataccccaatactctcatcatccgttctacaggtatcccccgtcgatagtggagtgccaggtaggggaacttggtgcacaaggttctaccgagatgatttcaagcttccccgacgtctgcatcagcactagcttcggcccaggagatccaacccagacgtcgctagtgtggactcaagttggatccatcgtctttccggtctacgctgcaaaaccaatctcgtatgccctagtgtttgtcgagattgagaatggtgcagcaaagaaaacgagaaacgacatcacttcagccgcacctcccgtctcgacagaaaagagggcgccgactacgacaacactcaggaagaagcctcaagcggccaaatctcgttctttttctgcgaaacaggctctgacggactacaaggtggtacaacacatgaaggctaaactcgaagcttgcaaataacgagatattcaacgcgtctcaccaaccagattcacctggtgtagtccaatcaataagtcaagaaaacatgacctttcaaactgcaaggttttccttgacgccactatacctccacacccccagatccaacaacgacaagttcaatctcaacatgttgcagaggaacaaagcgtggaaggatctccagatcgcttcgtgggatccgtcggcattgacccccacaaacccttagttctacatagcatggaggatcaagaatcttcagcatctaatactacacgtgatgtgaacgttatcgaaggagacgctccaagcaatgcaaacccatgtgatccacctcatcgcgaggctacagatcctgtccgtactcatgcataacatctcaccgcaatcgacttgctattgagagagtcctttcgatccggttctgtaccctgaagcagatcactggttggaagaatacgatctacaatatccaacctcaacagtgcctttacagcaacagctggaccagcaactcagggaccctcttgtcttccggcacaaggagaagaggtgcatgccgatgggaacgtcgatgctaccgaaatcctttgcgagcacccgagtcgagattaggccggaacctttggaacgcctcaccaagacgacaaagtcagcagaccctatcgccccgagatgatcgcgaccttcgcgaccacttgaacgggtgtaggcgggaacgataggagcaggatgacgtctgccatcaccagcgacgttctccacatcgacaacgcaataacaacggtaaccgaggaggctgtgacaataacgccaaagccaccatgatgaaaacagcttgtcaaagagaagaaaaagcaacgccatgattttttgcttctgcaacgagcgcctgatgcagagcattgacattgtttggaggttctcagagctggctatcccatttattggaaatgcagacatgctaataacaagctgcaaagctggacaacagcaagcacactatggtatgttcccacttccgaagccgaaatccggtggcatgccggccatcaccttctgcaccgtcggcctggccagcagcgcctcccaccacgccttcacgtgcgggtacgcgtcgaccacgccggcgtactccgtcgccatgaagtagcgcatgttggagaagtggctgaggtccgcgaggctgatgcggtcgccggcgaggtacctggagcccgacagcctcgcctcgtacaccccgagcaccttctccagcttccggacgctctcgtccacgacgccctggtcgcggtcgcggccctcgaacttgttgatgatgcagtgccacaggatgggcctcacggcggcctcgtgctggtgggcttccacgtccagccacacgtccaccattgccgactcctccaggcttccaccttctccgagtcccaggaactctggtttgtacttgcgaaagatgtacctagcgattgctcgcgattctgacaagaaaaatacaaacgattttagtttcttcttttgggcatagtgtgttatatagtatgtgtatccgtgatcttgaataaagaattactgaatctctactattaattgaacagttattcagagaacaacaagtattagttttgattggaataattcagagaagcaaatagaattcaatcgacgaaaacaagaatacaagtcaagcttgcttacgatagagcgtcaggtcgccatcctccagtactggaatctcaccgaacggctgcataattgatatacagaaaacaactttaataagcaggaattgaaatgttcttagcaggagaaattaagtttggaaacaacaactcgtgggcaaaaagcgcatccaaataaccgagtattcatgacaattcggatcctaacgtctattgccaacatatagtctactattgggcaatcgaagtgcaggtattccatgaatcagcctgcactgtaggtcgctctgaccctttggactaatttgcgtaacatgcgaagaagatatagtgcgagaattatgagaggctcacgtacgtttctggcgaggtgctccggccggcggtggtcgccgccggacctgctcatcggaacgacctcgtactcggcgccggcctcctccagggccaccagcacccgcgccatccatggcgataccacccacccgtacactttcatcggcgccattggtccttcttgcagctgaatttgccctgcactttgttggtacatatatagttgctgctcatcggcccattttgttgctaccctgggcgtctattattgtacaatgttgaccgtagtgtgggggatttggtgatataagcgttgtttcttttgtgatttatatattggctgcggaactgtgggtctgtggctgctattgccttgcgtcattgcttacgcgagggccatttgtttgttctttccacgcaggcacgtgcacctctggttctatggaagtgtgaattcaccattcttgagagctacaggggagctacttttttccaaagaaaaaaaatggtatatctcggcatctttttaaggcctataaattttctctcatcagtggtagttgcaaagtttgaatgttatatttacgtgtttctccttacatttttatacattttaactgaagttgacagaagcctagctaacggtaataacataaaggaagaaaaatagttgtgtgatgcaactcacgtaatctatggcaattcttaggatcaatcgttggtcattggcaaaagatagaatatctgtgagaatgttattgtttcattacatatttgaccgttttgactgatttaattgagtaccaaaatatgaaacaaaattatgaaaaaatatttcatagaaggctatttcatagaatgtgagaaactttgtagaaatttatttgagcataagtgatttgtcatttttaattatatgcatgcaaatacaatgcataaaaaaaaaccaagaataagccacaaataatctgtcagggttatggataccatatacctaatagtagttgactaaatcttggcagaacccaccacataccatgtcttatacggatactgacctctgatatggagggagttccggatagagaaagacaaccataattctgcatggaaacgacaatgactactcggattgtatccatattggtttccctagttctacttagacaagggaacacctatgggtataaatacaagaccccataggaggagaggggacacggagcaatagatcaagatacaacatacaagccaacatacgccaagacaagacaagatgccggatattgacttcagagataagcatggctagtccctacggtgtctacggatactgtcaggagagacatagcgctgtctttgatctcgccggatgtggattcgaggaggaaggctaccctgttgtcgactacgagtcagcacttcagaccgccaagtcgacaacagttagataggctaccttaaatattgtactggtgtgatcatggtgaataagagcaatgaccggcttcggccaacaggagtagggttattacctgacgattcaggggctcgaacctgtataaaattcctcgtccccatctcttttattaaaatctcgcatatatcctagtaccaacgatccccatactatgcaaataccggaatcgcgacatcaaacgtcgacacaatcaaattagcaaaacaagatctgtttgttgatgagtgtgagtggtttccacaacttggctcctacaatgtcacattagttaccaagcaatttggccaaattagcttattcagatgaattacggagttgggaattttttttaggatatacaaagtccatccactaatcttgaagtttttattcgatcctggagcgattttatgagctatgtgttctgtaaatttgtcacatttttatcattttgaaggctaggaagatcattagtttagtttttattataattcaaagtgttgacctagttggctcaactaaagttaattagtggatgtaagtttttgtaatctatactaccaatagtggcggtggcagttagtctgtgtccaccactaccaagtgatttgtgggaaccaacgatggtaagagaagtttcctagttcaaagggtgtatgagttgtgtgcatgcagtaagcacacgggctgaagtggcccatctgaatgtaactttcttttttccgtgtggtttcaggatggatctgctatacgtcataagattttttaggtctaaaattatattttaatacaatatatgttgtataacaaatctatctatctatgatatactaaaaatccattaaatttcctacaaacgctctcaagctgccatgtggcatcctataaacgctctcgagtcaccatgtggtactctaataaaatagataaatttgacaatcgattttcatttaaattggtagactcattattttagatcgttagatttatctttacaggaaaataaaaataaaatccccctccgtgcgcgcctcagggctttcacggacgtacataggaatgatccatcccatctcagtgcctttccttttttttaaccccgtgataattaaaattaaaaactcttttacgtgccttaaaaggccatagataaacaccaaccaactctcatctattctctactaataaatagtccattaaacatcatataaatatttctaaacatttgtatagtaatcttaaattagaaaaaaaatacattcggccatcaatttacattattttaggtcatcatatctatctttttctttaaaaaacatccaaaacctccctccacactcccatgcagtgttaaagcccattaatcatcttttaaatgttttcaaaccaatccgtgacacttctaaattagataaaatcataaaaaaaattagaacaaagcatccaaccattgggttgtgttaacagtgaaatttagtaagcccgaagtagtcatcggcttagagtcagcatcggctttgaaatcctgagattagcctatgagagttgccaagtcgtcagttgttggattcttgctatattcggttaaggaaattgatctactaaaggaagcttatccagaagagaccgagttcaaagagaatgcggcatggcaagttatctattaattagtaatagtttgttagtttccttttatctttaggaaagtgtatttagtgtcctataaggactttatcttttccttttatctttaggaaagtttctttcttgttcgacaaggacttgtatcaacccatgggtataaatatgtacacccggggtctatgtaatgtaacacacacgttcaatacaatctcggcgcatcaccaccctttttgctttagttttgtttcgacgagttcttgctttcgggttgagctgcatcggtttcgatcttcaacaagaggtaaaacttgttatgacggcttgtgttttcgggattagtgcttccatctttatgatactctaatcttatttatgtaattcgtcgagttatcatatattttatataatctctggcaatattgctatctaacctacaatcggctaacatctatcagtagagggcagtcgattaggttaaatatcaacgctggcttagattatatacgatatccaccactctatgaaacttccaatggcttgattgtctagatattgtccttcttttcacacttatagctgcatcagttgtttgatcttatgagtcgtgattagaatatcaatctctagcctgcttattggttgctgattagggtagtatcagggtttcaaccgatcttacctgatttaactatacttgctttatatgctttattgacatgttaaatctgccctttatgttaagatcttattgcatttaagtatattaggctttcgtttgatatattctgcttactttaatatcttaatatagagttgtatctgagtactagccgatacatgctagatctatctgatcagctatgctataaacatatatagtcttgttgttggtatatatttcaatttaagtgatttatactgtcttggcatggcgactgatctatcccaatcacttgatttaagtatatatcgacataaggattatatattgttaatatctacagccgatcgagtagatttagtcctttattatctaattataactgccgatcgatgtatatatgacatcggctcaaagataaatgatatgtcatcggcacttagccgatcggctatcgtttatggatttaaccacggtttctttgtttctatttcttgttgattgcaggatcaaatcaactggtacgctagcatacccgaaggtgagttttggacctgcactggagttaagcagatctctcaggcctcgtgtttttcatcaacacgcaattggcacgcccggtgggatcacgaattttatatccacaagtctgaagaagaagtcaatgccaagatcatggtcacggtggagaatttaacggaggaacaacaatattggctcggggggcaagcgcatcagtttcaacatggtggagcacatcagtatcggctcatgaaagccgattacaagaagcaaaggaagattggttttggagttatcaagacaagaaattttgaagcatgaattctcgtactccaaaactagggggggatgtgttaatggtgaaatttggtaagctcggagtagtcatcggcttagagtcagcatcggctttgaagtcctgagattagccgatgagagttgccaagtcgtcagttgttggattcttgctatattcggttaaggaaattgatctactaaaggaagcttatccaaaagagaccgagttcaaagagaatgcggcatggcaagttatctattaattaggaatagtttgttagtttccttttatctttaggaaagtttttttcttgtccgacaaggacttgtatcaactcatgggtataaatatgtacacccggggtctatgtaatctatcttcatgatcaatacaattcggcgcattgccaccttttaccttttctactttgttttatcgtccggcgggacttggcacctgacgtggagctgcatcggtgttcgatctccggcgaagggataagtccaatgttccgccggtccaggcaattgtatcgtctacgtcggcgtcgttcaaggctgcatcaggacattcgacctcttggattactctggtttggatgatatatttgcctacctatttatcatatgtctatgttaatctagtcttagcatatcaatttagctctatcggctgcttctcattttagggtttctgccggtatcggctaaatcgcgttgctagattagactaacttagacatctaccaccctgaaaactcagtcaacggcttgattgtctagatattatgtttcttttcatacttagtgctgcatcagttaagtttgatctactaagttgtgcttagaaccataatctttagcctacttcttgattgccaataagggtttcatcggggtttcagccggtgagttatttggacgttgcatcggctcataaggattgcatatacatataagttggatttagccgatgacaacaaaggtttcactgtttaatctaatcttgtggatttcatgacatcggacctccagccgatgtgtgctttaaccttcggatcgatgcttatttatcatatcattatttgccgattggtttatactggattatattgttattttattacatcatcatcagccgattgcctttatatcatcatctacattggacatatagccgattgcttaaaccctatcgctatcggctggtattggcattggctattatcggctatcggctgaagctactccatcggcttgtcagctgattggctgttttgatctactatttgcatatcttgtcagttgcaggatcaaactgactggctcgcccgcatctcaacaacctttggacctgcattggagccaagcagatctcccaggccggtgtgttcgattttttcgtcaacaggttgttattatatttttttaaaaaaatccctattttttaataaagctggtagacctatacttatatatcctgatagacatataacgacttcctgtcaagttaattaatttctctcaacatgtatatgggggctatttacctatacaatttgatcttcatgcatttatcaataaatgatctttttaggagataaataaataatcttaaaatgatcatagcatctaaattatatatatgatctatgaagacactaataaattaaagaaaaaatctttaaatgatatcatttttttacgtcataatgtgtaccccatcttgcctaaatttcatatagacaacatgttgaatatataaacatgatcagttgaacaccatactaattgtatcagcatagaacaatatagaaacatgaatttattgtatgagctctactttactgacatttattgtattgcaataaccactgcataataattactttagataattggaacaactctaataggtttgaaaaattatctaagcctgacaattattgtattgcaataaccattgcataataattaccttagataattggaacaactctaataggtttgaaaaattatctaagcaatgccaaaaagaaaatttatgaaacaaatagttcttttgaagcatggcatgcaaatgttactcagttaatattccgcttcaataagtttctcaaatacaacttacgatacatgcccactcattcgcgtgggctacctttcttgttagaataaaaacatccttcttaaattccattgcaacgcatgggtatttagttagtgttataaatggtcttatcaaatttcaaagttccaatatttcaaatagcaaaaagaattcggataaactattttatcaaattttctatttatttcttggagagtgattgtgcgatgttatgtctgtgataaccctagttagattagttatacagaagggaacaaaagtgaaatttcatttgggcactcaaattgaaaatcatgaactgtggctgtttagagcttaaccgttgattatatatgttgctttgtatcaagtcgcctaaatcggagctcaggccaacaagatgatctctgcacctgtagattttctaatgtacaaaatatgcttaacctaaagatcacaataatgcggaatttaaattatggatcgttacttgaagccatcatgcttggtgtgattccccccccttccgccggcctcccccttccctcctccggccagatctaggagggaggggggaggggagccgccgccgccgccccgcgcgtgccgttgccgccgtcgtcgtcgccgcccccacgccccaccgccctccccaggcctccctccggccggatctgggaggggaggggagccaccgcgccgcaccaggagctagccgcgtcgtcgtcgccatccacgccgccgccgccctgcgcgcgccgtcgtcgtcaccgccgccgccgagccatcgtcgtcgccgccccgtgcctcactgccctcccaggtctccctccggccggatttgggaggggaggggaggggagccgccgcgccgcacagggagctagctgcgtcaacgtcgtcgccgtccacgccgccgccgccggtagagggagggaggggaggggaaagtgttgagggagagagagagctgagcgagggaaatgagtggtgggaagggggtggaggagaagataagacttagaattttttggggtaggtacgattttcgcaggcgcgggttgagtggtccgcctgcgaaaatgattttcgcaggcggcgcttaagtggtccgcctgcgaaaatagacagcgaacttcaccccgatttatatttttataggcggtcatttggctttaagggtcatgtccgtctgcgaaaatcagacccgtacgtcgggaaaaatgtattttctagtagtgatcgctcgtgatctcatgtgaggtagcggcctcgcgtttggatctccacctgcactggccaaagatcacactatgaacaccctctagtgcttagattaggttgcccaggaacatatatgccatatcaatatttataagatatttcaattgattgttttcataggtattagtggtttatatactacgttttgggttatgtacttctgtcaagtcatcatttcaggtcacacaacttaattgcaagcagtggtgtttcccctttataattcattgcttctggctttgtccaccagttataagttttgaatgatgtcatattttaatctactaatttcatgtcacgatgtgatctggtttagttttgacatgcttaattagcaaaatacatatttgttctctacttcaattagtttcttccaactgttacctatttattgcgttttatttattcatacatatggcatagaaatatatagctaactattcacactttttacaatatattacaacctatgggaaaactaataaaacattattaagaacctgccagtgtcaaagcaccaaaatatttattagagtgagctttgcaaatcagaaactcaacggctgtgtctatgctagaaaaaaaaactcttttacagtgcttggtaggtacctgaggtacctccttaacgaattgttatccaccgttaatcttcaaaggataatttaggaacaaaaatttttacactgcacaaatccattcaccaggaaggcaaagggtactgggtactcgagcaggtcgatcatgtacattgacgagacaatcaaaatcgatcgaacatcttgaatgatcgcactaacagcaaggcggtcaatctcatctcaggttcggatcatcaaattgatcagaagtttcagaagcacaagggcctcaggctgtcaggcagccgagatcacagctacaggatacgaaagaaaaacgacaccaaccgaccaactagtgatgaagcgatcaagcaaacaattcaatcctgcagatagattgactagattgatcaccggagatctcaactcaattgatgccgccctaatcagaacacctccttccgcaccatggcgatcatggcaacgaggtccaccgctcttgccctttaccgaaaaataattttatgaaagtcaattactattttacccttccaccttctatacctggctcaccattttaataccttttttctagtttcttctctctatccgttagattattactgatcaagcgttctaattaatttcaagcattgaagatctcttaaaatatgtgcaccacatggatgttctagtttggctgggtcgagttaagatttgggtgaacggatacaaagcaacatagctctacacatccactgttcatgattttcaatatgagttttcacatgcaatttcacttttgccccgttctttataaattatggaacgtgggtttactaaaatgcacctattctcatcaggtgcatgatattcgtgttccgattctttttgttgagtatgtatggataacctgtggcaggaacaataggtaattccccgcgttttgctatgtaagttcctaagtaacttttatttttttaataatcaagctaaaaataaaaaatatattagttattaacaacaaattaaattaaataaaattggtttgtcaaactatgttaaaagagacatatagttagtagactatgtatgagattgtagatgaaatattaatatatcccgcacatagataagtatatgttaaatattataaaaatgatggatatatatgtgtgttaaaaattaaacagcagtgaggtggaatttagttaggttgttactttgtgttcaaaacattacatttgcagaaataatgaaccaggttgcattcatttggacctttctgagattggtctgtcgattggaagatgctagcattaagcactagcacagagtgcttggcgttactagcttacaaactgatatgggacaatggactaccaaacaattgcgatgaaagagtcagtagtcatccataaattactgattgatgtgaaaattaaaaaaataaatccacatacatcattatcatccataaattacttgattgatgtgaaaaaaaaacccacatacatcattatcgatcctttctctggcagataatactacctccgtcccaaaataagcgtaaccataagtttccgtgcccaactttaattgcctgtcttatttgattttttttatgattattattattattattattattatattataaaatatgaatggtaatttatgcgtgacttatttttcttagtttttttaaaaaaatttaaataaaacgaacaattaaatgttttttttataatgaacgattaaagttggatacgaaaacttatggctgtatttattttggaaggaagggagtatatctgaaagtgctagctgttgcactcctatggtgttaggattaatatattatagtggcggcactggggcatgcttcacctgggtaacttagtagcgttgactgtttttcttttctcattacagaataaacaaatcatggttaagtgaatagaaccaggaggggatggcgattcattaaggccttgtttagttttaaacttttttcttcaaacttccaacttttctatcacataaaacttttctacacatataaacttccaattttttcatcacatcgtttcaatttcaaccaaacttccaattttagcgtgaactaaatacacccttagtttttaaacttaccagatgattggggcgaactaaagaaattattgttggactaatgtattggtgttgttctcgtcgagaatctgattcttcgtcgccaaccttgatggggaagcgcagtggaggaggcggtggtggttgggacggggatgtggaaggatggacgcaacaattgataggggcggatggcggcagaactagctgtggtggaggtcgtaatgggtgcgggggtgtggcggcggcagaagtggtgggtggtggtgatggggaggtgtagtggaagatgtaacggtgaaaacaacgggaattggggcggcaacgaaaaggttgggaggcatttgagatttgtttttcgctcttggcctcatgagcgttttacattcgcgaggcttctcctgttctccaacagtgccgcacacacacggtgtaggcgcagccgccaccacagctagcttggcaaacatgcccagtgaatttgtagctgcattcgactgtcacttttaatccgatgatgtggcacattctaatggtcaaaaagtttagtattttcactacttagatattagaccctgtcggagaatgaacacctccaccagggaaccgtgaggcccccttttgtgagttcggccgggggcagcgggtgagattcgaggattcggtgagcgaagatgtgtgatcttgagggggttcaatcccctaaagacgatgagacaaatggggtttatacagtttcgggccgctaagaagcgtaataccctactcctgtgtttgggattatggtcgagtgtagaacacaagtgcctggggttgctagactcaagcgccagttcgctcggaagtccccccctccaccactaggcctggacttccttttatacctcaaggggttaccacatgggcccaacaacctaacctagctccggtggagaagtattataatctttgcattaaatgcatgtcttgtctcttgatttgggaagccaagcgcacgtcgtcttgatgatggggcctgtcaaaccttgccgcctgacacggggggtgcccctgtcagtcaccatttaatgggtgaagacttctgggctcctattacaccgggaaacgagagccttgctttgaccagagcgggaggaccgactccggctgggataagaggatgagaacctctcaccatcattatttgatgggatatgtcgggctgcacgtcgcctgacacacgcgatggtgcgcctgacatcctgggtcccatcagtcattcgaccggtcacagaccggttgagtgcactgcacaccgcattaaatgcggcgtggcgcgaccgctcgggttgccattaatgtgggtaggtgggcacctggaggcggacacctaacccaccgtacgtggtgacctagagagggggtcgggggagcccgacccctagtcatgggagggggcggtcgccgtccgacctcgggcccgatcccccctcgggagagggccacgtggcgcctggggcagccttctccctctagtctcggccagggagtggctgccgccctacctcgggtccgatccctctcgggggagggccacgtggcattggggggcagcctcctccgtccaatctctgggagggagtggccgccaccccaccttgggcctgactcccctcgggggagggccacgtggcattagggggcagcctcctccgactagtctatgtaagagtggctgccaccccacctcgggcccgactcccctcgggggagggccacgtggcattggggagcagcctcctccaactagtctatgtaggagtggccgccaccccacctcgggcctgactcccctcgggggagggccacgtggcattggggggcagcctcctctgactagtctatgtaggagtggccgccaacctcacctcgggcctgactccgtctttgggaaggagtggccgccaccccaccttgggcctcactcccctcgggggagggccacgtggccttggggggcagcctcctccctctaaacatgatacccccgggcccatatcaccgacatacccctagtaaattttattctagattaggccagcagtgggtggagttggcgatgggtggcaacgagatatgaggttagcaggtggtggtcggacggcgacaaagactagaaaaaaggtggtgcaggggaatggtgttgccgttggcttagtgaggaagtgagggagggaggtggggagggggagaagggataagcccattcccaacccaagacactagacatagtttctataaactccacatcgtcaagaaactagtactagacactactcttccaatgcaaacaccactattccatacttaaatttaatgctacttatctcacatgatgtcttcgatattgtgtagaaaccatgtctcatgcaatactctctccgtcccacaatataaggaattttgagtttttgcttgtaatatttgaccattcattttattcaaattttttttacaaatataaaaaacgaaaagttgtgcttaaagtacggtagataataaagtaagtcacaaataaaataaataataattttaaaaaatttgaataagacgagtggtcaaacgttgcaagcaaaaactcaaaatcccttatattatgggatggagggagtatatagattccttttatttcctcatttattcacttgccacatcatttttcattctaggtggcaacttatttaatactatgaacactatcctagtcattgggttggaaatggcctaatgcttactattgcgcatgaatcccgatgcatgtcttagacgtaaaaaatttggctcaaatttatgatatttttggacacctgaaaactaaaaaaattcataataaaatcaagtacttattttgagtaagtcgtttttatactagtatagtacacacggtacaagctgaggttcacaccacaaatgtccaagctagatgcatgcaagtgcccagcatggtagcacgagcatctggtcggtctttgggacggaagaactcaacgagttgctagttctgaattctgatcatccagaaacgggtagtccgtgtagcccaccacaggatcagaggtatagaacgtgctcctgtcatacttgttcagacctgccttcctcctgaacctctccggcaggtcagggttggccaggaacagccgcccgtacgccaccaggtcggcgtagccgtcggcgaccgccttgtcgccttcgtcccggtcgtacccaccgttcaccatgaacgtgccccggaacgccttcctgaacggaagcaggcggccgtgcgcgatcaccggcttgctgccgtcctcgccggcgccgacgcacattctcggctcgatcatgtggcagtagaggacgccgaggttgttcatgaggccgatcacgcgcagcgcgaggacctccgggtcggagtcgtggcagtccatgtagtcggcgaacggggagaggcgcacccccaggcggtgcgcgccgatctcgccggccaccgccgtgatcacctccgcggcgaagcggcaccggttctctatgccgccgccgtacgcgtcggtccggtcgttgacgctgtccttcatgaactggtcgatcaggtaaccattggcgccgtggatctcaaccccgtcgaaacctttgttagaaaatgagtagcattgttaagctgtggttactgataccgaagactcttaacacttgaggacgtagtatctggttaatatcgactaagtgtaaaaaaaaaacaatgtttcgtccattgacttttaatgttgttgcaatgattaaaaaaagaaaaaaagaaaaagaaaatatgtgtgggtcgatcaaaccatttccaaacactttactcgttgcaacagaccgaatcagcaattgcaacaaaatttcaacattatcgatacataacatgtttacggcggatatgtccgagttgtgtttattaccggcctcgatggcatttctggcagcaatacgaaagtcgtcgacgatgtttgggatctcctctgttttcagtcttcgaggaggagcgaattccagaacttggccatcatggctgacctgtggggtcacttgcttgtccgtgcttgagatgggtgcttgcccattaggctggaactctgaaaaaaaagaggatatatgattgtccatccttaaaatcaccagcggactgattgcatccatcttgcggccaactggacttaacaaagtgtcgagcgagcaaattcccaggagatacgaaaagatactcagctgatttggacttgacttcatgactaatttaaggaggagggggttgtcactttcattttagtggtctatttcaggaccataagaagataaggatatataaatatctgtctaaaattattattaaaaatatatcacaacaaatcaaaatcgttttggatgacaatacaaagtagagccaagcatgaatgagagagaaaaaaaggtagccaacaaatcacaaaacagcaccagttcattatcttaaaaaaaaagcacgagtttcaccagcgtcgatcagtgacaaatcatcagcagtgttgggttgcaaaaatttctgaaatgaaactgccgaggtgttgcttagatcaaactataaactaagaactacgaaacgcaaacaatatactttagataattagataaacttttagcgcatggtactatggcaaactgcagaaagatgaatcaaaccaaaaaacttaaaaaaaaacataaaaggacgacttggagaagaactaatcaagtatagatggccatgtgggccgcccggcacggcacggcctaggcccggccgtgcctgggccgaggcttgtcgggccggcacggcccgaccgacgcaccgggccgtgccgtgccagctcacgtgctgcactcacagcccaggcacggcccaacacgcctcgggccgtgccgggccggcccgaaggcacgatgggccatcgtgcttttcctcagaataagtctaaattttctccctcctattgggctgtgacattgtatagctaaaaaaagtctattttacctccctcttctttgtgctgtggtatataaatagctaaaataagtctatttaaggtccctattctttagacattgacatttatatgtctatttttagtccctatactttgtgtaccgggcctagccagccagcccatcgtgccgggccggcccgaccgtgccgggccagcccagcgtgctggtggggaggcccaggcacggcccgacagtcgggccgggccggcacgggcccgacccaagtcgggccgtgccgtgcttgggccgggcaaaaaggcgtgccgtgggccgggccttcgggcctcgggccttatggccaactatataatcaagcgagcgagcgtcaccctgcctgtcggggagacgcggcccgtgtgccatatctggcagaagaagacggcgcccttggcgtgcacgccacgcccccacctgctccgcgctccaaatcccgggcacgtcggggtaccctctcgccgtctccgacaccgcgcaggcttccgccaccagcagcgcgccccgcgccgcccgctgcgcgtagtacgcggcgttgtgcggcccgggcacgttcccgtaggaccggcaccgcgtcaacggcgcaagaacgaccctgcatcagtacgcgcgcgcgcgcacacacaaggcagaagcaaattgaagggatttgcatgaaacgtgcacaggagaacccgatcgatcgacgagaacaatagcatggacacgaacctgtgagcgagatcaaactggcccatcttgtaaggggtcagaagaggggtcgacgcctccattattgtgacagcttcgaccgatggttggattgttttgtttgtgcaagaaatgatgaaaaagaaggctgcgaggcgctgagctgagcttgttctgccgctgaaccttttataggcagagggaagttgcgtcactgtagtagtgtgttctgctttcgcgcgcgcggcagagtagtggtgtcctagttgactttgcccggccgaaatggttcgctagctgggatattatagtcttctttggcaatggcgtgtgcttgtctgcccggctaacggaaggggacgggcaggtcctgtcattgtggcattgtgccaatcagcggtcgatctaatcttgtatgaattaattactagtaatagactagctggtagtaccaagcaatgaacacaaggagatagacgtacataagtttctttttttttttctattgtaggtcacgcaggttccatagtcatagtgtagattattgcatctatgtgggccacaacacataaatcgatgaattgggacgaaagcgacttcacttttccttatattatatcacatcaaactgaacgaaagtgacagtttctgagaaaaaaactcccttcatccctcccaacataaattcatttttttatccatattacacatattaatataaaactaaaaatactataatattcctactttatcaaatcttaatgcaactagttctcactttatctatttccaacatagttacttcataatttcacaaaccctgatggaatgattattaaaaatgaaattatttcgagagagaagtcaaaatcttgtataaattaattactagtaatagattcgccggtagtaccatacaatgaacatatggaggtagacctgagtttctagtgtaggtcacgcgagttacatactttaagttgtcgcatctctgtgggccacaacattataaattgatgaattgggacgaaagcaacttctcttcttttattatatcacatcaactggaacaatagcaatggtttgtggggcgaaaaaaaaagtaatgagattgttcaggccttgagggtcacgtcttagtactactcacagattgtgacggagcgcacactatagttttgtttttttcagctcattgttttcttcatttcagacaataagttatcgtgaggcgcaaataaaaaaaaaagctatataggcatgtgtaaaaaaaaccatagacttggcagatttttttttcccacaaaactgtatatatctagttgtttggatggcacaatctacatttgccacaagacacgaaactattggagaaatgagcatgacatattttatggtgaacgagacttgtgcccatgaaggtggcaaaatacggcaagaaattaaaataatatgaaccaagcgtttgccttggttggtcaaatttggcttccacaagtgtggtaaatttgggtagccaaccaactaaataatccagctagaatccaaataacataaaattgtaaatttagctctcttttttttttttgaaatagcatgggcacatgaatatatatgaggtggtgaaggaaatgggatgtgtattccatcctacccacccaacctgaagctcgcgaggaggaaatgggcaagaaacatggagacccggtactatccgagttcaaattagcctgaatccgcacaaactatgagttagggataaaggaagagttctatctaaccgtatgtcctatattataaaaaatttatataaatctattaggaatccaagtagctacaaacatgataaaatattggttaatcactattttacaagttcataactaatatagcataaattcttacttatgtatctttttaacactctaattgcctccctagatttaatatctatgaattagtgatacaaataaatatccattcccaaatctaattccgagaaaaaaaaatgagataggatacatgatatctatgtcaaccagaagaacaggtggactaggggttcatgatatagaaaaccagaatcaatatttactaattaaatggttgtttaaactgattgatgaagaaggactttgacaagatcttttgaggagaaaatacttgaaaattgctcaattattcaagctggatggaaacaagtagattcccattttttattaggtcttatggttaaagatagattcttaaatttgggtccttgaatggttaataatggcactaaactaagattctaggaagacaaatgggtaggaaattattcctttcagaatagatacccatccctttataatatcgttcaaaggaggattgtttcaatcgcaatagttatgagttatgttccacttaatgtttcttttagaaggacgttggttgatcagaacttagataattggcacaatttagttgtgttgattttacatactaatatgaatgatagcaaagatagctttacagggaatctcatcaaaatggttagttttctattagatcaatgtacttatctttgattaacaatggtcattgttggtgaaatgggaactagggtatccctttccccagtgacccgagcttacattcttattccgtagaagaaaaaccttatttagtcgcaactaaagacgaccgcatgtcagggtaggggacccaggacccgccctacttcgggtcccaagggctcctatgttattctatgttatacatctctatctctctctccataggagtgtagatacatataaaatctatatctaagatttggatctataaattagcaaggcggagagcccggggccgcctttgaccgggtcctagtgctctacttgcccttctaggtcacacattcctccttgagaggagtgtggagacctataagatttacatcctaagataataagccaggggaagcctaggacctaacctagactaggtcaaatggcattccttacctttctagaccacacattcctcttttagaggagtgtcgagacttataagatttatatctgtggatttggaagccatgaggagcctgggactcaccctattccaggaacaaggacccctcaggctcttcttagttcgtactctcctttacgtggagagagcatggagacatgtaagatctacatcccgtggatgtggacttagtgtcctaaactcattcataatgtcttcgagaagctcgtcttaaataacaagactacctactaaggagcatcggggtgtgcccgagaacgagagggtccatgggtccagcccccaactagctatttgctagtatgtgaaagtccatgaaacgggttcacagctggatttccaagttttctagaggtgaaaagacatggaaaatatggcactgctgagtcacctgggacaataggagtgaagccgcgcgtcaaacatgcccaacgacacccagtagcgccagtcggcagaaaagtggagatgtgacattatctcggcaaggcttgggccctctgggcccaccacttggcgcgtggcgagctaaacaatggcccagttggcctcggtcatcaccgggggagcctagggtaatccaaagacaagatcttcaccagctggcctcggtcatcaccgggggagcctgggcaatccaatgacaagatcttcagtaggtcttgcattaagaggccaaagaaccaccaagcagcgacaagacaactcaaagccaaagtccctagcctacagcagaattgcaagcccctctttgaactataaaaggagagggagatgccacttagaggaggatgcacattatctagttcaagaatagttaaatcttgtattttctccatatcaagatagcaaaaaaaaaaaaaaacaaacacaggagtaggggattacaccttcgggtggcctgaacctatataatccgcgtgttcatttggattttcacagttcttaacaatttcagtcaatgcaacttcatctgtagttaaccccctggccgaatcttcactcggggagaggtctgcacctcccccactgttggttgatcgctcctccgacagtcatattgagataaataagtttatatagaaactaaaaatgtcaattaaaatcaagatttttatgtgtgatttctgttcaaaggactaattctaacctataataatttagcaaaaagaaattagaatggtagtaaaagatgctattttttatgagatatgagactatatattcaacatttttttattgtcatattagaaatttcgttggagagtagtttatattttctttgaactaaaacctcttaatagtatttctaatatacctaggaattggctttgtggtatcgattcaagaacaaagaaacttattttttttaggagcgtccacattatgtgggttcaatggttgtgtagaaatgatgtggtttttaataaatcttaaaaaaacttatggtgcaggtacttttaaaggcaacacactgattctagtttagggcattgtttcaaaagtgtgaacagaacaaggagctaatacatgttgcatgccaaaacttggaggttacagttatgcagattttcatcattttccgttggagatttacaaataaacttcaataattgtattatccttaagtgttagtgtatgttagtcaaactttttttggttgcctggattattgctctctttgagagaattatgtaacaagtgggtgtagcttctctgaagcaaatgccatattttattctattattaaagaaaaagaggtgcattacgtatgataaataaacaggagatcaaattaaaaacagaaaaaagagtttctttataccaccctcagcctctctgtgactttgcccctgatataggcttcttgcaaaatgctacatatacaaagtagcgtaacatgcatgtccaccactccattttattcgtaaggtcgaccacaaactagctttaatttattgctgacttgcaccaactttgaccatagtatcaacagatgggtcagtcgaatcaatcaaacagctagaggctgctcaagaaacgggtagtccgtgtagcccaccacaggatcaggcgtgtagaaggtgctcctgtcatacgcgttcagagccgccttctgcctgaacctctccggcaggtcggggttggccaggaacaatctcccgtacgacaccaggtcggcgtagccgtcgccgaccgccttgtccccttcctcccggtcgtaccctccgttcacaatgaacgtgccgtggaacgcccttctgaacgggagcaggcggtgcgggacgttgcggcgcgcgcggtgctcctcgatgctgctcacgcatgcacctcggctcgatcacgtggcagtagaggacgccgaggccgttcatgacgccgatcaggtgcagcgcgacctcctccgggtcggtgccttcctcgcggcagtggtccgcgaacggggagaggcgcacgccgacgcggtcggcgccgatctcctctgcgacggcggacatggcatccacggtgatgcggcagcggttctccacgctgccgccgtactcgtcggtgcggtcgtttacgctagccttcatgaactggtgaagcaggtgcccgttggccgcatggatctccacgccgtcgaaaccttcgtcaaagcgtaagactaacggtatcaataacttggtaagatctctagtagttagatggtgaaatattaccagctttgatggcatttctagcggccacacggaagtcctcgacgatctggactatctcccctgtttccagcctttgaggtgccgccggtgccaggtcatcggtatttccaaaatagctgacttgaggtgttactggattatctgtgtttgaattcggggcatgaagggaagtttatgtgaaacaataagagcatatataccgtaaaatgttctctttccaatactcccttcctagagaaaaaaaagagttgtaataaagaattaaacatgttaagtatacccgttgaaaacacgcgaccgttgtgccagatttggcagaagaagagtgcgcccttggcgtgcacggcatcaacgatcggccgccaggcctcgatttgctcctggttccaaagtccaggcgcgtctagggacgacggaagcgtgtagtggctttcttcagcaccaccagcattcccgctctcgtttaggcgtgacatgaaccaccattttgacaggttattccggtcatttacccctgattcagttgctttgacaccatctgtagctgaattatagtctgttaagttcgtgccgaaaagaaagccagggggacctggacgctggcggtggattggaccgttcgcagcgtcgtccttggatcgtcccaacgcagcgtaggagactgcgctggcctctgcaatgaggagggcgcccggcgtcgccctctgcgcgtagtagaggagattgtgtggctggggcatgctcccatatgatctgaaccttgataccggtgcatgtacaatcctgtaaccaccgccgtaagtttccgtaatgaattttagtaattttttcacggatttgctagaaaacttcccccaacagcctgtttggcaagagaagggaagatgaatgggagtttcaaggagggagttggtggtatgattggttatgggagttacatttttagttcccatcccttgtttgcgctgtgtttagttcagcgcaaagtttgggttttgattgaaattgaagatgatgtgactgaaaaattgtgtgtgtatgacaggttgatgtgatgaaaaaagactgaaatttagatctaaactttgaatctaaacacagccttagtcgaatcccaccaagtttcacgaattaataggcctcccccaggtaagagatttgtaggaattggacctcttaattccccatctcaaacactctcaaatcccaagtcttccaaccaaactacaaccaaactacagacttaaacttccagatatcataaactcccattccccatcaccatctccctccaaccaaacaggctgcaagttcttttcccccaaaaacactcagatttgtgaccatcgtatcacctcgagatttgtgcacgaatgaaaaaaattgctagaaagaaaatttcacacatatcacatgtcccagtgctagctaatcaaaccatagttgaatggaagttttatataagttatattatggttgcaacgcagttacattgcagtcataatgtaattataatgtaattgcactttaattatactgtagttacatataaaagtttctgcctcaaaaaatttgctgcatttatttttacatactcccaatttcagagcttgtaaaagtacatttcttaaaagaaaaattgtgcaaaagtacaatcacgtgtcccgtatatatgaaagtaacacattgtttgtaccaaagaaaagacatctcaactttcaggaaattttataggtggggtggaccgtggacgaactaatcaagttctttacttgagagtaactagttcataactgacctgtgtgccaggttgagctggcccatcttgtagggtgtcaggagatgagtgtcctccatgtgtgtttgtatgcttttgacagcccgatctatataacgcacctctgttcctttcgaggctatttcggctcgcttctacatcttctagcttggcatcttgagtacttatagtggaagaagaggtgtagttaattagtcatatcaaattacgaatcgtatatatgcatgttaatggctatgtgcttttctggtagcactcaacacgtactgcttaacaaccggagcgcgcgagccgcgaggattcgtattgatccggcagagttgacttgggaatgagaggattcgtgttgatctggctgttgacttcggagttgggaggggtttgcacgctatatacatcggtagtagctagacgctagatgcatggagtacgctagctagctagccccgacgccgcaccggcgattacacgaacccttttgtttctgtgtttgttttagtcccagaccatgaaatctatctattatattaatggaattaaaaaataagaaatattagaagagaagactaaagtccatatagaaatacaattagaaaataactgaaatttagaattaaaaataaggaacattagaagtttagaagtagagtatagagttcatatagaaatacaattaggaaataatagaaatttgaaattaaaaataaggaatattagaagtagactatagagtccatatacaaatacaattaagaaaaaaatagaaattcggaagtaaaaaataaggaatattagaagtagagtatagagtccatataggaatttaaaactaactaaaattcagattaaacataataaaatgaaaagtagtgtttagagtccgtataaaaatacaatttacaaataactaaaattcgaaatttagaaaaacatgggaataagagtttaaaatcaatataggaatacaatttagaagtaactgaaatttaaaatttaaaattaaagaatattttttttatcaagaggcgtgaaagcctctcatttccattactagaaatgatagagtttacaggaattttttttatttttaattttttttattaaaagttttacaaaaataattttccattttgaaaattgacataagtggtcgcctaccgccctctgggagggcgatttttaaaaatcgccatcccagagggcggcgaaagtgacgtggcagacggccgttcgctctcgggcgacggccgtcaacgaaatttgcaggcggcccccttgccgccctccgctagggcgattttgtactgtgcggggggccgcctgcaaatgggcggcggggggcctggaattttgcaggcggcccccttgccgccctgggggagggcgattttatactgtgctttatatttttgtataaatatcaatagttatcaaatctttttatattgaaaactatacaagattaaaatctccaagactggtaaaatacaattttattattttttagggcctatttggaatgttaccgtacaaatattttgttagtgccaaaatataagcaagttttggcactaccaaatatttggtaaggtaaaattgcatttgatcatatttggtttgctgccaaaatgtaaaattgtagtgaagaatgttctacataatctcaaatctagattacgtattaccaatgaataggcttcaatcgaaatcaaacacaagtactattcaaattaccaaaatattggtagggcatgtttttggtagcaatccaaataggcccttagtcttacgcatacaaaaaatcaccaccataattaaacattgtaatgataagatagataagaagtgccatcgatacacggtacaaatttgtcgatcccgacgaatcaagcatgcggtaacctatcggccccttctaggtcggtcagaatgcattgtattctcgtggtccttcaatcgttgatactctacttgtgtttctgactctgttatcttctggccatgatatgatggagtgacattgtcgatccatcgagtaaatccacccatccttggattgccctgtaaaaatagtaatgttattcagtttgggtagtaattttgtgcaaatcatagcggattttgtaaatggttagacatacaacgaaatcgttgtctacattggggcagacaaaatatctccttcgaaatgtttgttcagcaaaggatgtagccacatgccagcgatctctgcacccacactttggacgctcggaccatttaggtaaccctaatggattgttcctccagtctaagcttgcaatttccacccgacgttcgtactccatccaagcatgaatgaactgtatggtcggttcaggttgcgttatcggcccgccacttgaagtaactctgactgtgtcaatccattgtacgaattgacatttccttacatcctcctatgtacatccattttgggatagttaagttaatgatagtactgaggagtgatgaaaagaatagttgtaattaccacgaaatcatcgtcgacaatgtttggacacacgaaacacctttgtcctcgagttcggtgccttacggaccttatgacctgacaacggtcaccacaacgacactccggacgctcacgccacgtggggagtcctaggggatttacgtgccattctaaagcctcagcagcaattcgacgttcatgctcatccttccgccttaggtagtccgatcttgtttcactacgtgggtaagcacgggttccgtcgttttgtgggttctccatgtctacccactcgatgaagttgcacattggacgatatgtctgcgtaagatgttacaattgtgtacgaagaagttagtttttttatccatttgaacttcgaatagatgaagcataactgatcaaagttcgcgcattggaagaatctccggccccgagtttgtatcatgagggaagacttgagtatgcatccatccccacaatcgcacaaaggacggtcacaccatggtagaaaccaaccagcaaaaggatcgcttcgccagttgagacgctcaaggaatggcgcttccattttcgtgtgttgtgtgctagtgggaaagaagatatgaagaggttgccttcagattgtcaattatatagcgtcgttttcactgcaatatatgtgaactcaatgagatacattattcattagatgtgacaagacgatcacgcgtgggcgtgattcactttatgtcaacaggcagcgccgaaagttgatagtgacaactcgagctgccgcttttcatgtgtgttgttatggactgtgcgcgctactggatctgacactaccgtgaagcgccgaaagtgtgttgttgtgagcataagttgttctagcaccatatgaatgaaaagaactatgtagacgagacaaacacaagtagtactgcagtagtaatagcaaaagtagtactgctttacaagtttgtaagccaaaagaaacggtcacataaggacagaagaggtagaacactactgacgaggcctcttacccctgtccctcctaccctgcgccctaatgtgcccctgggagtacgtgagtcggtccgggggtacggcacggccaacccgtcctgcctgtacaggtgtgacctctggctgctcctgagtgtgcgcctctggagctcctccaagctgagaggagcctagtacgtcgtggtggtgtgcaccgtgcaagtcgtcgtcgtagaactggctagtaggaccagtcctaccggcgtgagacgaagaggccccagtaccgaagatcccggctgcaaatcctgctggacaaggaccatcagtttcatacaggtatttaatagtattaataaaaagtaaagtaccgtgtgggcgagggatcgacgctccgtgagaggaagagctggcgaacacgcccgaagaggtggcgaacgcccctgcggagctcgcggaagcgccggtcgtgcctgcgaacgcgctcgaaggcagacgaggtcctgcgatgaagaaacgtgccgttaaaacatggtgacatattcgtgcaaaagctgaaacaaaaatgaactaatctctgggctgaactgtaccgtgcgaaaccggtgctgtaggtcgcactgctccgaagctaggggcgctcgaaggcaaacgaggtcctgcgaggatggaacatcaagttacgacggggtgatgttttcgtacaaaaacagaaacaaaacttaagaaacctctgggctgagcagtaccgtgcgaaacaggtaccgtaggtcgaggtgctgctccgacggtaggcgcgcgaggccgtggttgtaccggaccagctggaggtacgacgtccacggtgctgcgacaggagaagacgcgcatgaccgcacgcatcttctcctgcatccagtcgaaggtcaccctctgctcaacgtcagtcaagtgcaaacctctgttcaacctcacttggactgcggtgatatcggcactgatatcccgtgcggcatcagcctatgcaagatggaaataaaaaattcagtagttgtcctatattatgcaagataaatgaaataattgtaagaactaatacaaattcgacgtacccccacgaagtagtctcggtcacggtgcgtgggatacgcgtccgtcacagcggcaacgtgcggctctggggcgtctggagtgaaggtcacacgcgcacgagtgcgaggaaggtaccagcgaaggtagtcacggtagttctcctccgtgtgtgggaagagctcgttgatcacctcctctgtagctaacacccagtcgtcaacgtactgctgtacacgtggagcccaaagtgcgcctgctagctgtccccgtcgagtcaacctgtgaagagaggtaaattatatggctcgatgaagtaattatcataaaaatttagaaatgaacaatccgaactcacgagtggtcggcagggaggacggtcggctgcacgttgcccggaaacacctgcctaagtccgaactgtctcatcacatgctgcgggcagtgaggctcaacgaaaatgtcgaacaccatcggcaggatggtgagccagtaagcctggtcgcgtgtgcacaacgacgaaagtcctagcggtgctctcgcagcgacggcctcttctgtgtacggctcccagatgacgtcgctcggctggagacggtcaaactcgaacacgaagtccgggtaacctcgtctcacctggacgtgagcgtaacgacgctgcaataaacatgatcggaattagacatgttatgtgaagaaaaaaaagaagacgactgataaacttataacgcagcgaagttgcactaaccccacgtcgacaccagtaagtccccatcgtgggaccgtcctctggccactgcgcgctgcgaccaaccccgtagggtgcgctgtccaccactggtcgacctatggcaaacctcttggctgcccaaagctgaagcaacatagggcagccagcgatgatcgctcccgcgtcagtcttcgtgcacggcagaaccccagctccactgcggcacgtcctgtggctgagcatccacgatggaccgtgcgtagtggaccagccggaagtccacagcgtgcccgtgggtgctagtgaacatcacccacccgaacaaccacaacaggtacgcctcaagggagcgtcggaccgagttatcatcagcgtcagggtgcagaaggtccgcctacaattaagaatgaaatgttagtacaaaacactatgttgatcgcaaataagcatgtatgataataacaacttatttacttacagtgaactggagcaaccaagccttgctaggcccgactgtagagtacggaggaagggtgttggccggtcctaggtgtggaaggcgcatcacctgctcgaagcgcgcagtgatatcctccttccacccaaaaacaccgtccacgggaccaactggtgctcccgccagcggtagcccgagcaggtacgacacgtcctgcagtgtcggagccatctccccacagggaaggtggaacgtgtgcgtctgaggtctccagcggtctaccagagcggcaaggagtgaccggtctgcatcccaccgcttcgctgggtcacggtcgtccgccgccgcctcaacaagcttacaaagtggtagaaggcctgccgcacgcaacctgtatagaacaaacttcaaacataagtacaacataaagcaaagttgagttgaaatgtgaacatacgcgtaccaaggaacgtgacgggggtcgacacgcaaccacgcgcgcgacgtgcgtggacggaaggtgccgagctgtgcaccctcgactgctgacaggaacgagcggtggttcctgtcaatcccacggttcaacagcgccggtgtgtcgtacgccatacctgcatcaaatagattgatcagaaacatataaataattagttcaacataagtaataaatgttcataagcgaattactaacacatattaaacaagagtacaaacaaacaaaagtgtcaccatacggaatatttctgattacaacaataactgcagttacacgatatgagtacttagtccgaacactcatcacgataacattatgatacaacaccgaatagttcgcaatactactagtacaacaatagtcagaggtactcattacaacaacattcaattgaaattacacgatagaagtatttagtccgaacactcatcacatcacaacagcattttatttcctaaatcgatagcattgttacaccatggaatcgcctgctgcgcgacgacgccttggccttgcgcgcctgcttgttgttccttcaccaggtggtcgcctaccatcacttgcctgtccagatggactagcatctgcgccgcttggaacttctgcattcttcgggcatttcttgtaagtatggccgcgcagatcacacttgctgcagcgtaaagtcctcccacctgcttctgactcatccatatcatttctgatgcgtctagtttggcgtcgaccctttttcacccttaacttagatggatctggaatataaaaaacttgggcactcaacgttgtgtaagatcctgagatcccgaacccatatatctcctcactccatgtatgaaagattgcttctttcctgaaataatttgagacgtacacattgggagatatgccacaatcaccggcagcagcaagaacgtgtgagcaaggaaggtgatgaagcttcggcttcatacaactgcaggtacatccaccatccgccttcaagacacattcctgcacggcttgcttgcgatagataccacgcctgctcctatcaacacacattatttcataccgatgcacttgtgtgccttgagcaacaactctatgtctccgtgcctttttgattttatcttccatgtactttgtcactacgttgccaaacactatgttgttatcggccatggacggaccaatttttttgtatcgatccctaaagtacgcttgcgtgccgtgaaggatgaattcaacaatagcaaccaatggaagtacccgaactcctcgcattacccagttgtacacctctgccaaattggttgtcattatgccataccgggatccatcggtgtcgaacaatagagaccacttctccttaggctcattctcaatccactgagtgaaatttctgatggacgaccctgacctccttctcattgttggtgggtcatcatgtaatgcaccaagaggtatgggaggctcgtcaccttcaacttgtggtctgcgagattgctcatctgtttgcttcgttgtcaactcatccaacttgtcccacaactcattaaatttcttctcttggttctgtgcacaga

SEQ ID NO: 4710 - DNA, 2163 bp, Oryza sativa
atcctatggcaccaggccattggagggttcatgacacactgtgggtggaactcagcaatagagggcatttgcgcgggcgtgcccatgatcacatggccacatttcgcagagcagtttttgaatgagaaatttgtggtgaatctgctgaaaattgggctggagattggagtgaaaggagtggcacaatggggaagtgaacataaagaggttagggtgacaaggaatgctgtggagacagcagtgtccacattgatgaatgatggagaagctgcacaggagatgaggatgagagcaaaagacttgggtgtaaaggcaaggagggctttggaagagggaggttcttcctatgataacataagcctattgattcaagaaatgggaaacaagcaaaatgcatctggttgatacagatgggaataagcattttttttaatcatgatgagcatgaagtggaggacctatcatacttatatcttcataaagtatggaagatgtccacatttggttattcaactatggatttggcctgaatttcatcccctctaactataaaggattgtgttttacaaatgaccagtatgttgtgtggtatgattctatggtttaaaataaacctggtctaaattgcatcagttgctcagtttctcagcagagttgatacattttagagaaggagtaaaaattaaataaaatagcgtttgtgcaacaccctaggccaaaatgctctcaaagtctaatctccaagtaatttgggtgtacgactggtacatcttacgagcatagaggactggtgtaaatttatgaaaacaatactttgccaattatatacttctttaacttttctgaaaatattgtatattatctagcaactgtggctgcttcataagatcatgcatcccttacaaacctccatatgttaaagcagataaacagaaatagactgtttttaagttctttaaagctttaccaagcaagtcaaatgcatgttttgggtcattacaatttcaaatagcagcctagcaaatggaatcaaatatatgaaagctgcagactggagaaaataaagcatacctggtttttctatgaatgaaacagtaaggctccatcagacatcctcctttgcttaatagcataacggcgcaccagattagctccagaccacaagataaatttaacattactgcaagaaattcttacatgaaaatctctgcaaagctggaaaagctccaagtgtaagatatcttggcaagtcgcatagtgaatcatgtacagcatgttagtaaaaggatttgttttaaaaataaataaattccatacatatcatatttcgatttttagctcataagaatctgaatgagaaaacctccttaacagaatagtctaaattaaggaacaacttattgagaaatcaggaaaaacttaatactctctaaccagaaaaaggaaaacagatttcagcatgacataaaagagaacatgtaaggttaccttcctttcaataagaactttgccagtacaaccatcagcgacagagaggtttacaccaagatattatagtgccttaaggagagcacaacatgtataggctaagctggattaagaatattctctcattattaacttcattccctggactaaaaatttgcagtcactgccacatttcaactgaaatgcttgttggtcatttgggttttcacttgcttacagatgttcagttgtccgtatgattcatatataatgtattaatgtgctaccacttaccaatagtctttgcatgaacaggatccatgtctaaaatgatggaagcgtgtcctatccctcacaatgacctctcttccatacaatttcgatatcaattttattgcgttgtggcagtccaaacacatcctcaagtttttcacaattcttatgataacattagattctgaagtgagtaaagcaaaagtgactgccaacttctcacttgtgccaagtaaaagaacccttttttgctttttcacttctttccggtgcacctttcaaaacaaagggacccccctttttccaaaaggtttttttttaaaaccctcaggcacatatccagcattcctcaaatcagttagcacattttccaactttgagtagatttctttattcataggatgagacctatcagcggctaca

SEQ ID NO: 4711 - DNA, 13300 bp, Oryza sativa
atcatactgcaaccaggttctttcttgattcctttctccattattatctgcctaatccgtcggacatctttccatctattagattttgcatacatgtttgacaacaagatgtacgctgtgctgttatctggatccaactcaaggagacgctccgctgccaattcacctatttctgaattaccataaaccctacaggatgccagcagggttccccaaatagtggagttgggcttcatgggcattttgtctattgtatccaatgcttcctttaatttcccagctcggcctaagacatcgattaagcatccgtaatgcaccacagtaggggaaatattatatgcctctgtcatgctgaggaagaactctcggcctttgtcaaccaagccagcatgagtgcaggcagtgagaacaccaacgaaggtcacctcatctggagtttgtaaagccctgagcattctatagaacatgtcaatagcctcctccccacggccattcactgcgagaccaagtataatggcagtccaggtaaacttatctctgttgtgcatatctttgaatacatccaatgcgcgctcaatgctcccacactttgagtacatgtctatgagtgcattcccgacaaaaacatccatcttgatcccaagtcttcccatgtaaatccttgcccattcccctgtctccagagcacctagctgggcacaggcagtgaccacactgaccatggtgaactcatctgctctcaccttgcaaatctgcatgtaacggaatgtctccaatgcgtccctgaacctgccaacctgtacatagccatcgatcatcgcggtccatgcgatggtgtctctttcaggcatatgatcaaacaggtccctggcacgatcaacctggcctgacctcacaaggccagaaattaccgacgtccaggacgccatgctcctcatctgcatgccctcgaacaacacccaggccgcgtccatgtcgccgcactcggcgtacatatcaaccagagcgttctccaccctctgatcaggcaacaccccgctctcgaggacgcgcttgtgcacctgcatccccagcagcaggtccttccctttcccgcaagccgagagcaccgagacgtaggtgaccgcggtggccatggcgctggctctgaccatgtccacgaaggagcagcaggacagctcgaaccgcccgctcctgttatggccagagatgagcgcgttccacatgaccggcgctccccctcccgtggcgaggcacgccgcctccagcaccgcgcgcgccgcggcgccgtctcccctggccgcgtacatgacgatcagggagctcgccgcgtgagcgttcgactccatcccgaacttaaccacgtgcgcgtggatggcaccgccaactgatgccgccgccacggccgcgccccgcgccgccgccgccgccttgagcaaggacgggaacgtgtacgcgtcgggcctggccccgccagccagcatgcggacgtatcccgcaacagcctcctccgcgccatggccggacacggacgaactcgcagcacgcccccgccggtggggaattccgtcgagcaggctgcgggcacgtgacagggcgcggaccatccgcctcacctcctctcctcaggcctcccccacgcggtccccgccattctattgacggaataaccgccggcggttaccgcgccgcctccccgcggaatcccggggaagacgaaatttccgcggcgagacagcgggccggcggcgagtgcttcgccttctcttagtcgctcggtgtttttttttctttttttttctgaagccaaaggcacggtaaagcatcaggtaaaataatgaaaaatatttttattattatacggttattattcaatttgtactagtatacgacgggtatacgtacatgtacagatgtacaggtataatgaaggatttttgttgtatctagcaacgtcgatgtcaccgtacatatgtacgcacatgtattattgtacgtatacgcacgaataggacccggaggtgcagagagatttttcttttcagataatagagagaattttgtttgtcacctttacgccatgtttgtttggagtcctcgttaattgctctggaatgtaaacaatatatggtacacggatattaattgcattctgttttgagttctcataaaagaacaaaggtcttctgtttttttttctctttgttaatctctttgccgttttgcaggcaaagttggttgttttcatccctttttccatcttcgtctaattcaggtagagcccttgcttattttcttagaaaacatggtaatatggtgcttcggattgtatcttcacatctttagaataaaagccagcgtttgtttcttgcgataattgaatccatgtcattacaactttacctaattaaaaaatatcaccactgttcatgatatcgattgggtgccatcaatattttttgaaatttgaatcatgtcatcatcgtcacgttttccgtccttttttatacatataaatgaattaaatatactaataaaattgaaaatatatgcttctagaaaaagtatgtttaggagcttgaaaaacgtgcctattcattctattgatcgagatcgagtgcaaaggaagaggatatgatgttgtactcatatttatatccatgaaaaatggtaagagtctcgggcagtgtttagtttccttcaaactttcgaaaattccgtcacatcaaatatttagacacatatatggagcattaaatgtggataaaaagaaaaaccaattgcatagtttgcatgtaaattgtaagacgaatcttttgggtctaattacgctattatttaacaatgtagtgctacagtaaatatttgttaatgatagattaattaggcttaacaaatttgtctcgcggtttacaggcagtctttgtaatttgttttattattagtctacgtttaatactttaaatgtgtgtctgtatattttaaaaaaattggcacacgaactaaacctgggctcaatttaaggaaaaaatgtgcacttgaaataatgatgaggctaactttgggttcgttgaagacatgacatgacagcaatttttgtaacctcttcacgtgagctataaactgaattacaatgactaacctagatgctactactagtacatctcagcaaaaaggactaataataacctattgatggctagagaaacttttaacaacgttcgtgctacataggcaagcttaacttgcgttgcacttgtacggatataatgcgcacacatgtatataggtatagttctaaaaagaaaaaagtaaagttggtatgcaatgcactgtatatggccaacgatgctcgtggtccattcgaccatatgggctttggtcccataaaaacgtagtactacattttattgaattcattatcaaatacattttgatagtatatttgtttagtgtcggaaataatgcttagattttttgtaaatttaatcatactttaaaaagctgacttaggaaaaacttatttaaaaaccttattatatgaaactgatgtagtaatggtcaaagtcacctattcttagtcgaaaggatatttccgctcacttggtttatcaattaagcttttgcaaagtcaaggtaaatacacatacaacatatatgcatgacaccatgtacaaccatatatagatgaacaggagtatacatacctacgttgcttaggtagcaccttgatttaatcaaatgctagctagttgatgccaggtggcacactgcggacggatttgtttgtcagtttccctgcattacacattgtacaggagtgtactacatccacatacaatgaacagtagtagtagcagcagctatatactccagttgcctagtcgtacacaaagtataattaatcacaaaattttcattttatcatggaaaataagtaggcattcataatgcacgtacactccgcacccatacaatgaacagtagtagtagctactagatagttgcctagttgtacacgcagcataattaatcacaagattttcatttttcctaaaaaaaaacaagcagacgtataatgcgcgcacactcatcctacctttaatgagtatcttcagaagattgagcctgttgtcgtcgagaggtacagggtatgtcatctatcactcaaagaataactagtcgtaaatacgagtaccgggttgctgtcaaggggtataggttacgttggctatctcttaaagaataatttgccgtaaatgcgaataccatcaagcctaagacttgcatccatataggctagttacaccacaaaacctaacgtgttaagctacgctccctccacacaaaattttcatttttacccagcaaaaataaatgaatactgaagcatgcagcgctgtacacgagcttcttgtttatcattgcgtatttgtcatcatctaaaaaaaattgcgtatttgtacgcgtacatgcacgtttccatccacaatttcacatccatacgcgggtgacatatattatgcagctctcgtgggcatagctcgccagccaagaacgagctgaagctctcgtgcgcggcgcggccatgaaggcgtcgtcgtcgtcgcaggggcagagcccgaggacgccgtcgccgcgcgccacctccgccaccgccgagcacacgcggtcctcctcggagccgtggctcgtggcggcggcggtggcgagcacctgcgacgactcgtgcgtcaacgacgtcgagaacttcgcgcgcaccgtcgccgccgccaagtctaggcagctggtgggctcgtcggcggcgtcgcgccccgacatgctcgcgtccgtgctgtcccactacgccgccaagtggctccccgacgtggtggccgcgtcgtcgtcgtcctcgtcgccggcgacgtcggcgtcggggcggttcctgcccccggagagccccaccgccacgtggctcaagaagcggctcctcctggagtccctcgtcgccgcgctcccgcctgacccgccggctcccgccggcggcggaggagcggccgacgacggcatcacgtgcgacttcctgctcaagctgctccgggcggggagcatggtgggcgccgacgcggcgctgctgcaggagctggagtccagggcggcgcggcggctggaccaggcgacgctgggcgccgtgatgataccggcgttcgggcacgggtacgcgtgcgggacgctgctcgacgtgccgctggtgctgcgcctggtgcgcggcttcctcaaggacgccggcgccggcgggggcggcgccgccaaggcaggcggtggcggaggcgccgccgccgcgagggtggcgaggctggtcgacgcctacctcgccgaggcggcgctcgaggccgggctgcggccggccgagttcgaggagctcgcgcgcgccgtgcccgcgcacgcgcgccccgccgacgacgcgctctaccgcgccgtcgatacctacctcaaggtcacccacacgtactcctccttccatctccactaattttacgtttccgtttactactaaaaaaaaaagctaccaatgtagctttgcatattgtgtctcgatataccgataaggtcttttttacaccttatggacaaatttgatgtcgcaatcttttcggtttcaaaaaattgatatcaccatcttctacatatcgtcaaaacaattgtgaattattttgggaccagctagctacattttaatattcatggcgttacaatttaagaaaaaattgtcaaaattttattacactgtaaattacatatacttacattataacatttttaaaacctacactgtaatttaaatttgcagtacacgtacaatataataataataataataataataataataataataataataataataataataataataataataataataataataataataataataataataataataacaacaacaacaacaacaacaacaacaataacaataacctacctagaactaaaatgggataggagagagaaacatattgaaagtagccgtaaaaaatatggtgtcataattttagcaaacacgaattatttcattcagaatattttataactatgtaactaatatgcacaacatttagtaaaaagaaggttttgaatttttttactcgcaaaatagaatattttgatttgactgttatggtgaaattcttgtttttctttcacaagaaattaaattccagctgacatggtagctagtggtgtgttgggtttgcactagtagcagctagcatatgcaaagtatgcaaccatgcaaatgtgttggccgatgtgccaacgttggatgcatcatgcatgttcaatataaatgtactgaaccaaatggggagttttgttctttggtcaatcgccacgagacagcctgaaaatttgtgaggcgtctactgcatctgtttttgtgtttgaccactgaaattgcatcggacaatgcactaacagcatagcatattctacatactccgtttggtagtacgggtgctcacttttctctgtcgaagagaatcttgtgtgtcatctactcactaaacatccttttggttttttgcaagtataagtataaagtttagtgtagggtgcacaatcaaaataaaccaattagatataggcttggaactttggaagaaacaaaatttgtgtaatattgtatatcaacaggaggagaatcaggacaactgataagacctgttattttctcccttgggtttgttttgtcttgttagcttgtgaactgaatgattgatatcagtagttgcttctcccacttcactaatatataaaactaaaatagctcattaaggccattaagatccttctttgtgtttgttctgttggtgtttactgtagtgtccaaactataaagttactaatatctgaagattgttcagccaaatcacttgtagtttttttttctgaaaaaaaaataaatcgtaactcggagtacttctatgaagtagggtaagaacaaagcgtagggaagagatcacgtgagctccaaactgctaaagaacaaaggtttacctgtatttacacatgggaataggtgctttgtggatatcaaatccttcttgtcccttagcttgctgcctgctgttctcatcaacacttgtgctttgtcctggtgcgagtgactaacaagcagttttactgtagctgcgcgtttcaacaaacaaaaaaaaccacatttgtacttaattatttttagttgtttcattcaattttatcaaccgagcaaacgagtgtccaaagagtactaagagagaagatcatactcctaggcctggtttagattcaaagtttgaacccaaatatgtcacatcgaacttttctacacacacaaactttcaactttttttcgtcacatcgtttcaatttcaatgaaacttccgattttgacgtgtaactaaacacaccttagtactctaaaaacgtgtggatgattgaaattgccagataaacatgcaagtatcagagatcttgcaggcatgaacagtcatgcaggtggtacttattaacagtctttaacaaccatcgtaccagactactgtataacagagccaggagattcatctttcaatttcatggctctacatgtcaggacttgacagtgctgagagtttcagatccaaatgacaccaaacaaaaatcatgtggaattctgtttctgctgttctctgcgcttttacagatcccctgttcatcagaaatgccagcaactcagcattgttgctgctgtctgcaaatgaaagattctcaatgtcaaaaccaatcatatgttaggcagttaggccatgcaagttcatgccaatggcactatgccaaatatcaagatgccatcttttgttcagttctgttcttcaaaattttttgtctagaataaatttacactttgttgagcaaaaagtgctgtgaaatcatgggagaaatgatttttcaagtgcaaaaaatattttttaaaaagaaaaaaaggccgtttgtggttcgctgttggcgccacttgttttgggggccttttgggagtataggattttaaacccctcaacctccctagcgataggagtttttccctcttagtagctagtactccctccgtattttaatgtataacgctgttgactttttgaccaacgtttgaccactcgtcttattcaaaatttttatgcaaatataaaaatacttatgtcttgcttaaagaatatttgatgataaatcaagtcacaataaaataaattataattacataaattttttgaataaaacgaaaggtcaaacgtttataaaaaagacaacgacgtcatacattaaaatacggaaggagtaacatttttgtttgttacttgttttcggttcttctatccttgtccactgacaacagccttctgctgcttgtgttgtgtaattaaactttacttttcttcttcttctattttacttttcttcttcttctattatattgatatgtaatcattttgcgcattagtgaaaaaagaaaaataatctatctattatattattaaaacagtcttgaaaggaggcaccacgttcgctgtggaagctagaaattctcacattaatcggagaaaaagaaaaggagagtccaagtagaaatacaattcaaaaatagctgaaattcggaattaaaaataagcgatattgaaagatgtgtccatataagaacccaatacaaaattaatcaaaattcgaaataaaaataaaataaaatccgaaattagaaaataaaataaaagttcaagtaggaatacaatttaaaattaactgaaattcggaattaaaaataaggaacattgagagaagagtacatataagaacccaatacgagattagttaatattcggaataaaaataaaaataaaatccgaaattagcaaaaagaaaataagagttcaagtaggaatacaatttaaaattaactgaaattcggaattaaaaataagcaatattaaaagaaggatccatataataacccaatacgagattaattaaaattcagaataaagaaataaaataatatccaaaattagaaaaactaaaagagagttcaagtaagaatacaattttgaaacaactaaaattcaaaaataaaaaataaaaatattaaaagaatgctatatggtattaaataatttttttaaaaaataaattctaaaataagaaaaataaaaaatatttcaattaggaatacaatttataaataactaaaattggtgataaaaataaagactattgaaaaaaaagaccatataaaacatacgatgagataaattaagtaacaagcctataaaagagtagagtggtggcggttgatacgacatataaaaactattagtaaaacaccaaatagaatcttaataatgattaaaaggagggatgataggcaggccatgaagcaaacgtgtaagatggttgccggacttctagaaagtgaaaaaaaaaccccattgataatcatattcgattttcaaaatctcaatgacaataaaaaagagaagcagcgggcatgatgtataggattatagttccagagccaccgatggttggcgggacttctagaaaataaaaaatgaattgaaacgatagttatgttcgaatttcagaatcccaataacaataaagagtaggcggcgaatgggtcgtagaggagtatagtggcatcatttgacgtcacttctaaaaattataattaaaaaatgaaacccaacaagacaataaattgtaaaaactacaaggtccaatttttaaaggttcggaacttctaaaaagtaaaaaaaaaaacccaatgataatcatgtataattttaaaatctcaatgagaataaagaagggagacaccgggtgagccataaaggagtacaatggcaaagccactgacggtttggcgggacttatagaaagtaaaaaaataaacttgaacgataattatgttcgatttgtaaaattctaatgacaataaagagaaaagacagtggatgggccgtaaaggagtataatggcagcgtttgatgggacttccagaaattataaaaacgaaacccaacgagataataaactcaaaaaactataagatctaatttttaaaggtttcaagaagaataaatagaaatagtggtagaccgagcaagcaaataaaaaaggatatgacagaagtaacgggtagcagctggtataacttttaaaagctacgtaattagaaatatggggatgatacgtggatagctatttaataaattttaagtgaaatcatactgaaaaatatatgattttgtttgggtgctagccgcgcaattatgcgggccacccaactagttttaagaaagagctaattttttttggctgtttcatggtgagcaggcacacgcgagcacgagcaaggaggagaggaagtcgctgtgccggctgatcgacgcgcggaagctgacggcggaggcggcggcgcacgccgtccagaacgaccgcctccccgtgcgctccgtgctgcaggtgctcttctccgagcacggcaagctcaaccgcctcgccgagctcagcggcggtgcctcctccttcggcgcgcccagcccggcgtttgacctccccggcgcccgctgcccctccaagcgcgaggtgctcgcccagcaccacgagctccgccgcctccgcgaggacttcgcccgcctccaggtacggccatctccgccgccgctcgccgccgttcatcgattcgattcaaagctttttgaggtgttcgtcctcgtcttcgtcgcgacgtgcaggtccagtgcagcgcgctgcaggctcaggtggacaggctgagcacggagaggaggcggcgcggcggaggcggcagcggtggcggcggcgggttcttcaagtggagcacgttctggttcggcggcatgagcgccgacgtcgcgcgggtggaggactccgagagcggcatcgagcggcggacgccggcgagcgggaagaagggcaggggcggcgccgccggcgccgccgccgcgacgccgacgccgaaatggcgcaagtcgatgtcatgagaggatctgaaattctgaagccaaagctgatggctaagtgggtcgttaatctgttttactacctttaattacagtcagttacctttctgtctgaactattgtttgtggtgaaaccattcagataaatctgctcacttgagtgcataaataaatctgtgatgttctaaaaagagagggaagcatataagatttctggtttggtcgaggacgaaatggacttaagaatttagtttctcttcataaataaatcaacaaatagttgtacaacgccagtatgatcacataatagtgaccatgaacagtaaatgtctgtctcactagttgcagaaggaactctgcaaagctatgtatgcctcacttgagtactaacttattcagctacagaaaacaaaactagcaatttgacacgaatttaaacacacagatttgaagaataaacaggttgaaatgtgctgcatcatggtgcaaagaattgtttatttgttcactgctttcttgatggcttgcttgcacctggtgaggaacttgctgctgcttgtggacactgaatcttcatagccgtatctgccattgtcgtcgccgaccaccttgggcttcctgctcatgcactccacaccccttctcattccaaggatcttggaaggtgaggaaggcagagacctgaaacccctggagctgtcagaccttgggaaccagatcttcttctcctctcccctctccttgatctcaaagctgttcctgcacctgtcctgctgctcagtagcaccatcgccaccgacctcgacgatctcatcggagcattcggtgatctcattcctgcagctctcatcatcaattctgctttgcatttggtgctcgtctgaagcgatttcatcagcagtgttgtgatcttcagaagaatgatatgctgctgcaggatcttcttgctgctgctgatcctccatgagcatttgaagccacttatccacagttcctttgccggtgtggttcatgtttgcgtcgccttcggatcgaccgacgccttgccgatgaatcacattattctttttcaatagcaccgatttctctgcaggatatctaggtgttccatacatgccagttactctgtaaggaggacttggaggaactgaggatgtccttggcactgaaactgtctgagatctttcagtctcagactcacattgcaccatggctgctttgcccttgccattgccatctcttgacctcacaggagtgctagttgcccttgatccccttgatgacatggtcctttctctccttctgccgcgctgccgttctttgatcgccagatgctccagcttctccctcactgatgctcttcctctctcagtgtcaactgtgttgtcttccatggacctccttgggaagtttatcaccttgaaaggtgaattcctgaaatttcccattgttgaagtttcacctgcaatttcctcttcctctagggagatgtatgcatctgaagccctctggtcctcctccaggaaaaccctcagctcctgcttgagagggtttctgctcctcagtcttattcctggaaaatacttcaccctttcactgtgcctttcttctaagctgtgcctttcctctagcaatccatcatcgtcaacacgataccgcttccttgcttgatcggtgaaaggcttgatctgcttctccagttcatccttctgctggtacttcctccggagctcggtttcggatgagtcacacattgctctctgggcctcgagtctcgccatgagagtgctcgttgcagcttggttcatcctaagctgctccttgtacacaacagacctgcacattttgcaccacaatcaacaattagcacaaacaatcgacattgaaatcaactgcatgagagttcttggctcttgctgcatagattcatccttactggtgcatggcgtctctgatcatcttctccagcacagccttgtaattcgactgagcctccgccaagcggcggcacttctcgacgcgccgccgcctcttgatgaggagggcctccatgtcctggatggccacccgctcctcttcattcttctgcttcagctcagtggcctcgttctccagctcagtgagctcagcttgcttcttcttggcctcttccctttgcctcagcgagtccctagccgttgcaatggacaggtaagggttgctaatgtagccatcagcatccggattattgttctccttagtcgaat

SEQ ID NO: 4712 - DNA, 54967 bp, Oryza sativa
aatcccttatattatgggacggagggagtatagaatttggttctttgatacggtttttgatttgagaaccacctccttgtaggattggttagtctatcatgggatgatctcatgaactttggtgggatggccccatcctataatttgtattgcctatgcatacgtgcttatgaggggtggatggattttaggtggtgatggaccaacaagatcccatttcacaaaccaaacaatcttgtttggttccaacatgcattcatttagtgtggtttgataggctttcccaccttgttgagctgtggacactataaatcagcggttttgtttatgttagccacgtggaaatgacttgagttgtaatcaatgccatggaaaccattcgttttcatttactaagatatactgatcattaccatcgcttattaatgctcattggatgcaactttttttttgatataaccatgtttctgtaggcgaatggcgaagcgacggttgtgagtaattagcccaaatattcctctgggttaagttaataaaagttttggatgccagcccaattttgtgctaggtggagattagttgttgtaatgttcgatttcgccgacttaacctgtcagagatgtaaacagaaagtgttcaatctcatcatacttgcaataaagaatttgcatgcataactgcgcagttgcttgatgatcatgatgagttttaaggaaacaatacacatcaagctatgatcaggtggtttcatgttcatcattcgtaatggaaccaatatctgtgattggcaatgatacatcattgtaatattcagctgcttatgctctactcctttccattgtacttcatgtcagtctggagaagaaaggtgtacgtgattgctggacgtttgacctatgaatgttcaagtccattcagagaattattatataaagctctggtttatgcctaagtttgcagcttaaaatggaactttatcaggcaaggatgctctgtctcaggatctgtactctatgagtatgatcttttgataacgtggcagtttgaatcactcgatgtttttctcttttgggttgggcaaggatgtaacctaagatttcttagttgactacggttgttatcggatcactaagcttctctaatacttccttcattccaaaataaattattttttcacctatctcacacatcaacacaaaacttaaaagataagaatacttttactttatcaaatctcaatatagatattcttcactttatttatttttaatataattatttcttattttcacaaactctgatacatttacttaaaaaatgagtttattttaggataaatgaggagtcaaaaataaatttattataagatggggggagtaggttctagctggttgaaaactgtatcgatcagttgattccaaaggattagactgcctctattaaccctctggacggtctatgaaaactgtaatgaccagttgatgcaacaaatcatgtggtatttgagcttttatatgctggactagcagcagaaactgacaaaagtagttaaatgctaaaagtaaccggtggtgttcgaaactggtgagatgaagattaagtagatgcaaataaaataagaaagttattagtacatgattaattaaattaaattatcataaatttgataaatggatatatttgatattttaaagcaacttctgtataaaaaattttcgcacggaaaacaccatttagtagtttgaaaaacgtgctaattgaaattggggtaaaatccgaatcttaataagaaaagaatattgtttaaatatagataaaataattgaaaccatcaatgatgaccagtattgcatactgacgtaatcacatgcatttatattttacatgaaccgtcgaggtaccggttgtattcacgtcgtgttcatcgtcagaactcgccgttgtagtttctctctctatcgggaccacgtcattatcggtcacgttcttgctgttatgattttcttcgttgccaatatccatcatctatggacgagtcacatcgtgggacacatcctaccatcttacttactattattggttcaccgaagcaccagcatccatcttccctcctttttgtttctcgcttttggctaggaaagacgatgaacaatgcctgttgggtgctattgcttctttgtccaacctaaccatgctcctgaatcactcacataatattgaaaccatagtaatatgaatataataggaaaattctaatttatgttaatgaaacgggcacccgttcggaattaatggatcaaattttcatctatgagttaaagtaagctttttcaatttctagctaatttcatttgttttttcatttacaattttagttttagcactatttgatccactaaaaattatttttaacttataatttttctctgtattgaattatttatagctaaatgaaaaaaggggatttagttatataattgttttaatattaaattatcattccgaccaaacttatttgtggtttcatgtcgttatttttttattatatttctttcatcatttatgccgaattatgatatatgattttaatttatgtcaatgaaagttatctagaatctattacaatacacaaacgttatgctagtacatataaatattatatgtacgtatatgcaattttgctgtatatttatcaacaaattttctcctaaaaatttgacggatgtaattacagtacaatcgtaatgtaactagtatgtaactacaatgcaacttgtatgtaacttttacataattttgaaccgttagatttgtttcaagatttgtgcaactaaagaaggaaaaatgtcattgcgcgcatatatgcaagaggattcgttcccacgacctcttcaccgaaatagcatgttacgaagaaatttttgaaagtgatatacaagttacatataagatacggtgtaattagatcatgattatactataattatatttgtcaaatttttagaaaatttgacgaacaatgccccacgacacgcggtgtccgcgtcatcttccggaacggcaaaaatatagtcctatcacttttccggcggcaaccccaatttggcaactcccgagtctccgacacaatgccaaattgcttaatttcccttgcccggccggctgctcccacactcccacactcccaccttaccaacccacgccaccctgctacgcccaccgccacagccgccacacccaaacccaacacacctcccgacccgacccgccccgccccccacctcacacttcaccatcagtactctggcactctgccactgccgatctcgctcgcgcgagcattcacgtcgtcgctaccgaaggaggaggaggaggagatgacgctcctgtgcgtgccgctggtggcccgcacggtggaggcgatgcgggccgacgcggccgcggccgctgccgccggcgccgacctcgtcgagatccggctcgacttcatcggcagcaagttccgcccgcgggaggatctcccgcgcctgctccgcggctgcccgctccccgccatcgtcacctacaggtcagaaccccggccctctcccgctcttgctaccctaccgtacgtcgtgctctctcaggcagctaccgcgcaccgcgcgctggactggtttgatacaggatttgcgtccatttagcgcgtgttcatatgcacagcttgcaagttgcaacgtttcgagtgtttcagcttaccatgcatgattattcctgctttgctttgcttttggggttgtatacatttttcgggatggattttgggcgctccctgtttttttcccttttcttttgaatttttagcacagattatttactcaatgcttttaaaagtgtgatttctctaatgcttttaattagtacttatgcggctagactgcgttcgtttgaaacgattgggatctttttcctttcccacgtaaaccacataaaccggaacagtgtatgattaattaggtattggtttaaaatatattaatatgattttgtaagcaacttttacgtagaatttttttaagaaaataacatttaccacctcgtaaaaagtttgcgtggaaaataagaaagtagtagttaaaaaaagtgaagcgaaacatacctgatgaaccctgagttcatctcgacactcaaggctgttgttggcccgatctttcggtgagttgtgataactacgatttgggagaaacgttgacgatccgactacaactgtacaaaaccgttgcgttgcgccttagcgatcgatacacctctccgtgggttgttgatcttgccggtgcagatcaaccttattcctgcaagctatcgagaacaagcaagaacaagatataaagcaactgaattgctagatagacaagacgcacaaagataaattgatacacgataaagtggggttccgaacaagcagacggacggtctagccgacacgcgcgctgcaagcgaagtagcaatggctaaacttacaattaatcaaaacccgcgaaactctgaaggggtacctaactatttaaagagataggaggacgaccaagggcactctagggtcgtgctccacctggttggggcgcaccccacttgggccccacttgggccagggtcccaaacgaagttacaagcccaaaggcccatgacaggtgacgcagcaccttgtttgttcatccgcggatgactaggatggaatttggcgatgaggctggatccattggaaagaggactccgtaggctttccatcaagtactcacgggccaaaaacggaggtcgtatgcagattcggcggccgtttgaaatcaacagtgcagcaggtggccgaatcggattccagcacttggagaccttgatcttgatgtcttcttgttcacgcattatgtgagcaatggttgtatccgtagtagccatggtcacatcagtacccgaggaagatccaagctttttctaactatttctttaggcggtgcagagaggatacgacaagaaaaataaaacggcaacttgactaaagagtgaacaattttattccttaatgctggccatatacatattataagagtcacgagctccctcaggaatcaaacactttgtagtttgtactctagtatttcctatactcactccgtcactcgtcaatacaatataggttaattcttcatgagacttgatatagtttttagtactgcgatttgtttcaacaagatgagtttgcgccaaggtacgatgccgtcgatgcgtactagatacatataaagatttcgcctgcttttctaccacatccagaagttgaatttagaagagtttgattttgaagtcattttatgaaaacaattttttaatataggctttcaaaccgctaataaaaatattaaaccatatttttgtttgcttcttttcacgtacatgtcagctgtggttttgaacaatcaaagtcgtatgtacccctgcattcttaaaaaatcaattctaattataaacctagatatatgcgtgtcaggtttgtatatagggttttatcttcttttagaacagactagtaggcacaaataatctaagcgaacaactagcatgtattttatttacagtacgtgacacttctgctctatccgctattagtagtacttttttttttagaactggtattagtactatttctactttttttttttcgcattgcatgtttcacatgtgcacaggcagttgtggcagtcagagtgtgttgggacttgggagagttgtactgggagggaggcagtgtcaagtgaggctatgcgatctgcgatactataagcttgtatatgttcggttgttcactttatcatcattttaactttgctaaattttgataggggtaataatctaaaacaaaatcttagcaatatcattctaccaaaaattagtatactataatagtacggacatgctgttgttatctctgccatgggagtacctatacatctttcgaaagatttttataatcgtatcacacagatttttaatctttgtattaaaatctgatagatataataaaaagcaaaaagcaattaagaaacaccataatgaacattaaattaccatatcctcaagaaaaagaccaaatcaaatataaaatttaaaatttacatgtgaagattcaaaaattacagtgtaacttacaaaagttacagtgtaagtttcataaattacactataacttacaagaaaatgcactgtaaatttgagtgagaaaatcgagtgagagataagaaaaaatctttcgagtgagatatagcaaaatcgctctgccattgctttttaattgcacggttagttttttcatggcgtgttttgattgcgggggcaggaaggcccatatcaggcccaaattcattcagtctggcggtcatgaagttctgaagctacgggaatggcgacgaactaatcgtgagatagataattctgccgattcctgtcgcatatgcttcccgaagaacaacgagcacatgctttgttgcgatcaaagagaagaaatactgcatatgcgtatggtgctatagcttcatgatcaaacttgtatctacgaggcaacggcgttaaaaattaaaaatcaaatgggatagtagataagatatacaattcgtgatactcgaggtaacaaggctaattatttatctggtcaagatagagagttctccggttggtccatgcgcagtagaaagagagagcgaagcaaacactcaaacagcagctacactgctacagtgctacagcaggcggcaataagggaaaaaactggaggcgacacgtccgaatcggacgaccacgtcatcatgacgtcatcctgcatacataagtgaactttaaactatttttttctcttaaattatttatccaaatcatgatccgattgcaccattaaatttattgcaattaaatctttaaaacaagaccacacatgaatataatccgatgaacttttttaagcttattattgaattatttttaataaatgttgcacgctgttgcactaagtatatggaattgttttactaagtagatcgaaaatgtttcatcggacgctgtttcaccttatatgaaaacaatgtttcagcgaatagcgaaatgatgtttcaattcactgcaacatttgattcatacatagtgaaacaataagtaaattacgtgaacttttttgtggaaaaaaatgaaatggattcccttaatagagggtttctataatatgtgggtaatttgttacaaaagaattgtttcaattcactgcaacatttgatccatacatagtgaaacattatgagtacattatagagggtttccataatatgtgggtgatttgttgcaacggcgtgtatggtggggacacgtggcgggagcagcgcggggacatgtggcgggtagggcgcgcgcgcgggagggcatgacgtgtggcgcccgattttactccccacgtcgagcgcccgattctaggcattcctaaaaagaaataataaaaaaaaggagtacacttattcggatttgtaacataacgatatctagggatgaaaatggggcgggtatattccaaccgcccgccctacccgaggctcacaggaggaatatgggagaaaaaatgggatacccaatactatccaagttcgaatccgaattcgttagaaaatatgggttaggatacgggaaaacatgtatccgcccgcataccccatattataaaatatatatgaaaatctattataaatccacttacaaacatgataaaagattggttaatcactattttttatgagctcacatgtaatattgcataatttttctcttgatgtatctcttttaatactttaattaccttattatgtttaatatctatgaattagagatacaaatagatatccgtttccgaatccgatttgatgaaaataatatgggatagaatacgagatgagtgatatattatccgtcactaaccgtacccgactccgagtttaaagaaaaatatgggttaggatatgggaatgccataatccgaccgtatccgcccgttttcacccctgtcgatatccaatcttagattgctgtattttgagacgaagaaagcagctcaggttctcttatcctgttttgccaccatgctcacgcggcaaagaactggcaccaatcaatgagaggagaggaagcagacatatactccctccatttatttttggctgctcctatttatctcaaaataagttcttttttagataaacattacatcggtatttgtgaaagtagaggccagataaatgcattgggagcagataaagtgcaaataattgaattagaatttgataaagtggatgtattctagtcttttcagttttatgttgatatgtgtgagattggtgaaaaatgaacttattctgagaaagtattatgtaagaagttgaagcaaacttatcagtttgacatcttcggcagcctaatccatggcatctgcgcgaggcgtctctacttggccggtgcaaagtaattttcgtgtagttttaactttaatgatagcgccatctatgattataaaaagttttatcttaaaatatatttctactcttataaaaattgaagaagtttttatcggtactttggaacgttttctgtgtatgagtcggtttttaagttcgttcgcttttgaaaataaaggagtcatataagaagcctctttaaaaacactcgcatgctagcttgagacaatcggactcctaaatacagctcatgattttttttaaaatatatatatatatatatatctaagcgaattactacagtgaatttcatctcaactaaacaatatagcaataataagattaaaataaacttcacccgttgcaacacacgggcattttttctagtcttgtataaagagtaaaaaaaagagatgttattaagaagtaaagtgccattttcaatagtttggaggataaaaaatatttcagagattaagtgatctagctattggattagtttgggtagtaaaatggattttgttttttcttttctaagctcccatataagcacctagcattggagatggcctaagcgcacactgctacccttaacagctataattattttggcaattaacaattacttaattccctatttcatattgtagatgctgatcatagtaacagtattaccaatggcagtgaaaccatttctttttgtcaagacttgtgtcataacaacatatcaggataaatagggcaaatgtagcaatgacatggctaatagttggtaacaacatgttattgcaccagttgcttatcccagagcgtgttactctacctatatacaagctaatccctccttcgaaaaatctgagatctatttctttttcatcaataccaataagcaattaactcactcaccatgtggcaaaacaaataaacatgcaattgatcaacaatttaatttagcacatagtaactataaataggacttagatttttagaaaaactaaagaatgaaataggtctcagatttttggaaagaggaagcactatgttactgcatgagcatggcatagttactacaatagtataggaccatattactgcacattctctacgcactcagtgaaagtaggcacgaggttattgagaaatccagcatgcatgctctttaagacatgatagaataggcaataatctatacctagctatcttttacaattgctaattccacaagttttgccacattggcctgctacatggctttgtgatctgaaataaacgagcaaattgatgtgagatccactagagaggagataagaaaaacataattctctctattaaaatatagagaacaacttggagaaaatttagttctctgtttttctgggggattatggagctgttgtgaatttgtgataacacattcttaaattttgtgggacattaaaactagcaaaagttgtaagcttatatttgttcctgaatatatagcttaatctatattgtttgactaagtttgaatatttattaatatgtgaataaattgttcaagatttcaagtagaaccacaaattttgaaaagtgcccagctaagaacctaaacccaatttatttgttcgtccttttccgattgagacaaggtgaaatcatttgtcgtttttgacaaggttggtgcttgctaaactagttgagaggacttgcgttcatcattacccttgacaagtggcataagatcgttcatcattacccttgacactctagaaattgatattatgctgggatttaaaaaaaaaaggtccacgtaaacagaatgaccagacttatttgattctctcttctttatatttatcttttcaatttctgtgctttaattgatttactatgcaatgcaggtacatttgttttacttcacaatgttgctccccactttgtagttgttggttatatttatataactactgcatattagattcaccgttatgctttgcataaatgacatttgtatgtgcatatttcttttgcagacccaattgggaaggaggccaatatgaaggtgatgatgctacaagatttgaagcactccgtttagcaatggagctaggagtaaattatgtcgatattgaattgaaggtttgttacctcaaataagttaaactgttacgctgttcccagttaatatgtaatattgtaagcatccttagatttcaaattgattagtgcccactatttttcaaaatgcataacacattgtattaaaaacgattctgaaaaatgccttcttttcatggttaaaccccaccactactttttccttttatttgtggaacacaagtgcatccacattgcctccatttttcattctaccacaatatgactaatttgagcatgaaaatgtggcctgtacataactttgaaaatgagttttgagtaaatttggaatatcatgttgtagcttcatagctggaggtacaaatatgacactcattcatgcattatggatggtgcaattttaatatttttatgtattttaatattcagttctattgctcatgacaagatagatcattcctcttaagttcaaattgaatccatttgtcaatcatactattttattctttagagtctagctgccatttggccatcgcattaggaaggttaactaaaatataacactgaagggggaaatctattttaaaaacgtccaatgaatactcaatacatcgttcttatgctcatgtggtttcttttaagatgctctggaatgaaattgtaaaaagttccttttgtaattacttaataaacttgaagtcaaaaaattcatgttttccatttgttcctttagggaacacaccaaatatatttttttttgcatctttatgttaagtaaggagagcaaacaaacaataaaaaatttggaaaaaaaagtaacatgtaactgttcaagacaaaaatgccaacctaaaaaaagaaaaaaaaacacaaggtagctctagccaatagtttttcgggacgattcttcagtttttattcttgtatctcttatctcatactctatatgtttcatattataagatgttttaactttttcctaagtcaaacctttttaagtttatagagaaatattgcaacatttataacaaaatattaacactatcaaatatattcattgttagatttaatgaaactaatttggtgttgtaaatattgctaatttttcaataagcttgatcaaacttaaatatgtttgactcggaaaaaaagatcaaaactcttataatatgaaacagaaggagtatatgttttggaacacaatgcaaacctagttttaagcaatttaaaaagccaaatgctttaatataatttaattttcaccaatcatctagccatgtaggctctatgcctcatttatctaagtacatgattaggactgtatgggggcacatttgtatcttcattagccactaggcatttacatacataacggcatgcatactatatgtactaaccaagtttatttttcttgtaggttgctgacaaatttatcagctttatttatgggagtaagccagagaagtgcaaacttattgtctcggcacataattatgaaagtactccatcctgtgaggagcttgcagatcttgtggctagaatacaagcagttggagctgatatagtgaaaatcgcaacaacagctaatgacattgttgatgtgtcacagatgttccaagtgatggtgcactgccaagtaagtgtcattttataaaatccaagaaatgctttcacttttctacatggaaacttgcatgtcacctatcttgtatagttgtcccagtacatcttgcctctagcccactactactgcatgccccctttagattcttttttttttaaaaaaataaaggaagctattcagatccatgatgtttttgaattattgcacatgtcaaaactttgtgtaatggtccctaaggcctgtaaacatcactcggcatgggggattttctatggtttggaagtattttttaagtgaaaaacattaggatttgtaatttaattttagcatgttggctttcagaaaattgtatttcacaaattgtacttcagctaagctacatgagaactacaccaatctaaccctattttttttataaataggtcctttcaaaaacttatttcaaagctagaccgtgcaaaaaaacttaccaaaaatagaccgtcggctcaacgccaaccgcctttgcgctgaggttacactgatcagcgccgactcccttgccaatgtggcagccgagccaatcccctcgtctacatggcaggggctcaacaccaaccgcattggcgctaagctactaatctcagtgccaatttctggtgctgagctttgggacttagctgctcgcagttgggccacccaacacaactcatatgttgggcggcccagaggcgctgagccgtcaaatctcagtgccaacgtaattggcaatgaccctaaagatctcagtgccaactaattcggcgctaagttttgtgacttagtcgctcaccacaggcccgctcaacacagctcctgtgttgggctctgccctgatgcgagggttcaacgccaatacccgaggcaagccatggtgtacttgatagatgcattggactccttcacatgaaacatggatgcacccggatagagtagctctgcagccatattttcaagtcttccatagattgaaattccaaccccgttctcgattcctcccctatggcatcgatggttccatcttattgtggatccccatcggcaactgcgagcccatcattgctaagatccttgaattgagtgatttccggattgcgaccaacgattttctcaaacactctcctctcttcctctgacatcttgcccattggacgatcgtcattggagttagaagcatactcatccacatcatcatctgaatgcacattcaacaaatccatgttcaatccattaaataccatagcctcctcacactcctgtcgggtgtaaatttttcttcaaagcaattctctgatgtatgaagccatctgcctatcatcaagttcaactttcatctcattctcaacttgattcacatctaggccaacatctgacaaatcctcccctacctccacttcatcctcaacgggtacttccccctacctccatatcctcctcaacctgtacttcctgccctacctccacatcttccacaattaattattccttccgatccgcgacaaacatatcgttcttcggttcatgacagtacagggggattctatgcgcgaactttaattgaggtctaaaaattcattctccgatttgctgcgctctttcttccaagcaaacatctcaagcgatttgaattgtgaccctagtactatatctacatatgtttcccattccacctctctattcaagtctaacataaaattatgtgatatgggacctgcgcccacattgtatcttcctttcataccaaccgactcatcactccaatccaattcatctttcgtgcgggactttaactcttcaaatgtggatttggcatgaaacactaactatctaacagtctcccccgcaaattggcttccaccagtactttcatctaccacacagctaccaatctattcatctacaatgtgtaatcaataaataaaaataaagtatttcagaatagctgataaatgccacgccaatcccaaaactatcaaacctaagaacgttcaaatgtttcaaaaaaaaaccctaacaacgtatactaatctatccatccaatatgtaaccgataaataaaaataaagtatttcaaaataactgattaatgccacgccaatcccaaaactaacaaacctaagaacgttcaaatgttttaaataaaatctaacaacgtacaaattataaattaccactaaccccaccactaagtcctaatgttttaaaaaacacatgaatcatagtacaacttaactttcaaactcctacaaattgcctaaaacaaatcatttatctcgggttacaaccacacatctaaccctagccatcatcacacattcaaaatataggttcagaaatttacaaatcaacattaatcaaccgaagcaacatcaatatggaacttccacactaatcacgacccagacaacccaactaacaatagatcacgagccacattcctcaaatcatggttagaaccaaaacaaccaaaatacataataaaatgttcaagaaattagggttttcgagggagtttatctttaaactcgaccccacactcaatccttacgaaatcccatttgattttgtgtggatttggagagatttggggaagggaggagagagaacttggcgtcgtcacacgagcactaggggagaggaaaggagaggagaggaagaagagatgttgggttgttgcggcctcgtgtcgcccttagtaacctagctcaacgccaacacggccggcgctgaggttagacggttcagccccaaggcggttggcactgagaccctgccacgtagacgaggggattgcctcgactgtcatgttggcagggggttcagcaccaacagccctggcacgagccgtctagccttagcgccaagacagttggtgctgagccaacggcctattttttgttgaagttttttgcacggtctaatttcaaaataacttttcgaaaaaccaattggttagaaaaaatggaattgaacctgttaaacgaaagaaaaaaatatataaccccttttgttctcatgttctttccatattcgagtctccgtaatccctattttcctagtgaaagcaactaaaacaatgtgaatttacgatgggactagttcagccttattaaacctttatgtgttgaggagattcttaagaagaaaaaaacactaagctcatggaaaagttgtgctcttttcttagcttattcattcttgttgtatttcatcaagtttggtgttattatattaggaggtatgcaatagtatgtgggataatgtcgtaatatgtctgacttgtacttttatgttatttttcctctaatccataccattttgtattaacttccatttgactgaccagtagaaatggaaatgacaggtgcctatgattggactagttatgggcgaaaaaggtttaatgtcaagggtgttatcccccaagtttgggggatatctaacctttgggagtcttgatgctacaaaggtatcagcacctgggcagccaaccgtcgaagagctgatagacatttatgatataaggcgcataggacctgatacaaaggttctcggtgttatagccaacccagtaaaacagagcaagagcccagttttgcacaatacatgtcttcaatctgttggatacaatgctgtttatcttccacttttggcagacaacattgctagatttcttagcacatattcgtctccggatttttcaggattcaggtactaatttcaaaaagtagaaataattactttactatttcttggaattggatggactaattttttctaggagttggatatactagatttaagtggtattgactctcaagggaccacatgaataaggattgttgtaattttttgataaatcatacatgagggatcccccaatctgatgtcttccttagacaaacctcattcgtacaaacctcacctaatgaatcccttgttagttttcatgggaaaaattcagctatatatatttttcctggcagctctttgactgggtatgaataattggtttgtacagtcatatcatcactgactgtccacatgtgacatactcaaattgtggaaatcacagcgaaaaatccacacaaaaaacccacccaacccgcagttagagcatcaccaagagactctccatccaactctctaagctaaattttagccaacatagcaaaaaatagtactgaacatgtgaaacggccactccccctcccttgtctaggtctgttactgtgattcttttacatttcccttgatattctaacatttacagagtacttactgaacatagctttgcacatatttttacaaatatatggaaacaactccttaaaaatgaactgagcctacatctgattatgcttagggaagatgacagacccttgtttgaatcatggataattacttgtaatctaggtccctctgcgatgtttttaatttatttcccttttgtaaataactcttttatataattgaaataaaccataggggcttttccactgtttgatggtaaaaaattttttaaataagttttgcacattctgggagagagctcagaatagatattttagtttgacggtaaacaagaatccagtttgctgaaagtaaccagacttttggtaattcagatagcacaaattcatttttgtggaagccttctgttagtatatagttcctctgggtatggaagatgaaacattgaccactcttttctattttaatatgtctgttgattccaatagagttatgatgtaatgaaagcactgttcaagacacatctagaaatctgattttcatataaatattcaaatatacatcgatgtatttaattatacgacgattctagttttagttatttgacttgatgtatgttcaaactactacttttgacaactggagggggtatttcacaagaacaaatttgagcggtatatgactttatgtaatgcagttgttctcttccttttaaagttgatgccgtacagtgttgtcatgaacatgatccagttgctaaggtaccttgatgtgtggtacactttctctaattgcttacttgatttaattaattacttacctttttagacttatttaacctgacatttcttcaatctgcagtcaataggtgccataagcactataattaggaggccagatggcaaactactgggctacaataatgactacattggagcaatttgtgccattgaggatggcataggaggttttttataatcttaatcctgaaacaatcgttcaactgttttttcggagtcatgggaaaaaagtagctgataatttacatttcacaggtccaggatcaaagaatgctgccgtcacacctttggctggcaggcttcttgttgttgtaggtgctggtggagctggcaaggcaattgcttacggggcaaaggagaagggtgcaagaattgtagtagcaaatcgtacctacggtaaggttttttttgtatttgtttctgagacaaaatgttctatgttggctgcagttattcaattattcatatgcaaagcataattcattttattagtgtaaagtattggaagttctgtactcattatgccgctcagacaatgatcaatgctgaaatatgggaagatatattgcatccatttatatccatgtttgtatcattgtcatgggtgatttttgttccatcaattcttgtttcgcactagttataaagctcaaagctgatcatatttgagtacgtacatcatttaatatgataattttcttgtgttcttcagaaaaagcagtaagtcttgctgccgcggttggtggtcatgccctgagattagccgagcttgaaactttcaggcctgaagaagggatgatccttgctaatgcaacatcgttgggaatgtaccccaatgtggatggcacccctattccaaaggtctctttcttacacgcacgccatgttaatattctgtaagacggaatatactcaacacaataatctattgccagatagcgggagtacatatataggttaggccttctatatctctaccaacttataaaattagaatcgggagtacagaaggaatccgaacctaattacaggaagtagcaataacaaactcttaacatatatattccagctataaactggtggaaccctcccttctactctgttaccatctttaatttcaattaatcttggcatgctctctaattagcacatttgatactaccttgatatacctgtccgctcattgcggccacaatattttccatttgtatgtgcagcaagcactaagcttctacgatgttgtgttcgatgcggtatatgctccgaaagtcacccggcttctacgagaagcagaagaatgtggggttaaagttgtcagcggtgtggagatgtttctcagacaagccttgggtcagttcgagcgtttcacaaatggtattgaaggtattgtgtccttctaacttatatcatacactttgttatgccaaatgctatcacccattcctctttctgataatctactttctacagctcctgaaagcctgatgcgtgaggtattagcaaaacacacataacaggttcgttcttcagcttttgccttttcatttctattcttctagtcgtagtgatgatggtttagtatatttattagattctgttgtatcatttgcattgaagacgttctctaacaccatgccaaaaccacaagggcaagatgtttttgtaaaccaactaaccaaccgatagaattaatatagtttaaacgccaaactatatataatgccaataatgtttaactattggttgtaggatttgattcttagtgtggtttttttatttgagaacctccttgtaggattaattggttggtctatcatggatcacgccatgaactttggcgggatggtcctgtcccttaatttgtattgcctccggtttctaatagttgacaacattgattttttttacgcttgtttaacaatttgtcttattaaaaaattacataattattatctattttgttgtaacttggtcattaaaggtatttaagcatgacttgcattttcataattttgcaaaaagaaattaaataagatgagtgaccaaacgtatgtgaaaaattcaatgtcgtcgagaaattattgcctatgcctacgtggagggatttaggtggtgatggagcaaaaagattccatttcacaaaccaaacattcaattagtttactgtggttatggtgatctttcttacctagttgaattgtggtcacttagagcacccgcaatggtaaagtaaggtgctctctataaaacatgtacatctcagcaatagattagattaatagtaaaccgcttcaatagtgtgtctacatgggtatctatagctctctaatatattgcctcgtttttctctatagactatctccaagttagtagatagctttgctctctctcttcatttagtctcttccatatagtaaaatatgctgacatgaatatcttgtagagagcatatagataaccattgtgggtgcccttatatatctgcagtttgtttaggttggccatgtggaaatgacttgagttgtaaataaattctgtggagaccatttccttttatttatttatttactaaggtagtaccttagcctattatattagcgctcattggaatcaacttgttttgatataagtgtttgtgtagggctgtaggcgaatggggaagcgggaacggttgtgagtaattatagcccaagtattcctctgggttaagttaacaaaagttttggatgccagttttgtcctcggttggagattctttgttgtaacgttaatttctccgacttgtcgcctgtcagagatgtaaacagaaaatgctaagtgttcaatctcatcgtacttgcaataaattaagaacttgcatccatgactatgcagtttgcatgatgatcatgatgggcttcaaagaaactaataaagcatcaagctatacgatcagatggttccatgttcatcacgtaagattacacctgtcgacttgcttgctactaaaatatataatactagcaaaagtgcccgtatgttgcaacgggaagaaaaaagagaaaattgaattcaaacatattaaattctaattaattgaaatataaattttttggaatatttgggtatttttaagtaggtaggtatataattaaattaatttataagtaaactaagtgtgagaaataaaatgatatggttgcatttattttttattaaattctccatattaattacactctttgaaattttcttgaaatttacagagcttaattgttaattttgataatacaaactaaacatcattttagcatttatttaaataaaaaacattctttctctatgggccatttttagcccattttcttcttcagcccgcaaccgagccgtcccacttttctcaggccgcaaggtattaaagtctaactaacatctccatactcctctcagttccacgtttgtgatggactgtcggcccgcatgcggctcaagtgtcaccgtgtggtgatggaggcctgcccaacactcgatcgatctgagccgttcgtttcgatggacaacaaccccagtgcaaccctaaccctagaatcattctccccccacccttccccaccacaccatcggccgcctcctcccgcccgacgccgccttcccccgcccgacgcagcctccccccaccggcgccgcatctccccctcctctcacccctctggcggcgccacttcctctccactctccctccggtggtgctgctccctctccccctttccctcctgtctcaccggcatggcgcggcgacggcggggtacggtggagatggcagcgacggccgtccctccccctctccttctccccatcggcctcgatggccgtccctccctctcagcctcaagatccggcggcgtcctcccaacggcggtggcttcccgcggccggatccgataccggcggcttcctgcggtggatccagcgatgacgtagacatcaccgatccggcttcaccgatggcgccgacagcttcccgtggatggatttaccgcgtcacatgtaatcggattcgattttatttttcgccccattttttcgcccgagtttgtttctttttttgaatcggacagatttaattttttttcgtctttttttcgcggatggaggtggccattgcaggcggcggcgtggaggcgacactcacctccccttcctccctccacgctcctggatatggccggaggaggggagcgatggtgggggcggccactgcaggtgatggaggtggagctcctccctccctccctagcttccagtgttggatagtatagaagagaccgaagcttggcatagtacacttgctcgaagacgattcatcccatgaagacgtgtcgcagatgggcgcttgattgggtgatcaggccaaccacgcacagtacgacactggagtgagagatgccgcgtagaccgtagtcgatcacggcattgtcgaggaaatcgttgtagccgagctcttgaacggtgattaagtcaaagttgcgcggggctagacgacgaagacggagcagaattaatgctgatgtcggggacacgaagagtcgacgacgcaaacccgttcattgaagggaaaaaaaaaacaaaaaggtacagcaagcgcagcacagtaaccagcccatagtgctccatggtctatagaccaagtccatgtcctgtcgaaacccagtcagccgaccccatatggccatatcagccttagggcatctccaatgtttatgatcatgagtagcattaaggtgtgtctcactatttttatggttattaccacaatgtttgaagcaagagtaaactttaagatgggtcccacaatgtactattctagtacttcttttatcagccatgcaaatttttcatcatcacattcattttaccctattattttattgcttgtggtcaagccataagcttaaagctttcttttgcatttaatgccttatggctttgtttcacaatgtatatggtcactataaaatcttatggcctcttcttatggccacattgtggctgcccttatcctcccacgacctactccatgtctccatccatgtgtgaacactgaacaccgtggctgctggcggcttggcgcagcacgtcagcaacggcgggaggcggtggaggccatgggcgctcgtcgtcgtggagccgttcttcagatccggacaggggcggctgaggcgtgtggagaggcagttgttccccagcggcgacgtgggagagacggccggcggggaggtcgtcgaggcgggatctggctggaggagggagccacggtggcggaggcggcgctccctcccctccctcccagatctggccggaggggggagggcggcggcagcggtggtcccagcgatggcggcgcgcgttgtctactgttgctcgggcgcacgcgctgcgtcaagctcgtgccgccaccacatcgcgtctgtcagtccaaggtgcatctcgcctcatgttcatgccggtaccggagttctcatgtttcatgttgcaatgcaattttattggggtggattggagttctctcatggatccctctgctgattttatttgggtggattagagtccaatttgacaattcaaagttctctttatcatattcgcgtacgaattggaaatttggaaacgggctagctgccgaacgacttggttttttttttttggaacagacggtatatgcgattttttttttaatttaggcctatgggcttaatctcaaactggagtaggaatcggtgtgggtttcttttttgcgtgacaattgggcgcgctttttttatgcgatctaaccaaatctgatccgaaacaaatttttttgctatatatttgttgacaaattttatcccaaaaaattgacagatgtaattacagtacaatcgtagtttaattacactgtaacttgcatgtaattacactgcagttatcgtagtgttattacactgtaacttgcatgtaattacgctgcagttatcgtagtgttattacactgtaacttgcatgtaattacactgtaactacagtgtaacttgtatgtaactttcaaaaatctttctgtaatattttatttcggtaaaatggaggctgtgggaacaaatccttacacatatgtgtgtgctgtgattttttatttaacgattcaaaattacgtgaaacttatatacaagttatacggtagttacatgcaagttacagcgtaattacatataagttacactgtaattacatataagttacagtataattacactacgattgtactataattacacctatcaaatttttagaagaaaatttgtcgacaaatgtataggtggtcccgatccgaaatcggatgcggtggaaaaaatagcgccagattagaaatcggaaaaacgcggtgatggacgaaaaaatgcggatcagaggatgagacgattggaaaaatagcaatatttatattagttaagatatgactagaaaatgggcgtgcttgtgatttttagcccgtaggtattgctaagtgctagtatttcaagatttatagtgtcatattattttaggaattagtttagttatatattgggttaaacctatccaagtgttgagcatggccaaaaacttctaaggtccttgatgtaaaatctatcattaaattgtagttctactattaggcgcgctcctaatattacaagcgccaaacatgcatcagctcaggcccaccccaccccatgtcccagcccaggcccaccccaccccatgtcccgttatcccactcccaccattgtcggagtaaacgattgtcggtgacatggggccgggggtatcgtgactagaggcttgggtagccgcgatcactcacgtggcccgaccccctcggggggggggggggggtcgggcccgacggtgacgtggccacctctccctctgtctccccgaggggtcgggccggtcccgtttcggccccgagggctggggcaccccgaccccctgtggtgattggcgccacgtgtgtgggttaggtgagcacagcggcgctcacctaaccgcatttatagcgggttagacgagcgcgtcacgccgcattcaatgcggcgcagcgcatgcttatccggtctgtgaccagtcgcggtatgtgaccggtcacagaccggtcagatcgcgggttaggtggcaacaggcggcctgtcgcacgcctcgccccgtcccgtcggaatgatgagagcttcctggttctcgtctctagccggagctggcgtgctgactcctggagttggtatgtcagtcccggtcagatccattccaggcttcagtgcaagcatggcaagaaaatcgctggccattgaatgaagtatgaaacgggcgtccaccgggagagctgacgagcggagcaggaggcgtgtgtactgcttgtcagaggtcatttccggctgtagattagccctcattgtaaaaaacatgtttcttttcttaggcagagagaggcccatgtggtgacccctaaccagataaaaaaaggaggcccaggcctaaggagagaaaaaagggggggggaggtgagaggctggccacttgattggagagcctgaactctctctcgctctagagctctctggctctggagctctctgttttccttcacacacagatccaccagaacacaggagtagggtattacgcttctcagcggcccgaacctgtctacgtggcccgtgtcttgtgcgcttcttctcgctgacattcctcagatcgagggcgaagaacctcacttagcgcccccggccgaaccggcaaaggggggcctgcgcgttctcccggtgaggagccccacgctccgtcatctggcgcgccaggtagggggcgcgcgtgtctttcgaagccctcgtcctctttcgtgtgcgccaagcttcgcccgctcagcccaatggccgaacgggcagtggcgcacagcctctctccgaacgctagcggtgtcgacggggagcagaacccgcgccgtcgggctcgcaccccaccgtccccctctcgccgaaatcttgggcgggggaggcgctcagggaggtcggaggacacgcgacttcgccactcgcggtcgacgggggaggacggcgagacggagcgcgtcgccgcctcgtctacggcgatggcggtacgccccagggcgcgctccaggctgcgggcgcgctcctgcgtcacccgcccgtcgtccccgatccagagactccagcccgacgttggctggatgacgtggccgacttggtcatgacggcgcagcagcgactaggcgccggcgggcggtcctccgccaccgaggcctctggcgcagccgccgccggctccaagtcgtcgaggcggagggcgcggcgagcggcggccgttacccgccattcgtccgccattccctcgtcaatgcctccaacccaagaagatgtgcgtggggggccggatgcccgcctcgatatcgagcgccagcgcgacgctcgtcacgccgcccgcgcaacggagggcgcttcctcgtccggagcgccgcttcggtctgggcactggtccggccccccgtgtccccggttggcggtgccggctgtcgagcctttgtggcgagccttcggaacgtccgttggcccccaaggttccggcccaccatcaccgaaaaatacgacggaagcgtcaaccccgccaagtttctccagatctacacgaccgggatcgaggccgccgggggtgacgacagggtcatggctaatttcttccccgcgtcggtccactcttgggagaatttgtgccaagcagttcaccacgaacttccagggcacatatccgcgcccaggcgaagaagcggacttgcacgcggtacagcgaagggacgatgagtctcttcgctcgtacattcagcggttctgtcaagtccgcaacaccataccgtgcatccccgcacacgcggtgatctacgcgttcagggggggcgtgcggcacaaccgcatgctcgagaagatcgcctccaaggagccccagaccaccgcgcagctttttgagctcgcggaccgtgtggctcgcaaggaggaggcctggacctggaactcctccggttctggtgtggcagcttcggccgcccccgggtccgccgctcggtcagggcggcgggacaggaggaggaagaaggggtcggcccgtttcgacgacgagggtcatgtcctcgccgtcgagggcgcttcgcgggccccccgaaaggggaggcctgcgagcgacaaaaagaaggaggccggcgctcccagcagggagcgcccgaccggcaagtggtgtaccgtgcacaacacctccctccacgacctcgcggactgccgcgcggtcaaaagtttggctgagcggacgaggaagtgggaggaggagaagaggcaggagcgccgtgagggcaagaccctggcggctcccgccggcaaccggcgaggtgaggccaagcagaaggccatcgccgaggacatcgacgatggcgacgatgacctggggttccaggagcctgaggccaccgtcgccaccgtcgatgggggagcgtgcgctcacgcttctcgccggagcctcaaggccatgaagtgagagcttctggccgcggcccctaccatgaggcgacgcggcgggcgcggtggtcggaggttgcccttaccttcgaccagaccgaccacccgccgtgcgttgcccggggaggacagatcgcgatggtggtttcccccaccgtttgcaatgtgaagttggggcgtgtcctcatagacgggggtgcagccctcaacatcctttcccccgcggcctttgacgccatcaaggtcccggggatggtgctccggccgtcccagccgatcatcggtgtgacgccggggcacacctggccgctgggtcatattgacctcccggtcaccttcggtggttccgccaacttccgcacggagcgggtggacttcgatgtggcggacctcagtctgccctacaacgcggttctggggaggcccgcgttggtaaagttcatggcggcggtccactacgcctatctccagatgaagatgccgggccccagtggccccatcaccgtccatggcgacctcaaagtcgcgcttgcttgtatggagcaacgcgcggaccaccttgccgcggcgtccaagcccgcgggcggcgacgagaggctcagcacctccgtcccggccgccccaaggcggcggatggtcacgtgcgacgaggtcccggtcaaggaggttgtcctaggcgacggcccgtccaagaccacacgaatcggtggtcttctggacgataaataggaagacgcgctcgtctccttcctgcgggcaaacgccgacgtcttcgcctggagaccggcggacatgcccggggtccccagggaggtgattgagcaccgtcttgccgtgcagccgggcgcaaggccggtccggcagaaagtgcggcggcaggccccggaacgtcaagccttcatccgcgaggaggtggcgcgacttctggaggccggattcatccgtgaggtcatccatccggagtgactggcgaacccggtcgtcgttcccaaggcgaacggcaagcttcggatgtgcatcgactacaccgaccttaacaaggcatgtcctaaggacccttaccccctgccacgcatagatcagattgtcgactccaccgcggggtgcgaccttttgtgttttctagatgcatactctggttatcatcagattcgcatggctagggaggatgaggaaaaaactgcattcattacccccataggaacttattgttatacgacaatgcctttcgggttaaagaatgcaggtcctacttttcaacgtactactcgaatttctttgggtagccagataggacgcaatgttgaggcctatgttgatgacttggttgtgaagacgcgcaaccaagagaccttactctcggatctagcggaaactttcaaaagtctccgctccgcccgcataaagctgaaccccgataagtgcctgttcggcgtgcctgcgagcaagcttctcgggttcttggtctctgcccgaggcatcgaggccaaccccgagaagatacgagctatagagcggatgcgcccccccagcaagcttagggatgtgcagtgcgtcaccggctgcatggccgccctaagtcggttcatatcgaggctgggagagaaggcactacccctatttaagctcctcaaacgctccgggccgtttacctggacggaggaggctgagcggaccttcactcagttgaaagcgtacctcagttctcccccagtcctggtcgccccggagccagatgagccgttgctattctacctggcggcaaccccgcaggtggttagcgcggcgttggttgtggagcgcgacgaggacaaccctcaccccgtgcatccccaccctgtgtcgactcgacccgggagagagcagggaggagaggcccccgagccgaacggcggcccgaggcccccgacggccggagctggccctccgcctgcttgtccgacggtgccaggcgcccccgacccccaggatggccccggggccactgcgggaaggccgcgcctatcgccctctgaccccgaggtcgtcagcacagaagccgagtgcggggccgcgaggcctctcggacgaagagcgccctggagatgcggcccctggcgaagaggatcggccccgccgaaaggtgcagcggcccatctacttcgttagcgaggccctccgggacgccaagacccgataccctcaggcccagaagatgctttacgctattctgatggcttcgaggaagctgcgccattacttccaggcgcatcgggtcacggtggttacgtcttaccccctcggccaaatcttgcataaccgagagggtactggacgggtggtgagatgggcaatcgaactctctgaattcgatttgcgctttgaaccacgccacacgatcaagagccaggccctcgccgactttgtggcggagtggaccccagctcccgagcccgtctccgcccccgaggccagctcgggccccccgcagctgcctcacaccgcctactgggtgatgcagttcgacggctccttgtctctttagggcgccggtgcgggggtcacgttgacctcgccgagcggagatgtcctcagatatctggtccgcctcgactttcgggcgaccaacaatatggtggagtacgagggactccttgcgggacttagagtggcagctggactggggatccaccgcctcctggtgttaggcgactcccagttagtcgttaaccaggtctgtaaggagtaccggtgctttgacccgtagatggacgcttacgtgtgccaggtgcggtgtatggagcgccatttcgacgggatagagcttcggcatgtgcccagacgggataacgcggtcgccgacgaactctcaaggctcgcttcctcgcgagcccagaccccactgggcgcctttgaagaaaggcttgcccagccgtcggcgcgacccgaccccctaggggagacggacgcgcctgaacggcccctgaggcccgtcggagtccaggcctcgggacccgagggaagcgctcccagctcccctagattgattgcttggatcactgagatccaggcatacctcgtagataagactctacccgaggaccgcgaagggagtgaacgcgtccggtgcatctccaagcgctacgtgctggtggaagggaccctctaccggcgcgcggctaacggagtcctcctgaagtgcattcctcgggaacaaggcgtcgagcttctcgccgatatccatgaaggcgagtgcggagcccactccgcctcacgcaccttggttggcaaggcctttcgtcagggtttctattggccgacggctctcaacgatgcggtcgacctggtccggcggtgcagggcgtgccagttccacgccaggcaaacccatcagccggcccaggccctgcagaccatacctctttcgtggccatttgctgtctgggggctcgatatcctgggtccgttcaggcgggccccgggcgggttcgagtatctgtatgtcgctgtcgacaagttcactaagtggcccgaggcttatccggtcatcaagatcgataagcactccgcgcttaaattcatcaggggcatcactgctcgatttggggtgcctaacggtatcattacggataatggcacccaattcactagtgagctcttcggtgactactgcgaagacatgggcatcaagctctgcttcgcctcccccgcccaccctagaagcaatggccaagtggagcgcgccaacgcggaaatcctcaagggcctcaaaaccaagaccttcaacatcctcaagaagcacggcgactcgtggatcgaggagctgccagcggtgctctgggcgaaccgaaccacgccaagccgagcaaccggggaaacgcctttcttcctcgtctacggcgcggaggcggtcctcccatctgagctcaccctgaggtccccttgggtcaccatgtattgcgaggctgatcaagatcagcttcgccgagacgacctcgactacttggaagaacgaaggcggcgcgcggccctacgagccgcgcgataccagcagtgcctgcggcgctaccatcagcgccacgtccgggcccgatcactctgcgtcgacgacctcgtcctacgccgcgtccaaacgcgtgctggactgagcaagctctcaccaatgtgggagggtccgtatcgagtgatcggtgtcccccggccgggctccgttcggctggccacgggcgacggcgcagagctgcctaacccgtggaacatcgaacaccttcgtcgcttctacccctagtgggggtcgggcgtcatgtctcgggctcgggccaaccccgcaccccccgggcgtgcagggttggccgggggctaccacatgcatatccttatcttttttctcttccgtatttcaataaaagcattttcgatttcctgaggactgtgcctgtgccatcgtttccttttgaagaatcttggcttgagttagcacgctcgtgctcgaccctgccctcggtggcccgggccggctaaaatcgccaaacgaggcccagaaccgagccgtgccccggggcgtggtgaactccggggggggaatcggcaaaggcccacaatcgggtcatccataaccctcggtcaccacgctcccggcctggccagtctcgacatgcggatctccccaggcactagcccccacccgcgccgcttgaggttgggacctgggcacgagccctcgttcaagccaagacacagaaggaccgcggcacagaccatcctcgtctcatacacacaacaaacataactgacgcagaaatttcctctttacttgattacagattaaatcagtctatacaagaagggggcccgaaggcctcggaagaagaaggaaaagctattaagattggcgggggcctgggggctcactccggcgcccccgggccgtcggcctcgtcgccactgtcgtccgcaccgtcgtcaccgccctcctcgtcggagtcgagcgcgaacgcgagccgaggggccgtaccctcgaagctgtggacgatgtagtcggcggcgtcccggacccgcgcgcgcgcgccatcctcggttccgggagggaactcttccagcgctgcccacggggagaagtcagggtccctggcctggtagcttgccagtacgagctccaccgcccccgggcgaggtccctcgaggatgacttgatcgtctcctcgagctcctcggggagccgctggagggccccagccatctctgagaggcgctgggcgaggcccccctggttggcggcgtacttcgcgtgccgcccgccccagagacccgcctgccgcccggcgcggtctagacgggagacggcgtcccgaagcatgccgggccctacctcgctcgccaagcggagggcctcgacctccccagcggacgagtccagcgcgccctgcagctcggcgatggtgtgttcggcggctgcgaggcgggcggctaggtcgctgtggcccgcggccgccccgccgctgtgcgccctcgtgtccagctccttcgcctgcgcctcgagctcagcggcccgctgatccagtgcggccctctcggcgcgggcgccttccagattgcggcgcgcctgctcctcccgcgctgcctcgcggaggaacaggctgtccgccagccgctgcgccgcggcctcggcctcctcgagagctcgctcccgttcggtgagcgcgtcctcgcggaggcggagtgcggactcttcttcggcgcaggcggcctcgtgcgccgccagtgttgcctcccgggtggcgacggcggcctcgcggtccgccaggtctctctccttcgcgtccagggcgcgggcacgctcctccagcgccgtggcgcgaacctcaagggcctcttcgcgctggcgggacgccgcctctttctccgccgcccgccgttcccgggcagcggcgacatcaaggactccccgggcggcgtcgagcttctcctccagcttcgccgcccggctcccgtattggaggcggaggtcgttccgcgcctcgtcgagcacggcggtggcgatgagggcagtctcccgctcctcctccacctccctggcaatctccgccagctccctacgacgggccttgagctgtgtggtctgccggtggtgcgccttgcggcccgcctccaccatggcctccaccgagcgccgcccctcctcgacgcgcgcccacgccgtgtcgagctccgcccgctccgcctgcagggcctccatctgggcacttaacccgtccagcaccgtgctgttcgtggcggccaaggcctgcaggaagggctccgcgctcagtggggcagcggaagacagaggggagagccgcctcggtgtgggcgccgcgcggctcggcccgccgatcgacgtgccggactcgggggcgtccctcgaagctggctcgtcccaagtgtcgcccaaggggtcgggcccgagcggcgtgcccgcggcctcgtcgtgggtggcctcggaagttgtcgtcccctcgggcggagtcgggtcgagggtttggcaggccgcctggcgtgcgcgcgccgcctctgcctcccggacggactccccggcccggcggagtctggcctcctcccgagcggccacctcagcctggcgaacccggacggcctcctgggcagcctcctcggcttctcggagacggtccgcggcttctcgccggtcagcttcccgcctccgggcctccgcggtcgccgtctcctcggcctcagaccggccggacttggaagggcggggggggggggggggaggggcgacgggatctcgctgaggcggaagaaaaaccagaagacaaaaagaaacgggtgagtgaaaacttgccttgggagacgggagaatgaatatggccgcgatgggcgcggggacgaacctgcggggaggtcggctaaacgaccacctcgggggcgagatgaggttcccccggcatggcacaatcccccccatcttgcggagccgtttcttctttcgctccccctcgggctgcggcgtcggcacggcaccctccgggcgcctgctgctggcacgcaccgccccgtcccctcggggagatgggggaggggtgccctcctgcttcctcttcccccgggcgtcggcagggcggctgccccccgggcccccgtcgcggggcccagaagcacgaccttctcccggggtagattgttcccccctgcggctcccgcccacgccatcgtggcctcggggggcccgctcccccgacgccccgacctactgcatgatggtcaggatgttggcgcgctctggatcgcagcagagggggaggaccccttgggggatgagggatgcctccacggagctgagattaagcacccgttggaccaccatcctgaagtcctcagggtcccagtcccatttgcgcccctggtgggtcctcatgacgtcctcgggcccggtgtactcccaggcgccccgggcgcgccgctggagcggcgtgatccggcgacgaaggtagtcgccgaacaccatggcccccgtgagcccctgggatcgcagacccgccaggcggtcaagaacggcgtcgtagccgtctcccagatctaccgccgcccgccagctggaggcttgcgccggaggctggttcggaagtcggaggcgcgcttcgtcggcgaggggggtgtagaaccaatcgctcttccagtcgtcccactttttgcgaacgacgcagggaatgtagcggttcagcacctgcccccacggctggaagtagcagccaccgactaccgtcggcggcgacaccggctgtgcggtgaagaaccaccggaacagccggagagacgggtgtaccccgataaacatctcgcacaagtgcgcaaagatggccaatgtcattatcgcgttgggggtgaggtgtgccatctggagatcataaaactccagaatatccatgaaaaaaatagagaatggcgggaccagccccgccattgcgaaagagaggaagaagacggaccgccccgggtagtgtggcgccgggcgtccctcgcccagcgcgaccacctcccggccggtggcagattccggcttgaatcggcgcggcagcccggcctgcctctcgctcacgatgcgggaaagcggcagcacgctaccctcgagcggtgcggagccccgtgccatgacgccggcggaggaggagcttgagagcgagcgagtatggcaaggttagggcgcaggaaacggagagtcagagcacaagtggcgaaggcaagggggagagtggcgagaggaaggaaacaaatcccttccttggcgtctttgtacccttgccaacgctatgcccggctcctcgcttcccgcacccactacctcgccccctcgtttctcgcgcccgcgcctccactaaccccactcgcccgtttgcggcgcacgcgatagatgtgcggccgtggcgtttgagatggggcagatcgtgcgcgcattaaccgcgctcgccaaccgcgaaaaacgccatcatcatgtccccaggcgaaacaaaccggctcgtcccgattcgcgcgctgctcgagtaatgtagcggtcttgaagaggccgctcattattgtcgatcggtttctcccttgccgatgcgcgcgatttgcgaccgttgggtttctgcctgcctgtggggaccggccccacctgtcaccgggcctaaggagtggcatcatgcccgatcgcctccctcgaggggggcggtcgccctggcgtgacgccgggggctactgtcggtgacatggggccgggggtatcgtgactagaggcttgggtagccgcgatcactcacgtggcccgaccccctcgggggggtcgggcccgacggtgacgtggccacctctccctctgtctccccgaggggtcgggccgctcctgtttcggccccgagggctggggcaccccgaccccctgtggtgattggcgccacgtgtgtgggttaggtgagcacagcggcgctcacttaaccgcatttatagcgggttagacgagcgcgtcacgccgcattcaatgcggcgcagcgcatgcttatccgatctgtgaccagtcgcggtatgtgaccggtcacagaccggtcagatcgcgggttaggtggcaacaggcggcctgtcgcacgcctcgccccgtcccgtcggaatgatgagagcttcctggttctcgtctctagccggagctggcgtgctgactcctggagttggtatgtcagtcccggtcagatccattccaggcttcagtgcaagcatggcaagaaaatcgctggccattgaatgaagtatgaaacgggcgtccaccgggagagctgacgagcggagcaggaggcgtgtgtactgcttgtcagaggtcatttccggctgtagattagccctcattgtaaaaaacatgtttcttttcttaggcagagagaggcccatgtggtgacccctaaccagataaaaaaaggaggcccaggcctaaggagagaaaaaagggggggggaggtgagaggctggccacttgattggagagcctgaactctctctcgctctagagctctctggctctggagctctctgttttccttcacacacagatccaccagaacacaggagtagggtattacgcttctcagcggcccgaacctgtctacgtggcccgtgtcttgtgcgcttcttctcgctgacattcctcagatcgagggcgaagaacctcacttagcgcccccggccgaaccggcaaaggggggcctgcgcggtctcccggtgaggagccccacgctccgtcaacgatttactcctatcgcacgcctcaaccacccacctttattcgagtaaacgatttactttgataataaaaacaactcccctgcttctgatcccaccccacgtcccgcatcgtgctccgaccattattggagtaaatgatttacttcgataaaaacaacttttctgttttcggtatatattctatttttcccgtacccaaccaaccactctcgcctcacttccttttttttctcttttttttggatctaaatcgatccaccatcccaccccacagatcggcgacacaccatggaggaggacgatgacaccgtggcggttgatggcggtggccggtgagcgatggccggcggcggttgaggcgaaggcactgcttcgggcctcgttgccggacgttgggcagcaccttaaccagcaataaggtattcacctgggccaatagcaacaaccagcggctactccaccacgtcggcggcattgatagaataagcaagtaaggaaatgacactttgatttgcatctgcatactctccttcaacttcatgcatgaagccccaatatttttttcaaatcaaattaacgtgcaatctccaatattacctgatctcaattgatgggctgcacaggtcctacatttgcacatcgtgctccatgtggctggccgtagaggatagggtggagtccgtcggtgatgtaggttgtttgatatttttcttttgctcgtcatctctattgacatgaacgagaatgtttttacattttttcgtgcttgctagatgatggatggctgcgcaacgtcgggctcatctctataccataccgctacatccttctattattccatcgtcgactactactcgctccctggttgccctctccactaccagtctgtgttaccagtcagaagacacagactgttctcttcatccttatagcaagatccagcaaagccaccagatggatttttagctgaatcattttttttcatttctagtttgattcacctgtgagtaattttatcgcttgtgtgtgattgagcctgtaattttttcacttgtatgactattttatgatacagatcaacaatactcttagtatcaattttttactcttatactgtacattgaacatatcagtaaacatattactatatggtggctacgagatcatggctatatcgagaggaaggtggtaattgttttactcgcagaccaaggaatctcagtttttactcttatactatgtattgaacacatcagtaaacatattactacatggtggttacgagatcatgggctatatcgagaggaaggtagtaattgttttactaacataccacaaaatctaaacaatatttataatattggtaaaagaactactagcattgtaagctggtagtaattcttttacgaccatctaggtatggcgtcatacgatgtggagacattcatgtgagtaaatttgttacttttaaatgagcagatgtgggaggctgggagtaaatgaaaaactccacggagtaaattcgttacttttgaaacgtgcggagatactagaaaaatggaaaactcggaaagaaaaactagacggtaaatattttactaaaacgcgaaaacagaaaaactacagagaaggaaccaaaaacagaaaaatctggatggttaatattttagtgggcccattgatgaagcacggatgagatggaaaagagaaaaagaaacacggaaggtggagtggtaaaaaacgaaaaaaacgaaccgagaaaaggtgggatgcggaggaaaggtggggtggtaaaaaagggaaaaccggaaggagagagcgttgtgcggcactcgaactaatattccgcgctgtagagcgcggaatagtgctaatggaatttttatcaaatcgaattggcgagaagatgaacaagagagaggatggaggaggaagaaatgctaagttagtccaaaatttcattgtaagggcagtgagaggcatatatccaatatctacaagtttataatggtatatatgttcaaatatataaatggtagtgttatatttcaaaactacaaaagttacgatgacaagcctaccagaggaggtgaatggtagattatgtcagcggaaaacaaataatcgaatcttaatagattaaaagtacaccccaacctcaaaaaccaatggaatacacgtccggcggtctatccgacctactagagtcggtctgaccaaaacctagccggtctaaccgcaggtcactcggcggtctaaccgtcagccctaaaaccagcacgacaacgcttctgtgaaaacttgatctctcttaaaccaaccattagatcgagttgcagactcgatagaataaactaaataaactaaggaacaactccacctgagagatttgcaaactataaacggtttaagagaaaacaccctcgaaagtcagctgtctcagaattttagcaaatctgaactaaacctaaaacttaagcaaattcgaatctagtaagaaccaatcaacgaaactttccagatctgatctatgaagtattagaaaggttttggatggattaacttgaacaaaatcgcagcaaaacaaacaatcacaagttaatgccaaaaccaaatataaacgtaaaacttacgaaaccagaatagatcatcgatgccttgatgattgaatatgatctttatcacttaaatatattgttcacaaggtgtagctacaacaccccttataaatttctcacgaaaccctctctaatatgggagttcgtagtacgcgcgtacgcgccgcgagcagaactagcgcgcacgcggcacacgttttcggaaggacgcggtagccttactaactctgttagttaaagataatgatggtaattaacaatagattttttattttattaggagagtttttttactaatagattgaaaaaaaataagttacatttgaaaacttttgacttaagatttaaactttgaactcaaattttgaaaactttcaactcaaactttgaaaaatttcaatttgcaagaaaattttttaaaactttcaactcaaatttgaaaagtttcaacttgagatttgaaaactttcaactcggatttgaaaactttcaactcgagatttgaaaatttttaaattaagatttaaaaattttcaagtcaagatttaaaaacttttttaaaaaatgaaaacacttgctactggaagattaaaaagtaatcaggaaaaaaagcaaaagaaagcggaaaaaaaagaaaacagcggtggttagatttcgtgtgcgcgccgcgtgggccgtatgggccgggagtgcgcgctgccggcgcgcgcgtgcgaattaggattatcactctaatctctcaaacttggcttaccttaaggcataacctccatctctatttataccaagaaccttcaacttcaacttaaaggacgtgtaaaactccatttcacgatattactcaatccatcatatttctttttctccaaaaccgcagccggacttccattcggactcctgcgagtcctcgcgtgggccggctcggaccaggccgaccgctgctgctccctagccgactcggtttactaaccaaccgagccaaccgaaacccgtgcatgcaagctgacgtcaacacacacctacatgcatcaacatatgcatactgctcgccaccagcccggacacagtgcacacacatatgcatgccatgctacagtaccgcgagaactgtagcaatcactcaatttttcttccagttttccttcgcgaacgccgacgcttgcacgcacatctcgtgaaacccgttgcgaagatctctctcacacgatatccatccatcgtgtgccatctcgcattagtaccgaaaccatcataggtgccggttgggaacgggctataggtgccggtttttcaatcggcactaatacaagaaaccggcacctatgtggaaaaatagaaccggcactattagctttgctcgagcaaaaaaaaaaaagagagacggctcgaatcgagctaaactcaccaaccacacaccaccattgttgtcatcctccctcgagcccagcactactccccttcatcaccgtctctcggatccgagatcaaaatcaacaacaaactagtatatgcatggtacaaagcattaagaactcaacaagtttgggactagaactcaacaagaactcaagaacacaagaactcaaaaagaaaaaaaatcaagaactcatgccggggccgccacctcgcccgcaccatcggcgtccttctccacccctgtcgccgtcgccgcatggggatggcatggccaccaccgttgctgaggtgcgccgcagatgcctccgccaggcagccgtcggtgcgggagcccgccgcatccccacttcctgccccacaggctcccctctcgccggatctagcggaggggagcccgccgccattgctcgtggggtgcccgccgccgaccacggaacccgccgcgaggggagggcgctgccgcatccgctaggccagctaccagccgcagggcccgccgccttcgccgggcaaccaccgtgagaaaaaaagagaaagggaggagggaggaagagagacgcgagagcagagaaacgagagaaagaaggtggatggataagggttgacggagaaacgagtagataataatgatgcgcggtgggtgcggtgctgatgggcttggctcaaagctataggtgccgtttttttaaaaaaaacaccggtacctataatatattataggtgtcggttcttttaaaaaaccaacacctatagtatatgtgtcggtttttttgttagaactggcataggtgtcggttttatgttttttcatcgtagggaggtgggaaaagctacattggtatcggttttaaatgaaccttgcaccttgagtcgttgtctatgagggtttttgtagtactgtcgtatccaacttcgtcacccggcattcttaaccgtctggacctcaactccttattgagtctagttccgatccccaccgttgactgaaattgtccttcaagaatcctgactctcttaccttctcacatggtatcccgatcgcactagacctctgctcctccctgagatagtcccggtcctcaccattgaccaagactaacctcaagtcacctgcacacaattagataaaacaatcgaattagataaaacaatcgttcctgagtacatatatcataacctgacccacattaatcacacgcactcacacaaacatccacacataattccaaaccacttcattgattaaatcatttacaaagtcaatttgttcatcataaatattaatcatgacaatgatttcacatgataggtatctaattaacccttaggaaaaattagtacagtttttcgggacagaaggaggatgttctaatctattccatcgtacttcgtgcgagtcttcagaagaaaggtgtacgtgagtgacgtttgacctatgaatgttctaatccaatcatagaattattgtatagagttttggtttatacccaagcagagaaatgaatagtttcatgaactccatcagtaggggtgggcgttcagtttactcggataaattgggtcggtttcttcagttttctcctagatcggtttctctaaaacacaagccgagaaaagttacaaaaaataaaaccgacccgaataaaccgaagaaaatcggttcggtttttacgggattcagttttgaccgcgcggatgcgccgataccactcgattcgaaggcactgagcagcggcgtcgacaagttctgacactgccgccaagtgccccttcaaccagagcttctgcgctgccgccgagtcctccgcagaccagctctagcgctgccatggagtaagccgctctgacgagcgccagtgctcgccatcctgctagctgcgcgctcccgctccgctgctcgtgtcgcaggctccgcccctcaacgtttttgcttgctccgcacttccgagagggattagtgcagcgactccctaaatatcgagagaagttcagcatgcctttccatgagattgtggttgactggttctggttgggaaaaagtacaccgaagttctctcaatttgtcatcagtataaaaaacatcctcgaaccacaaaaccagatatacggggtcccttaactgtataaaacaggtcacctgaggtcccaggacagtattgacgccagatttgtccaccatggcgctggttttgtccaccatggcgctttcaccacggtcttcggtgctgagtcaacgcctaaataccctcttctctctcccccctctctctcccccctccagcctccagggcgcaaccaacgcatcgcagcgccgtgacgggtcacgtagctggacggtcgccaccagcgtgacacaggcgttggagccgtgtgactccaactactcgtcgggtgacactagcgtgtcgaacacggtgatggtgtcacccgcggccagcgccacctcgaacggcacgtcctcatcggccatcttcgcctagatcatgagtgcgtccacacccatagcctcaagcttctatggggagaagccaatcacctcctccagcgtctctgggttgtccgccgcagtggtgacgcgctcgctccggccatcggacacggcggcgccgagcttcgccactttgtccgcgtctgggcaagagggttggtagtggttaggttttcatggaacgaccgcctccccacgccggcggcggcggccgccgccggcgtcctccgctgtcgcggcgccgccctcctcctttcccgcctcctcctccgcgcccccgctccactccacttcgccggccgctgtgcgctcgcaagccgcctccgccgatcgtcgctcagccccactcaccgccgcccgtcccttgctactcactcgtggcaaagagaagagaaaaaagaaaggggaaagagagagggcgacgtggacacctgtcatgtggggcccacgtgggtgccacgctggctcagccgccacgtagagcaaaaccagggtcaaaaccaccgaaggacctcgggtgaccggttttatatagttaagggaccccacatatctggttttgcggtttgaggacgttttttatcccgatgacaagtttagggaccttcagtgtactttttcagttctgcttgccttttatctgaggaataagtttattctgtgaccctcaaaactgatcaaaatctaattcgtgaccctaagccaaaataccggatatctcaacccccaactcttaaaaccggtacaatttgactccctcggcggttttggagggcggtttcgctgacatggcgcttacgtggcgatgttgacttagtcttcggtccatatggggttgatgtggcgcttatgtgttctagaattaaaaaaatatgtgtgggacccatttgtcattcacatcaaaataatgtgggacccacccacatgtggggcccacatgccattcttgattgtgagacacaagacatgctatagtagatcggtgtatgcggtgcgttcggtttgcgttatctacaagctgataaaacagccgaacaccgaagaaaacaaaattagaaacccaagctccagccgaagaccgaaaaaaaccggtagttcggttcgggtcaggttgggtcggccttcggtcttcggggaatttctgtccacccctgtccatcagcccagatgacttgtctcaggagctacactctcaacttatgagataatgcaggctgttaatttgcattactcttgataattttttggtttaccttgaaaatggggcaatgatgcaaccagttgactaactaacgttgtttatcaaatcactaaccttctctaataagtttgttgtcgaatggacaactatgccacgtcgaaaggcgtggttctcccaacaatagttggaatgtaaaagcaattgtattaattcttaaaattttttggggatccccccattacatggccctagaggtctatttatagccttagcacaagcttccaccttctagggtttagggttacaaaggattttacatggttgcccttatgaaagggacatttacatgggtacgcagtgtcatttgcacatatgggtctttaatgggctgataggctgggcctggtctatggcgaacgggcctaaaaggccgggggcggcctgttgggccttcttgatgccgaactcgtcatggcgaagtctttgtagttcgcccgagatgcctttactttcggagtaccgacgcggcttttcagccttcgccatcttcgcttatggctttcgccatagggcttcgcctgaatggtcttgatgtctttagcttaaatcctggctggtactatggtttcggcaggtccggccgaagggcttcatggcatgcctccaacaagcccctcacgggcaagggtgagtaaggagcttcggccgagaccgtgcaaactatacggtatggcatgaggcgccccctttcggctgatgttcctgtcgaaacctctttttagactcctgcagaaaaaatatgaacactggcattcgcctttcgaaaatggcgaagctgtattatgacactgggtgattatattttgccaagtttgtctgctttgcacgattcttgacttgtatttttttttctttccccttttccctgttgttttagaggggattttgccaaaagtcatgcgttcggccccctttcggggattggcgaaaagatttgttgacttttcagctttcgacttctgttttcgactcgtagcattttgcgctgggaaaaacgcttgtgttttgcataagttgaatgtaacggcgttcagtatctttattctgaaacaagctatcgcggtttcaatgttcggcgagcgttgcttcggccgattcgtttcgtccccctggcattttcgtcaatcaagcgttcgcctcttatgtagctatgtggttgtcaaaatggcgaattggaggcgaagacatcctggtcgaaccttagaggattacgaccggtgccacatccagcgccgcgatgacattgccacactttggttagacttcgaaatgactaatcattgagctgctatcgcttgacgtcggtatgtatttcgcctccttcccaccttaaagtcgtgtacagtatagatgacgaaccgtgttcgccggacttagtaggggcgaggcgaaaatgtcctgaaacggatgatgtaatatacttataaaattttttgctcctttgtataacacgtatgtgcttttgcccgatggagcttgtgcgtgtttttaagtttcttttcgctatcattgcattttgtaacttgtacgttcggaagggtgaagcatgtcggtccccttgtgtgttagcaaaaggaattcacattgacttttagcccgcatcattcgctctcgacttttggcatatgcatccagaaatgcttaagtatttgcagaagtcgagtgtagcgacgatcggtatgttttctgaaaacgagctgtcgcggtttcgcggtttcaacgttcggcgagctatgcttcgaccgattcgtatcgcccccctggtgttttcgttgatcaaacgtttgccttggggtttttccacgaaatatcatacacaaaaaaggcgaagacacccatgaattttatatgactgagcgtcagtttgccattgcccagcgtcgacgcagcataatccccgtttttccttcttcgccgctttaaattttttttgtgttgatctaacaactagcgatgaagaagatgctcaagggggtagtccttcgccattgaggactgcttttgctgatgaatcggatgtaaagtccgaatgccttttggtgggcaatggaatttatctgtaacttgtgctttttggcaaataaatggggtgtggtgcgtgttacggctgttcggcttgtactttcccctttttgcctttggcaaaggtatttttaggtactttgatcgttttgaccattgccggcttttggtctttttagtacttcgacctttttaactgttatcggctttcggtcttttctttagtgctgctagggttttgccgttcgtccctttcggctgccccgttcgtctgcgggtgtgcaaccgatgcgaacttgatttcaagttttagcccctcacatatttccttggacttctcggagtcaaaccgcttgttattgccggtaatgaactctttcggcacaccgaatcaacagaaaatgtttttccaaatggatttttacactagtgccgaaggtactaccttagcccatcgaatgcggcttgacactcaggtgtccaattgagtttgccggcccctcggagcatcttgaaaaatgataaatctctttcggctgctcttgggagcaactccttaacccattttcgcccccagcccttgtcgccgtacctcgctggtactgtggcgaagggcgtgggtgtggcaaaacctcttcgcccgcagcccttgacgccgtaccttattggtactatggcaaagggcgtggcgtgtgacgaaaccttttcgcccgcagccattgacgctgcaccttgttggtactatggcgaagggcgtgggtgtggcgaaacctcttcgcctcgcagcccatcacgccgtgccttattggcaccatagcgaagggcgtggcatgtggtgaaacctcttcgcccgcagcccttgacgtcgtgccttattggtactatggtgaagggcgtggcgtgtggcgaaacctcttcgcccacagcccttgacgccatgccttattggcactatggcgaagggcgtggcgtgtgccgaaacctcttcgcccgcagcccttgacgccgtgccttattggcactatggcgaagggcatggttgtggcgaaacctcttcgcccgcagcccttaacgccgtacattattggtactatggcgaagggcgtggttgtggcgaaacctcttcgcccgcagccctagactccatgccttattggcgctatggcgaagggcgtggcatgtggcgaaacctcttcgcccgtagcccttgacgccgttccttattggtactatggcgaagggcgtgagggcgtgggtgtggcgaaacctcttcgcccgcagccattgacgctgtaccttattggtactatggcgaagggcgtggcgtggggcgtggcgtgtggcgaaacctcttcacccgcagcctttgacgccgtaccttattggcactatggcaaagggcgtgggtgtggcgaaacctcttcgcccgcagcccttgacgccgtaccttattggtactatggcgaagggcgcggcgtgtggcgaaaactcttcgcccgcagcccttgacgccgtaccttattggtactatggcgaagggcgtgggtgtggcgaaacctattcacccgcagcccttgacgacgtaccttattggtactatggcgaagggcgtggcgtgtggcgagaagggtcccattttgccctttcggtctgggtatccccacggacggcgccagctgttgtcgaatggacaactatgtcacattgaaaggcgtggttctctcaacaatatttggaatgtaaaagcaattgtattaattcgtaaaattttttagggatccccctattacatggccctagaggtctatttatagccttagcacaagcttgcaccttctagggtttagggttataggggattttacatggttgcccttatgaaagggacatttacatgggtacgcagtgtcatttgtacatatgggccgttaatgggctgataggctgggcctggtctatggcgaacgggcctaaaaggccgggggcagcctgttggtcctccttgatgccgaactcgtcatggcgaagtctttgtagttcgctcgagatgcctttactttcggagtaccgatgcggctttccagccttcgccatcttcgcttatggctttcgccatagggcttcgcctgaatggttttgatgtctttggcttgaatccttgctggtactatggtttcggtagatctggccgaagggcttcatggcatgcctccaacaaagtttgtctagccgatgatcctagagctaccgtgcatttcatctacagtgcaaccaagaagtaaaaggagaactgaagaagaaggcatcgcggacgcccgatgccaatggcatcttagatagtcagtagccatcaatttcgggaggaatctacccatgggagtgggacgcccaatgcctccaaaaaataggaggatgatcaaatattgcagttgaccaacaactgaaacattaagttatatatggtgaaacaaaaaaaatcagcaactaaaacatttaaatatcttataaaacatggtgaaaatacacgttaaaacatgtcgttatcacatattttttatataatggaatgaaacatcctagtctttactcaaagagttacagccaattattacataattcacatagaagaaaactcacaaagaaagttcacgatagcagaaacaaagctaagcaaacacaaactaatagactgtaatacccggtgttcttgagcatggttgggcgaattcgagggcgatttcgatttaaatgggggaagaatgtaatgccctgagtttcgaattagtatattttggggaatattagaacaaatgcgcaaaagtttaatttttaaaccattgttcgaataagcgatcaggaatcgtggatgcatagagttcgccgagtagtgcaaatagactataagttaaaacaatgtgggccgttagatcttttcagtctccttatatacccaaccaaaagaaaaacgaaaaacaaaaaagaaaaaaaaacagggggatcgctcctgcaagccctagccgccacatctcctgcgtcctaccaccgccgccgctgttcctgtctccgccggcgccgccgccgccgccggttcagccgtcgtcgtccttcgccaccccatccgctcgtctccttggtgagctgctgctgtgttcttccctgctgttcctgttttccctaatgctgccgccaattggatctgttctggtgttggtgccgctgcctgtgcatgctaacgttcctgctgctgctcatgctatagcgtggcttgctgcttgacgctgctgcatcgatcagagacgagaaggctccagacagcacaggaagcagttgaacaggagtaacaagggaaggaaaaggtagaacaactttggggaatttcagcgatttcgcagattagggaaatttgttgcaaagtagtgtttctctgcaattggaactttcttttagtctctagatgtaaaagatttcaataggaattaattcgttggcagtttgtgcaatttctgagattattggttatgggctggaaacggtattttcaaaactgacattaaaccttcacgattcaggttagttgtcctaaataaagtttgtagtcatcgacgatatctttctaacgccgctggtttcgctcgattccgataaacggtttaggacaaacaacagaaatagtactgctgaccgggtcctgaaatcaggacagcaaattcgttttccttaatctgggattttcagaggcataatctgatttttcactcaacatgaaggttgtagacaattttgtctagatgtccgaagttatattatttgctagattccgttagacggtttgtgagttacgtataaaatagtaagggaactgctataggttattttatatgttcaggttatcgattttagtaaatatcccttatatctgtcattagttcgatatagtggtttatgcgtagttttgctccacaggtatgaagggttccaacgttgaaggagttgagtcggagtatcgaaggagttaaagcaagtacaagacggacttgtgcgatggataaactgtgttgctttgttggttttatttacccaattattattcgaagcttcctattatcaattgtgtggttttggtattatgttacatattcatatttcacttcatgttcaagttcacgacgttattcatgtttctttcttccggaagtttctgtttacgttattcaagtaccatgcgtagttatgggagtgcaatttggatctttattcatgatccttaagaagcgctgatcacgcttgctcggcttaccggtaatgctaagaggatattcacacctgctcgggagggaactactattttttgtctccttcgttttaaattaatggaaagcaaatgcttcatattggtttcttattgcactaaacctgcgtatgttttactagttcaatattgtacttactgagtattctttactcactcttgtgtttaatttggtttttaggtacctaatgacattgatcggcatggggcgggagtagcacccttggactacacattattattgcacactattggaatttagttttagattatgtttctgcttagcataagttttgcgtagaacttgtaacggtcatttaaagttccggtccttattttcacgtggaatttgaggagctaggatggtttggattgtgtggattatatcgttattgagttatcttataactgactgtcgtggatgtccgtaattttaggaggagactgccgaaatttctaataattttcggagttaagtggtttttgagtgtattttggtatggcactctaggtacgtggttacctgggatgttacatagacaccaaccgaagaaaaagatcccctaactacttaattctattagagaacctcgacccgaagttggcaaatagatgcataattgtcgtgtcaagtttacgacattcatcatttattagcttgatatcttcatcatgtctttgtaattgaacccatcctcgaaactaatatgttgccctgaaaaacacctgcaaataagattttgatggtgtttttatcaaaaaccatatcatttctactaagcctaagagcccaacatacagcggaagctccaacaagaataattttttttatttttttactaacacccaaaagccaattcccaaacgtatgagatgtactatgtagaggataaagtccaaaaaataattgtatagctctccaaagaaatttagaaacatggcactcaaagaatagatggtatattgattcatttttcatataaaagcaacatcttaaactaccattccaattccttctagtcaaattatctttagttaaaacgatccctttaaggagataccacataaaaatcttaatcttaataggcattttaagtttccaaataatcttatttctctctatgtattattaattaaagctaagtaaatagatcgaacagaaaattggccattttgatgaaaattccatctaaaaatgtcatcctcgtctgttaagttaatatgtacaatggaagcacacaaattatgccacctaattagattttgaccaactaatgctcttctaaaagtaacattaagcggaatagaacccataacattagcaattgaggcatttttccttctaactatagaaaataacgaagggtacttttccttcaaagaataattccctagccacttatcctcccagaatcttactcccagaatcttacttgttcaccattattaataatccaggaagtcatatttaaaaatgaattcttaaccttcatcagacctgataaaaaatgggaatctcttgtttcctctcaacctgagttattgatttaccagtaagatattttcttttcagtaaatcttgccacacaccttgctcatttattaatttaaacaaccatttacttaaaagacattggttttttatttctaaattgtgaactctaagtccgccctgatcttttagctgacaaataatatcccatattgtcaatctatactttttttatgttcatccccttgacaaaagaaacaggatctataataaccaattttttgaagaacccctttaggaatatcaaaaatgatatcataaacataactagacttgacaaaacagaattaatcaaaaccaatctcccactaacatatatatgtttacccttccaactactaagtttttttttcaattctttcttcaattgttatccaatctttattactaagctttctataatgcataggaatgccgagatatctaataggaaaatcacctagctatcacatatgaaacaacaagtattaacagattgaaatatatgttttcctttcatcaaaatataatcatgcgatatcttgttctaaagatttaattacaacgaatacaatagtgtgatcggattgttgattggataagtaatttaggagaaaaataatcattttgaagcttgctaaaatacatgcacgtatgtatggatgaggtggagaaagtggagagagagagtagtagcaagtagtttaaggaattttgtggaacacaatgaagacacacattgaaacatatcactaccacgtataaaaaatttagttttaacggtttaaaacacatgtttttattttgacataatataatcatatgatatattgttgtgaagatttaattgcaatgaatacaacggtgtgatcggatcgtagattgaataagtaatttaggagaaagaatatttaaagagagtaggaaagaaggagaagaaacagctagacatgcatgtgacagtaacagggttcgtccgattcattgggctgctgatttgcatcatttttccaaatttcgtgttagagtactgatcgtatcagggaaagcaaaaatttatgtattagagtaaaactcaaattaatatacatttgtcctatccagatgtaataattactataacctactacattctaaatttgtaatacttaacatgcaaaaataacacatcatcatgcaatagtaatttattatattttaatcctcatgtaaacattgctatatcatctatatgtattatattctaaagcttatacatacaaatatattaaatcatcatcccacataatctagtccattaaattttctacaaacgtttctagggcagtcctaaacgttcctgcttcctagtttgtagctcccattcatgttttgtagctatattatatctatgaattggatttataagtaaggaaaataaaaacaattaaatccacaaccctcttccacctcacctcctccccatcccctcgcatgtgcatgcagctgcgcatacccgtttcctgcttcccctcctgcttcccattttgaagctcctattcctattttgtagctatatatcaaattaaaaggagaaaaaaaatcaaatgtttttaatctaactaaaatgttgttgcattcataattaaatccatagtgcccctatttttgctatatatgtcattcggccaaaaagcagtgcactttgcatgccatataaatagcataaattactttaaaaattagcatatattgcatcaccatataccattctataggcatatgtatggctaaattaaatttccagtatccaaacaaagattagaaaataaactattcagcgatattttatcgagggacaacaccctacccttctaaacttcatctcaactgacataaaaacattacaaaattattcaacaacaaaggttgcaccattatacattattttgcaaatgtgaatagataaaatataaactatgtaagaaaaaagaactaacccaaaatgaataactaaaaccattacataaacaatctgatgccttcagtgagagaaaaataatccaagcaagccaaataatgtttcacataagtgctttaaaatatattctatattaccatctaatcgaatttagacaatgtttaatgtatttttaatacatcatagatgaacataatttgttctagtgtacaaaccgttgaaaaagtggatcatccttacatataattcataatatttaattgttgattttttagaaaaagtatttaaatcatagaagcaatcataaaaaatcatataaataacaatgatgcacacatagttatatttagccattgtgttctcactggattgcgtggactctttactcacactctgctcgaaaagttatttgatgggttgtcttccacactgtgcaattgaattggactttacgagcctgtgcattaagcataggatcatgtccaacccaaatccacccattaataaacaacaagaatataataataataataataataataataataataataataataataataataataataaggaatagtactatacatgacatttaactatgtacaatctgttttaactcttgaattattttggagaggaagacagacaaatatatctgtgtattgatgaaatggataggatcaaccactcttgaggtgaggacgagagagggggaaacctatctacctatc

SEQ ID NO: 4713 - DNA, 64409 bp, Oryza sativa
  unsure (1)..(64409): unsure at all n locations
cctctccttttgttcgttaggaggctccggagctcgtcccgctgtcgccatcgtcctccgtcgctcgccgtcgtcgatcgttgtcggtgaggcctctcctcctctttctctctctctcccgcaccgtttagccgccgcttagccacgtagctgccgcttcgccgcgacgccgccactctccgccgccggccagtcgccgccggccgccgtcttgcgccgctgccgcatgtgtgccgcgccgtcgcgcgccatggtcgccgggccggtttgcgccgtgcccgcgcgcaccagccatcggttcggccgccgcgtggcgcgccgctccttcccggtccgtggacccgatccgccgtggaccgccctccccgagccgctgaccggtggggcccgcttgtcggcgcccttcctccctctccgagtcactgccatgcgggtcccgcttgccagcgccgcgccccgccttgatgacgtcagccctggaatatattgcgcaataaatgatttaagatttttcttttatagtaataaacacagtgaatcttctaaaattcataactaattcatccgagctccgtttaagcccattcaagtctcagtaaatcaagaaaaatgtgtagaatccattaaaaatggtttcgttctctgtttcagtagtcttatagtctgtttgcaatgtttgctttgtatgtcgctagattccggttcctccgacgctccggtgtacttcgagatagtcaccgaggttcctccagcagcagagcaaggcaagtcatgcttgtcacttgaacatgttgatcctatattgcaaatgctctattattttctttcaaatattgcattgttttataatgttactaggggttgtttacctattgccgtagccatgctattgttgtaccttgtttctttgtcaacttggggttctaacatggttagagttaggactagggattgcttagccatgcctagttcaactagttcacattggggaaaatcctattaatgattagactgtcggttctaatggttttgttgggttagtgacaccgctttggtgttggttaattaaaatgaatcacatggtgggctgtgggtgcatggttttgctggtcgcacccatggcagttaaggaccggttcgcgggatgccctggaagaacttatcgtacttaccacaagccagcgtgggcaacggctgggcttgtagtgtagctttcctctagtcgacgcatccaggcaagggtgggcgtgatggagttgggacgggccctgcgacggcctctgtcgcttccggattcacctaggcacgagaggggactgcccgctgccttgcgaggagtgggggtgaaacctgaggtgtggtgtgcttggctagagggggttatgtgaagggtcttgtcacggcctctttccggtatgtcgtggtggcatgtcggcacacggaaacgtgtcgtggggctgtgtcttgtgggtacagttgtacacctctgatcagagtaaaactattcgaatagccgtgcccgcggttatgggcggtcaaccagattcaccgtgattagtctcaccctagtgtaatcttttgaaactggatagttttggtggagggttgggcctgttgcaaagtgggatagcgttggacagtggatagttaatattaattaattattacaactgtttaatctttcaacttctgtttataaatgctcgctttatgcaaatgaaccactctagctcttcttttataattctctacatcatacccctattccggtatgacttgctgagtacagtgggtagtactcagttttgctctatttttcccaaccccagagtacgagtatgtgtcagatggaggtttctctgaggagtaggcttcgtccgtgccgtcgaggatgcctgtggagtggtgttcccgctgcagttctagtcaaggcttagctcctgttgtctttctttccttccgctgcatttatgtaagacttttatgatgtttgtaagacgtggatctgaatgtcaacattgtcgtttgtgtaccccggccggtcctggacggggattttaatgcacattctgcttggaattctattcgggaatttctgggcgtgacaagttggtatcagagccgaccttgaccgtaggacaagccaaatggaaaaacctaagagccctctgaatccttttcattgcatatgttctttgcaattggatttgttccggaaaaattgggatctgttcttgtggttcaaggggaaaaatcttggtcgctcgtttaagtgagatttgtcaaaacaagtcagtccagggtttttgtaaaactattgagatttattcgtcagtcagttgggatttaatgggtgaaatgcattaggtcctagctcaggaacatgggttgcaaggtatttatgctcttactgttattattagtatgtatctaatttccccaatattttatcgttatgtgagtctgtcttatttattcgctctcatgcaaaacgatctatgcataaaattttgctcttattcgattctcttatttgagtcttttattgctttatttaaatttggatttgagcatgcattgatcctactcctttgtcttctctagatggccggccacccacccaaccaccgcggagaaggcatgattgactttgtggcagagttggcacgtatgacgctggtggtgggctaccccaacgcgccagagtacacgactgttccaccgctcagtggcgagcttcctcaccgtgttcgcctggaggttcacggctacgtgggtacctgcctagctaatatggtggttgaggcatccggaggcacagcagatcacgcctgtcaggaggcagcatacctgatgatggccagactacgggagcgccacaactacatcttccacgacacggcgtaccgatttcaccctcgtcgagccagcggtgatgatgtcagtactttccgtccgacagccggcgagaacgacactacctttggtcacatgtgtgctgtgatgaggggattggataggatgcactcagacttgcacaaggcgtccaaggccttgaatgatgggaagctcatgaggatcgtcgctctgaaggacgagatagcgcgcctgaagagggataatgctcagttaaagggtcttcccgcgccaggaggagtccggatccgcactacgccccacaagaccacgactgcacccgtgcgcatccagcttgcgcccaagaacccacctccatcagcagctcccgcagcacctccagttccgctcgcagctccggtagttcctgcagctccagtaccagctctagctcccgttcacgtgtcagctcccgcgtctgctctctccttcgctccagcatcagccgctaggggtccagccagtggcaacggaggttggttgtctgctactcccagtggcagctgcgatctcagcagcagtagatccagtggctcagagctgggcagcggcgagacttatctgccaggctccaggagtcgctcagagggacctggtgacgagcaggacgacgccttcgactccaccgaccgtaggagccgttccgagcattaggctcattttccattagtttatcgtctgtctagcatttgtttgttagtttgtgtatttaggttgcttgcttgtgggtcagtcgacggtcgatatcatgtgcctatgatatggctgtcttaataaggatttttgcttgctttttaagtgttttaattcagatcagaacaattacagtttaaattcctatataataaagcttagtttttgagcctctatttttcttcttttcccccgtctgcttttcctccagatggtctacaccaggaatggtagccgcgcaacaggtgagggcagcaacggcgaagagcgcactgagggtgtgcatcccaacagcaattccggcaatggtccgccaccacttcccgagaatccgacgctagcccaagtgatggcacatcagacttagatgatggcagccatgatgcagcagatgcagcagcaacaccagcagatgcaccagcggatgctgcagcacgccgaacagcagcatcagtagtttggtccccctccccctcagtccaagttgctagagtttctacgtgtcaggccacccaccttctccagcaccaccaaccctatggaggcgaatgactggctccatgccatagagaagaagctgaatctcctgcagtgcaatgatcaggagaaggttgctttcgccacacaccagcttcaaggtcctgcgtcagcttggtgggacaatcacatggccacccgcccgccaggcactgaagtcacttgggaagagttctgtcgtagcttcaggaaggcgcaggtggcagatggggtcgtggcacaaaagaagagggaattccgggcactccattagggcaacagaactgtgacggagtatctccatgagttcaatcacctcgcgcgatatgcaccggaggatgtccgcactgacgccgagaagcaggaaaaattcctagcaggtctggatgatgagctaaccaaccagttgatatctggagattacgccgatttcgaaaggctggtggacaaggcaatccgtcaggatgatcaacgcaacaagatggacaggaagaggaaggccgctcagttcagggcacctcagggaagtcaccagaggccgcgcttcgctcccgggcagcagggtggacctaccaccatgatcgtccgccagtaccgcccgttcaaccctagcaactttccccagggcgccagtggcagtcagaaccaccatggaggtcagcccaaccgcggtgcagctccacgcccaccaacggcaccggcacagtcaggcccgtccgcgcaagccaagagggagactggagcaaaaccagggtcctgcttcaactgtggcgagcttggccacttcgctgacaaatgcccgaagcctaggcgtgccgggccaaggtttatccaggctcgtgtcaaccacgcatctgcggaggaggcacaagcagcaccagaggtcgtactgggtacgtttcctgttaactcaatccctgcaacaatactttttgattctggtgcaacacattcgttcatttcaaagaagtttgtcgggatgcatgggttaaggaaagaagagcttagcacaccaatgagggttcatacctcgggaaatagctcaacctcagtcagttttagcccttcagtgctaatagaaatccaaagatcaccatttctagccaacctcattcttctcgaatccaaagacctagatgtcattcttgggatggattggctgaccaagtttaagggagtcatcgattgtgcgaatcgcacagtcaccttgaccaacgagaagggagaaacagcagtgtacaaatcaccagactcaccaaagcaaggggtctctttgaatcagattgaggcggaaatcccagtggacaccgtgaagaagaatttgaggaaattggaagatatacccatagtctgcgagtatccagaagtgttccccgaagaccttactaccatgccacccaagagagagattgaattccggattgacttggcaccgggaaccgctccaatttacaagagaccgtacagaatggcggccaacgaactagcagaggtcaagaagcaggttgatgagcagctgcagaaagggtacattcgaccaagtacttcaccttggggtgctccggtcatttttgtggagaaaaaggataagacgaagaggatgtgcgttgattatcgcgcactcaacgaggtcacaatcaagaacaaatatcctttgccgcgaatcgatgatttgtttgatcaactgaaaggagctaaagtgttttctaagatagacctgcgatcaggctaccaccagttgagaattcgggaagaggatattccaaagacggccttcaccactcggtacgggctatatgagtgcacggttatgtctttcggacttaccaacgcacccgcattcttcatgaatctgatgaacaaagtgttcatggaatttctggacaagtttgttgtggtattcatcgacgacatacttatctattcaaagtccgaagaagaacatgagcaacatctccgtctggtactcgagaagttgaaggagcaccagctatacgccaagttcagcaagtgtgacttctggttgacggaagtcaaatttctgggccatgtcattacagctcagggtgtggcagttgatccatcgaacgtagagtcagttaccaaatggatcccaccgaagaccgtgtcgcagattcgaagttttctaggactggcaggttattaccgccgattcatcgaaaacttctccaggatcgcccgacccatgactcagttgcttaagaaagatgagaagtttaaatggacagctgagtgcgataagagttttgaggagctcaagaagaaattagtatccgcaccagttttgattctgcccgaccagatgaaagacttccaagtctattgcgatgcatcccgtcacggacttggatgtgtcctaatgcaagagggcagagtggttgcgtatgcctcgcggcagttgcgtccacacgaagggaattatccaactcatgacctggaattggcagcagtggttcatgctttgaaaatctggaggcactatctgattggcaaccgctgcgaagtatatacagaccataagagtctgaaatacatcttcacccaaccggacctaaatctccgacaacgaagatggttggaactaatcaaagactatgacatgagcattcactaccacccgggtaaagccaatgtggtggcagacgcattaagcaggaaaagttactgcactgccctatgcatcgagggcatgtgtgaggaattgcggcaggagtttgagcatctcaacgtgggaattgttgaacacgggttcgtagccgctctggaggcacggcctacgctcgtggatcaagtcagagcagttcaagtaaatgattctgaaatagcagagctgaaaaagaacatgagagtcggaaaaacccgggatttccacgaagatgaacacggcacaatctggttgggagaaagattgtgtgtacctgacgacaaggaactgaaggatctgatactcaccgaggctcatcagacccagtactccattcatccaggcagcaccaaaatgtatcaagacctcaaagaaaagttttggtgggtcagcatgaggagagaaaagctgaattcgtcgcactctgcgatgtttgtcaacgagtgaaggcagagcaccaaagaccagcaggtttactccaacctcttcaaatcccagaatggaaatgggaggagattggaatggactttataatagcactgccccggacatcatcgggtcacgattcaatctgggtagtcgtggatcgactcactaaggttgctcacttcataccagtacataccacgtatacgggcaaaaggttggcggagctctacctctcgagaatcatgtgtctacatggagtacccaaaaagattgtatctgatcgagggagtcagttcacctcaaaattctggcagaagctgcaggaagaattggggacccgtttaaatttcagcacggcctatcacccacaaactgatggtcagaccgagcgagtcaatcaaatcttggaagatatgttgagagcttgcgctcttgattttggtggagcttgggacaaaaacttgccatatgcggaattctcgtacaacaacagctaccaggccagtctacagatggcaccgtttgaagctttatacggccggaagtgccgcacacctctcttctgggatcagacaggcaagcgtcaactgttcgggacagaggtattagcggaagcagaagagaaagtcagaatcatcagggaaaggttgaggattgcccaatcttgacagaagagctacgcggataaccgccgaagggagctcacttttgaggcaggggattacgtgtatcttcgtgtcactccgctccggggagtacaccgttttcagacgaaaggcaagttggcaccacgcttcgtgggaccctacaaaatcttggaacgaaggggagaagttgcttatcagttagaacttccatccaatatgatcggcatccatgacgtgttccacgtgtcccaattatttagcaaattacgagaatgcttcaacacgttggcattatcgtaatttgctaaataatatttgacaaaaaaatcgagggggattttttttatatattttgaaccagtcgatttgcttgcagactcgtgcgcaactactcctctagctttagtgaccgcggtggctcaacaagctagtctttagaaggaggatggaggggagggcagaagagggggaaatcgtcatgcttagagggatgactgtgaaaggcggtaaacataggcaggtcagcgagacgatggtaccgaagctgtagagatgaaggagggtggtgggccactggtagcaggggcaaggcaaggagagtagttaggaggccggtagtggtggatccgatggctcccgctgctggagataggaagacaacaggcgagggcatctaattgctgccagcttgaggaggagggggtggcggataaggcccaccgaggcagggggtcgccggcaccattggcgacttctagccaagcgcgaggtcgagcagtggacgggcatgctgatggaactaggactttaagagtgaggaggggggagaggtggggttagagttagagtactatacaaatctcaaagcaatcggatggtgcaaaatttataagattttcttggagtgtttttgtgtgaaatgcaaataaattatcccttttttaagtaggataaccaattgattatccatggattccatggatgatctatactactattaaaagatagtattggtggtggtgagtctgccaccagcaccatcacttacatgtggcccatgatattaggattttgggcagtcgtttatattatgtagactgcagatctttaattttctaagcatgatatttttgtttgtttcttttagatgaaaggttgtgtttcaaccaattaaaaatatagttttttttaaccaggacttaatattgctattttcaatactgttgcaacgcacaggcatttggctagtatagtaataaatatataaaaaggcattaaaatgttgttttaagagtaatattggagacaaacaaaaaagggtttgttggaactatgccaccctatatttgcaaaatttgagatataccacccgtatctccgacatgtaggacccacatgagtcaatgacatgtggaccagggtggcatatcacaaatttcgcaaaatttgtgtggcatggttcaaattgtcccaacaaaaaatgtgtaacatagaccaaaagagactccatgtattataacatcataggagatgcaaagatactctatacattataatatcgtaagatcaaagtactctatatattataacatcgtaagagatgcaaatagacgagcacatcacattgactactctaatatatgcatgatcatattgacaagaattggtaagcagagttgtcaagggatgtcatcccgacgtcaacacgatggcctactactagagaggaggaagaaatagatctagcctattgcttgttttcaatttttgatggttcaactcaacgtattagatgtttcactagttaggtaaaaaatgttgcagtgattttttttggtattctttttgccgaaatcattcggatctactgatgtttcagtggtccaaaaccgatgtgtcatatgttgtaccaaaatgtttcaagtgtaagttgattgtgtttcatcgtttagattgttgatgttcaaaagttgagacatttttgttcgaggaatgaaaccttttttttctaaaatgataaaacatgcggaacactttgcaacattttacgtctgatctgtagtcgccaccgtaaattataaattaggttaaaaagtgagctactcctataaattagttcaggaattactctcatatatacatagccctctaatattggtcggatggaatgttagattttcttttacctcaccgcctcaccggtaaacgagtcaccggctatcctggccgggcaccccggtctaaaaggcccaatcccatatgtggaacaccgaacgtccctttggacggaccagattgctccgacctcaccgtctctcttctttctccccaatccctatagctctcgcttcgtcaaattctccggcgtttccagttcaaaaataaaaaataaaaaatctccggcgcaaatcctcctctccgccgccgccgcctccacctccaccgctcgccccctcgccgcgcctccactcctcacaccacgctcctcctgacctcctccctcgcgcttctccggcggcgcctcgctcctctgcgcggaccgttgcccctggccgagcgcggcgcggcgcgggccgcccgcggggggatcgggctcgggtagaggcgggcgacctggcgggggaagtaaggggtcgcgcgtggcggggagatgatctacacggcgatagacacgttctacctgacggacgagcagctgcgggactcgccgtcgaggaaggatgggatcgacgaggccaccgagaccgccctccgcgtctacggctgcgacctcatccaggagagcggcatcctcctcaagctgtatccttctgcccctcctcccagatccccccaccttttcccgccttgttcttatgcccaagtcaaatcgttaggggtctctcaagcatgctagggtttccagcggttcagtgattaccatccatgtttactagcgctcgctgaatcgcaattgatagggttatttggtttgcttagttttagttcgaacgttgtgctttggattagggttttggttttgtcagattagagatgcttctcttttatattatccagctaaactaatgaaaatgtcaatgttttctctttcttttcggagtcttatgtttttttttcaatgtagaccaatacatcatttattcagtttgatgttctcaagaagattaacattatataaggttacacgcatcactgaatcttgataattttgattccaatgaaaaaaaatgcaaataaatgtgttatgtttctttgtttatgatataggagaaaatgaggatctcttgggcttacttaaggtgataagttgttccaggacggttgatagttgccattgcattttgtttgtagaattttgtcttttcatgccattcaggtcatctgtttttaacaaagttcacaagcttgaaatctgtaaatttttgttgggcaaggaatcaggatgatatgggtattaatcagtgtgctactcacatatattaggttatgcactgttgcatggttttttctgtttaatgaaatatgatggaaacagttgtcggttgctgggctgaatgaagtggtacttgtagtaaatggtgctcgctacaccatcttatcttctgccttgcagaggtaaaataaattggatggaattgatagttgatgtaaaatacataaaatttgtcttctcaagccattcaggttatcagattttcacaaaatgcacaagtttgaaatgtgtaaatttttattgggtcaggactcaggattatgtgggtatggatcagtgtgctacccacatgttttaggtatgcattgcctcatgatttttgctggttaatggaatatgatggaagcagtaggagttggttgctagggtgaacgaagtggtacttaacttgtagtaaatggtgtttgcaacgccatcttatcttctgccttgcagaggaaaaacaattcggatggaagagagagttgttgcatatattaggctactttataaattatatactataagtaaaaacctttttctcatactgacctatttaggagagggaacaaatctataagtcaaatagtggatggatcacatgcgtgtccatgtttttacatcgattacaaatttgaatattctcatatctgaggttgaatttagatatcatcattgttttaacatgaaatgatccaaaatgccagaacatgaaatgtgcatcctatggagtatttgggaagcactgaaagtacactctgtggagtggcaaaaatgtttttcactctgttttgttagacatgccacatatatcttcattgcattttctagttaaaatagaaaagagcataatacaacatatccaatggaaaacattaaaccatatttgcatctgtcaaatctagatgagtggcttatgaattgggtagcacaacaaagaaacaacagttgtggtcaagccaccatatttgcatccattctatttcagatgtcaaataatttagttagtcagatgtccaaccaaactaggggtatcaatcggatacgaattatctgtagactacacaattctttaggttaaaatatggtttattatttccatcggttaaatagtttttccctctatttgattgtgtatatgtgttctacatttccaaataatgttatctgagccgtttgtattcaataaacaatatacatattttattgtagtttgcctaacagttttttctttttatgttttttccctgttcactcaatttaatataattattagttatgttttctaagaggttaaacgtccttaatatcatactgctacataaattacatggatattgaaaatccaactgaattacttatgtgtttgtttcatatttttattcatcacaacaatcagttttcctttttagtccgtgtgagcgtatttgaatatcttttgttatgtgcttaaaacatgagcatgaatgtgtaaagaccttactcgattcttattagatctgttgacatccctaccccataccgtatttcatgttgccacaattgatgtagcaaatcttcaaagatatctagttgggagatagtgattttcataattttctatgtagcttgaatttagctaggccccattcttgcaacttttattttcttttcttttttaaaagtataatatttgcatgtggtggattccttgacgcaccaaagaccacaagcagtgatggccacagcacaagtattgtttcatcgtttttactgcaagaaatcatttgttcggtttagcgttaaggtaagcaaatcttttgtctcagttactctgatcaaaccagtctttgattttatgagttgaaccaatgaatatctctgtttatgcttgcagagagttgctgcaagctgtgtttggctggcagggaagttggaggagagtccaaggagatcaaagcatataatcattgtcttccatagaatggaatgtaggagagagaacgtaccaatagaacacttagatgtgttttcaaaggtttatctgtttctttactctctgtttattttaaatattttttgaacctttgtgcacttcaaatcttgatgtctctagttcttgctctcttgctgctagagctgtaatacctatgcttttttttagaaaatatgtaacttttataaagaattatgctaattgaaagctgtaactatttgttgcagaaatactcagacttgaagcatgatctggtaaggacagaacgccatctgctgaaagagatggggtttatttgccatgtagagcatcctcataagttcatatctaactaccttgcaacacttgaagcccccgaactgacgcaagaggcatggaaccttgccaacgataggtacttcatttgaactaaacttaccttattgtagttagatattcttattgaattttatgcagttcaattatatcttactcttaagtcttaactagttttttatagtccttgggaggtatttctagttgtagactattaaggctgtgttcggcagcttgtgttcccaacccctctccctcgttttctgcgcacacgcttttcaaactactaaatggtgtgtttttttgcaaaaaaaattctataggaaagttgcttaaaaaaatccatttattaagttaattttagctaatacttttttaattatgcgataataagctgttacgttttccatgccggagggatagactcccaactggcacaaacgaacacagcctaattgtacctgttatcttataatacctcccaaggaccaaaaataataatatattctaccttattggtgaaattttgttttagtttagaattattggttctcttaaaagatttttccagcattgctcttgacttttctcttatagtactttgtttgtctcgcagatccttaccatttctaattaactattgaaaagcttgactaagtgataccttttattttctgtagtcatctgtctgtatcatgtcatatatgtacatgaatccttaatattctgatcagtgtaaattatgaatgagttgcctgtagtttcagaatgtaccaatttgctaattgcaacagcaaaaatcaaataggggctaaaatgctaaatgaactgtattctggacatatagttctcccttatgctatcatatgtatagagttgtagatagtgctctggtacagaatgataacagttaacaaataacaaatcttcccatgacagtgataagatccagttaacctagtgcaggtttgtagtttcagcaatatgaatgcagcattgttaaaggtgcccttagaccaaaacaagccttcaataataatcgcattagcttttggattttgaaaacttagtcacatatgctggcccaaattacaaggagtatgattatgctgtagaacttgtggatgaacttgatggccaatacaatatttttttataaaaaatatgagtatgttaccaaaatgttgttagctgatgatcagccttacacttcattggaagattatcatgtatgttgtatgaaaatctcatttatatctcttagcttcagtaagataagtggaagagaagaaaagaaagcaagggaaatgtaacgtgttagcactcttggtctaatgcaaccagaatttattgtgcctttaccgagatgacttttattttttttttcatgtaatagtatatttagatgaccaacctatttgccaagatgatgcctgtcagccatctcataaggaatgcatgtgtcaaaatattttaaaacttcaagtctgatcagtcaggatttagtgtaccataaaatagatttattatcaaggcttactgcttttgccttgagctttttcaatcatactgagagttgagttcaatttgcacttctaattcaatgcgtattttgcataacagcttgcggacaactctatgtgtaagattcaagagtgaagttgtagcatgtggagttgtgtatgctgcagcaaggaggcatggcgtgcccctccctgaagatcctccctggtggaatgtgtttgatgctgatgaggcaggaattcaggaagtttgcagagttcttgctcatctctacagcctccccaagtcacaatatatacaagtgtataaggacaatgattccttcacgcataggaggacttctgatacaaatgcttcaaaggttaaaaagaatgattggactcgctaagtttaatttaaaaaattgttaccgatgtcatttttttgtactcacgtgcaggaaagtcctgcaacgactgttgcaagcgataagggtacccctgtaccgtcaagttctagccaggaaaaggatgcactgattaaggcagggtcagataaggtgaaagaaaaaggtgacgatgatgggaagacgttaccttctgaacccaatggtaaagaaggccctgcagtgaatttgaagagtgagaagtcagaatccaatgttgatcgctctcgggaaagagaaagagatagatcaagagggcgggaccgtgatagcaggggccgggactctgatcgtgatagcaagggcagggactccgatcgggagagggagcgtgatagagaagcagacagggataggcagcggagacaccattctaaggacagaagttcaggtattgccattgatttttctgctttggctctttttataagcatgttacgttttcctgatgttgcatgatgcccctccaatgcaggatactctgacaaagagaagtcaaggcaccgctcatcaagaggtatgctagcacattagcggccctccagtggaccatatatagttttcttatctgcttcattttggctaccttttcagatcgtggtgatcactacagttcgcactcatctcgtgacaaagatcggcacaggcggcagtaatctagcagagctcgaaaacatgtaaactgatgaagtacacgttgcactatcgtggtaaaattgccattgcaactgggctccggggtgtttgttatgattgttaaactctttttttatttgcaacagaaaaagaattcttcttttgtggtgagtatcagacttcatagacttagctttgtatgacgcgtgggtctgggcatgaatcacttgttatgggagaaacttattcttgctatgcaaatctatatatcagttgattctatactatggccacccagattttacatagaagttgcctaacccttcgatcctcatccatgtcgtgagttggattagcatagggattaacacttggattagtgcttggtgccctcagttccctgcctctccttgtggcccaaattgttggatcacccactacctccaggtgtctgccctgccagcgcctccttccactgctcctccccctttgtggcccaaattgttggcccgctcactacctctaggcggataccctgccttgccaccgctcctccccctgatgcactgctatgttgtcgatatccttagctaggcgctccccccccccaacccccacccacccaaatggtccaaattgtcaggctgctaaccgctgttgtggtcatcctgtgtccggtcccgttaccggccctcaaattcgcatggtgtcactgtcgccaagcgcagcagccctcaatccgcctgcactgttagagatcgctgtctcaacgattgcatgaagtagggctttatctgtgggaggatcctacttgcgctatcgtgtccttggggggactcgatatcatcatctctaacaacgctagcagatcctctccgctagtgccacctaaccctatgaaccgcactcatgccactgcctccgccgctgtcacctgtagcctccatgccaccaccaattgaaggacaagtgccattctgaagattatactaaaagcagtaagacaagagcttgggatagtgtccaggaagacgacagataggtacactcttgccaattattgcagataactcaggcttttactttgtacaaatcagaagagaagaaaacattttctttaatgcactgttgggagattttgtatcatcatccaaaggggaatgataggttgtcccagaaaaagcagaaggctcatgtcgatcctttggagagaccatctgcatgcacaaactcaaaactctagtgaatttcattacaaccccgacattaatacctctgatcctttggtgagaccatctgggaagaagctggaaaaggcaaaatgcgcgcgaggtaatacttcttcatgctcaagtgagagtagtcctgtagttattgcattaaataacatatggttagagaaaatgtagatgagtgcacaatctagggagaaaagaaatgaccggttggctgaagttatttcacaagagaaagaaaggttgaaagtagagaaacgaaagttagatttagaaacccatgaaagagaagaaagaattatgaacatggatcttagtgctagatgggccaagaaaagcatattacttgtgtttgcagcaggagatcatatcgtgtcatatggattgagttcatgatgtatggatatatatgtacggataaggtataccctctacccttggatgtacgctatatggcaatatggtacatctgcgcgtgtacggacgttctctgtatacgcgaaggaaatttatcacgaagtccaccaatggaaaggttcctacccgtataggactaggtcgtcactgtatcgtgcagggtccgatgtctccgagtcctacttggagaccacctgacctgagatataaaagggaccccccgggaggacctaacgcatcgaatctcatagccaatacaacgaccacagcctacgaagccagagcctacaggagccaagtcgccaggtgatctagtcgaatcaactcgactacgatctcatcggtatcatcaagttctattattccctttgtaatttgtggttctctccatataatcccatatcaactggattagggctattacctattaaggggcctgaaccagtataatctttgtctcttgtttccttgatgtcgtattacgtagatcatcgtaccaacgtacctcaataccctctatatccggtctacgggtacccaccgtcgacagtggcgcgccaggtagggggccttggtgctcaaggttctactattatgacatcaagcttcgtcaacaatagcgtcaacaatggagtcaagcaaaaatctactgtatgatcggcaacgatctatacaagaaggcgccaaacgggttacttcacaaatgtgtctcgtccaacgacggcaaacacctcctcctcgacatacacgaaggggtctgtgggtcacatgccgccggtcgtacattggtcagaaaagcctttcgacaaggatttttctagccaactgccctcaaagacgcttgcgacatggtacaacggtgtgaagcttgtcaatttcatagcaaacacacaaagcttccagcgcaagcactgcaaaccatccctctcacttggccgttctcgtgctggggctcaacatacttggtccattcccacgaggacaggccggctacaaattcctgttcgtggcgatcgacaaattcaccaaatggattgaggcaatacccacgggggaaatcaaggccgacaatgccatcaaattcattaaaaggatattttgtagatatggattgcctcaccgcatcataacggataacggctcccagttcattagcgccgatttccaagattactgcatcggactggaagtcaagatctgcttcgcctcggtttctcaccctcagagcaacggacagttcgagaggacaaacggcatagtactacaagggatcaagacccgtgtctacgacaggctcatgtcacatgacaagaagtgggtcgaagaactcccctcggtactctgggccgtgcgcaccacaccgacaacgtccaacaaggagacacccttctttctcgtgtacagctgagaagccatggtcccgaccgagttacgacatcagagtacacgagtacagaagtactccgacgaggatcaggaggaacagcgaaacgacgatgtgaacctactcgaggaacatcgagaacgggttgtcgttagggcagctagctaccaacaggccctccgccggtatcacgagaagcgcatccgagcacgcatactttcgatcggcgactacgtcctctggcgagttcaaagccaagcagggtgaaacaaactctcacccaaatgggaaggaccgtacacgatcacacaagtcttgcggccaggcgcattcaagattgcagacggcgatggtcgcgagttagcaaattcttggaacattgaccaattgcgtaaattctatgtataagtcaatagtatccatacttgtaagacatcttacaacttcaataaagcctgtttcaaggtacagatttcaatcaaagtgtcccttcccgatgattccttacccagatgacacctagcgttgaaacctatcctcatgttcctttacgccgtcctgacaaggcctccgaggaacctaagggaacttcggctgaggacgcccagagctgataatgccttgtcgaatcctttagagacgaaagaccatgtaagatctggtcatgtaagagttctcgccgtgcgtattaaccaagccgtgtaattggaaatggattttccaactttacggctgggggctaggattagtgcttatgcaactaaggcaagtcggtccaagagccttatcttccgagaaaaattctccgacgataaggctgggggctagggagagtgtatgactcaagtgactgatcgaagtcacgaagtgagaagacactcgtacacaccgcatccagagtaagaaaagcttagttagatagatttcctttctacttcacaagtatttcttacagtctgcaaaaaattccgaaatatattacacttttcctaagatgcttgtcacagatataaaaagagtaccaggaaggccaacgccaatccattgactggaagactttctccgccagcggcgccatcaacttcgctaggttgtctatctccgcgggagtcctccgagaatgagaaaacccttcgtggaggaactcgaggtacaactgcggacgatgatctcgtatacacaccagcacgtgccctccggcataccggctcgatcgacggcactcctgcttcagggcctcgtcgatacgcttgccgatgccttcgagctgagcacaggctccgtttagccacgagatatatccggccgctgactcctcgggatccccgcgaggtactcggagttccctgcagacgacggccatgactgtgcaacaactcctgaggtacgagttgaaccacaccttgcgacctctgagtgcctccacagcccggtcctttttcacttccaacatagtcctctcaagttcggcgacctcgaacttcgtcctccagtattggatgtgacggtcgcgatcagcaagcgcactctcgaggtctgctcgacaagcaaacaactaagttaagctgttctcctcttttgagagcacggcaagttaagctaatccagatagaagagcaaaggagatggaaacaaaaagaaccaacctaaaggagtcgtcgtcatgcatgtctccacgggcagattctggtctatgtcgtcttgcggcacatacggctcaagcgcaagtgccggaatgattacaggcaactcaggctgcccgcgttgctggacatcctcgacatcgacatctctacaaacaacaacaaagtactcggaatcaaaatgccaaagaaaactaaggtgataactgcacacaccaaggcagttggaaccaacaaattgttttacaatgcatgattgattaaggagtacaggcgaaccgaagtcctactcttcaaaaagtgggagaatagactctcctagatcactgacttcttccatcacgtccttacgcgcgtcgttagccgtcccctgatccaaaatcctttggagatcgagctcaaggtgcgccaaccttatgcacgcgaggacatggcacgtcccgatgtagatcccgttggacgtctcctctctgatcttggtcgcatgcttggaggggatcgcctccatcaccgtcgccagttccgcgagcgaagtcgtcagcgagaactcgtcgggattcaccgggatggtggtcgtgacaccgcactccccggcgagctggtgcagaccggtgtaggtaacccacagcgagccacggatctccgacaggttgttctcgagctccgacatacggtgctcaagcccctgccgttaccgttcgttgccggccaccagctccctcattttctggaggtcctcgcgaacctccgtcagatcacgcgtcagcctgtcggcgcgttcgttcgccgacgatgccgccgccgccctcgcctccgcaatctcgtgacttatgccgcgagcaccagcctcgaggatgcgtcccatcttgacttggagctcctcccaggtgaggacgacagcaggcgggtctcgagcgggcacaagatcgctggctgggccgctggacgtcacctcgcggctcctgggcacaaccacgacatcggtcgaggccactgcaggagacgcgcttgagttccctctagacccatcttgcgtagccttcgcccgtgctgccctacaaaagattgccatggtggtcatcataacagtatgccagaatccgatcaaggcaagggcctcaaattttgtccagttacttctcgccgagtgtcaccggcctctgtcgtcgtggaggcgggggagacgcatccgaggcctaggtaaaccgagtacgatgtgagagcgacatcttccgactacacaatcgataaccaaagaggcttaccgatggggtgggcgtcttccggcggttgccgagcacggaggaaaacttcctccctttcctcagaacattgccaccactggtcgtggcagcagcagcggcaagggccccgtcggacgcctcctgggcaatgccctctttcaacgaagctaccgcctactggtccacgagcggcccgatgatgtcagccaggaggagagcctgcacaacatgaagtcacaatacgatctaagagttaaaaggtaaagggtcatcgattacactcacgttgattgcgtcttcgcgctcagccgcccctttctcgcaaagaggggtggggacgttgctcgccgtcgtggggccactgaccatcacctggccaacacgatgctccacggttgcgctattcaaacctgtagatcgagaaccaaatttcgataagtcaggaggaatgcgcatgaaaggagaggaacccagaatacaagaaaaataccccgaggagaaacccgggtcgcgtcctctggcccagagtagtcaaaggctggatgggctcgagcctggagcggctggatccgtctaccaatgaagtcggcagcgacttcatacctcgacaaccctcgtactcggaggtcatcgatgatatcgatgaaagactggaggaatggggtcaaggcgggtttggcggtccaagacggaatcttgtctggttgctcctcaggaacaatgaagactggatccgaatcttctatctgaagatagaaccacctcgcccgccatttgctatgagaagaggggcactggaaagggatgtatcgcgacttcaggccatcccgaagtcgaaaaccagcatacccggatacctttttaggttccatccagtgcaactcgtagtaaaaacggaagaggtcaagaaacggctctaccccaatgtaggcctcacagagatgagaaaaaatgctaaggaaggctatggagttggggttcagatggagcagagaaaggccgtagaagttcaagacaagaaggaaaaactcagatggcggaggaagaaaaccacagagaatatagtcctcaaccgcaaccatgcggcccaagacgggttcaggttcagtacctcctagttccctctccatggtcccacgactggggagagcgccctcctcctgcaacttcttcaaggacgcactggtggaagtggacttgtcgaggtccatcgccgctggagatcgccggagaagaaaccgaggcgagcgagttagggtttgcatggaagcggagaagacgaagagcgtttggaggctaaaaagtttttcgcaacagccggactctaaaatggattcccaaaacccccttaaataggcgcactatcgacggtgcgaattccaaggaaaggagagagatggccgccggaaatttctgggtccgttgcacgaggcggtttttggacttcaatttaaattcacttataaccgttgaacttcggatggtgttgtcgaccactccttgtctctacggttctcatactgagatcgaccagttgagaacgacagcaacttcgacatcagaagtcgcgatcggttacatgagttcatttaagcagaagtcgggggctactgtcagggttacggataaggtataccctctacccttggatgtacactatacgacaatatggtacatctgcgcgtgtacggacgttctctgtatacgctaagaaaattcatcacgaagtccaccaatggaaaggttcctacccgtataggactgggtcatcactgtatcgtgcagggtccgatgtctccgagtcctacttggagaccacctgacctgcgatataaaagagaccccccgggaggacctaacacatcgaatctcatagccaatacaacgaccacagcctacaaagccggagcctacaggagccaagtcgtcgggtgatctagttgaatcaactcgactacgatctcatcggtatcatcgagttctattattccctttgtaatttttggatctctccatataatcccatatcaactggattagggctattacctattaaggggcctgaaccagtataatctttgtctcttgtttccttgatgttgtattacgtagatcatcgtaccagcgtacgccaataccctctatatctggtctacgggtacccaccgttgacaatatactatttttactatttcttaataggttgtgaacttttatgttgtatgccgtgtaggctttgatgaattatgtactgttgcttgtaaaaactttatgggttgtgaacttttatggtgtatgctgtgtaggctttgatgaattatgtactgttgcttgtaagaactttatgggttctgaacttttatgttgtatgccatgtaggctttgatgtattatgtactggttattgttagaacttaatggtttgtgacctttatgttatatgcaagaatgctatgattaattgtgagcacatacaggttgcatacataattaggattgcatacataattgaggttgcatacattattgatgtattgcttacataaatgaggttgcatatataattggagttgcctactacataactgggaggttgcatactacactagttcctacaatgaaattgccatagatgctcaactagatcttcttgaagctgagagtgagtctgtctatttctaacgttatgatggttctgaataaagtcccacagctcagctataggggtatgcaaaggtgtgactcgctctccctcatcatcatagttgtagtcaaaaccttctttatccctctcatcttctactatcatattgtgcaaaataatacatgctgtcatgatttcacttaatgtgtctgcataccaaaatctagctggcccacacacaattgcaaaatgagcgtgcaaatctccaaatgcacgctcaacatctttgcgagctccttcctgttgttgggcaaagtgtttcttcttattcccttgcggttctaatattgtcttcacaaaagtggcccatgagggataaatacgatctgcaaggcaataacccattgtgtagttgtggccattgatgtcacgaccggaaataacccaacgggcgttccttacgtgcgtgcattattccttgtcccaggaggcaaggtacaccaaaagttgatacaattcagagtttaacaagtggaagcgtaattaattaatttattacatgggcggcgaagacccagcacacaagaagacaaacgaaaaacagcggaaaactagggcgacgaccacaggcggttgacggcaggcacgagctagacaccaaagccttcatcttccaggaactcctcttctgagtttgggaaaaattgagcaagactgagtacaaccaccgtactcaacaagtcacccacaagtgcagaataaatgcaagggagtacaagggggttataatatatagggttagggtttgcagtaaatagcattaatagacacttagttgctcaaagctattttgtaaacacgattctagagctatataatattattaatcaatgccgtgaacccacacgagcctgccttaacccaaggcctacgatgattcagaccaaactggcaacccgaccctgggtcccagctcgtcccaagccaacccaggccaaccattccacattttagttgttaagcaggttttaagaattaaaacactaacttgggtacattgctcggcttgcccataaccgagggcgcggctattcgaataggttatactctgatcagaggtgtacatctttacccacaagacacatcttcctcacgtgtaaccacgtgccacataccaccacggtatacggacggaagacgtgacatagtttccaacatatcctagccatagacaagagtaccgacccaaccccacctacggccggaacccctgggacaggtaggcaagactgagcccctagcagcaggacactggccctgtgccatgacatctcgactaccgggccacagctcgtgtagccttcatttgtcctagagatgtccatcgacccccgacttcgtccatctccatccgtgtacttttgtttataaccagactgagccacaaactaagccttacccactagacatgtggaagtacggtagtgctttgcaacagaggcccgaagacctgtccttatatggccgaggtgctactatcaaaaccatgcaccccgagcccagcctaaaaccattttgagggttttgaatagaggggaggtgtgaatccaattccacaatgatccaacaattccatagtgtccaggtgatatgaatatcccaaagtctagagttgtaaaaccacctaatgttacctaattaagcggcgaagcatctacctaaaatcatactagtggtaccttgagtagagtgtccactagttggggttttgtttattctagggtaaacaaggaaataataacaataacaataataaggtcataacaaaggtaaataggcatggctagataaaacagtgataacgcgggaatttaaataaagcgataatgcaataatttaaatcaaaataattttataaactgggattcaatatgttcaaggatgatgtgacttaccttgctcgctttcccaaacgtcggcttcaacctccacgaagagcggatcttccgaagctgcagcgtctacacgaccaacggaaaagaaaaggcttttactctaataaactccatataaccagcaagaacaaagcacaaaaatgggttcttgacttcttaaggaaaaattagagacttgaacggtccaattccgagttcaaatggccaagttatggccttttgaagtttatatgctctttaaatgaatatttgcgaatttcttcatttaaaatttaatttaaaaagggtttattgcgtcagccgaggggagggggcgcgcggaccgggtccacgggagtggggcccacgcggcagcctcacggtccacggtggaccgggtgcacccgggctcacaccggccggcgccgtgggtcccacacgtcagccgcacccgaggacgcgggcggctgacggccgggccccacgcggcggccactcggcgcggccggcgggaggcggcgcccgcgcccctatggtcgccggcggcggccataggcacggcggagcggcggtcgagagaggggaagggaagggggaaagaggcggcggtccacggctcaccctaggttgacggcggcgacggaggaggcggccggagcggagggaggcggccgcgcggctcgggtcgacggggtcgacagcgttccggcagtcggcgaccgaaacggagaggtggacgaggttggcgaggatgcggcgaacccgaaggaggcggcgccgaggtgggaggtggtccggggcgacgacggcggcggaccggagctcggcggcgacggtggagagagagagcgacgtcgcgagctcgaatccggcgaggaggaagggcggcgagaggcggaaacggacggaggaggtgcggggagggtttaaatagggttggaagggggagagagcggccggcggggaaggaataggtgcgggaggtccggccaccatcaatggcgccggcgagatttgcgggggcaaatccgcctgtttgaacgcgagagagaggggaaaaaatggggggaaagggagaggggatcacggggagtgatttcccccactttattgcacgcggggacggcgggaggcggcgggattcgcggcggcggcggcgctaaggcgcgggggaggcggcgggagcagcgggaggaaggggatgacgggtgggccccacccgtcagcaagggtggcgggcgggcccgcccgtcagcggcgcgcgcgcggggagaggccgagtgggccgtggggagaggagagagagggggaggtagatgggccgggccggcccaagggagggaagggggacttttagggtttttctttttataaaataattttaactttgtttatttcttaataatttttatttgtgctctgaaaattccactaaaatttatttacgcattttaggcttttaggaaatttacaaaaatcctctaagccttatttgacttttaactttgcacattttaattgttggaggctttcacacggattttaattattctaggcataatctagaggatgtattttagagtcattttgggacgtgacaattgatttcatatttctcttgtggagcctatccttcagctagccttgcaaagagaggggaacgatgaagaacattaatatcattgtgagatcatggcaaaccgaagaatgcatgcggaatccaaagatcttttgaagcaacaacttccaaaactatagttcgtttgcttaattttcctttatacatgcctttccatgctgaagggcaatttttccactcccaatgcatgcaatctatggatccaagcattccaggaaaacttctctgctctccaagtgcaagtaatctagaagtgtcagcactagttggataacgcaagtactcgtctccgaaaatctcaacaatagctctcacaaaccttttcagactctctatagtggtactatttgcaatttgcagatattcatcttgagtgtcggctacgactccattggttatcattctaagtgtagcggtaatcttttgcaatggtgatagacccaaagcactagcatcatttccttttttgggctaccacatcattaactatatgcgcaagaaaagaggacgactcattccaaacctacgcaacaaaatgtgaattaatataagtggagaacaaaacaatatcaaccaaaatatgtaaattaattgcaagccttctccagaataagactaggtcatatgtaggatgctccaataagtagttgtggtgcaacctatcatggccggctcgacgattacgacgaataacctgacgatcaggaacaaaatcacctcgccatggagcattcgactgctcatattcatcttgcgcgactattgttgcagcaacgatgatttcatcactggatgaagatgattcatccaatagaacatgtctcaaaatgaagatcattgagtgatggaagaacaacgcacaataatgtggatggagcaaaaagatatgagtacctactttacattatgttcatgttatactgaatagacggctagcttatctgggagatgctttggtgtgggtataatgtttgcttatgcaattactctatgtgtggagattatgggtaccccatacctacatggcatagttatccgactggctataggggataacttatatctatggaatatgtaacagatcatgacttgggtattacgtttccctgtatattatggaacggcctaaagtcctggtttgataagattgtaaagtagatttaggaaaccgataccgtattggttaaggtttctatcttgtaaccctgccccccaacctatataaggagggcagggagcccctctaggggcatgatgagacaacctgatcgtcagatcaatacatactcggcggattcaaatccccaaacaggagtagggtattacctctcattgagagggcctgaacctgtctaaatcctttgtctccacatccatccacttttaggtctcgtgcgctaccccgttttattattgccgaattcatgtttcgacagttggcgcgccaggtagggggtgcgtcgaattacctgtcgaaaagtgcgatggaatcaacttcagaagaaaccccgagatcaatctcatcaatttcgatggctcaaatcttcaatcgggtctaccgttgcaatttaatctctattagattaatttttaatcattgtttgatttcctgatattttgacgaatttcatatactggatgagatcgaaacacggccatcatcgtcgcctacttgggtgcccttgccgtgtccgagtgctcctctcttcctttccttgcagatggacgtgttgcaggagtggcacaggccgccaggattcgattcctgtttgcatgtatgatggttgatgggctccgccggctacctccgatgatggcatcatgccgaaagaacatcgagttagctgttagttgccggggcttatacatgttgcatggcacgtcgccggctatcactcatgatccagcctcactgctcgacttgagtttttcgtttcaatttgttatcaatatatattagattgatttctaatctcagattaatttcttactattttttgttgttgttcgcatataactacgcggcactattgaggcgattgatgctggtcatggactcgaggcgtctcagctttccggtcgatcggccgcgagtccactccgccggcttgtcctcgccaccgccattgctgattgcaacaacgacttcaccaccggcctgcctccgtcgccgccgactggtgttcccgtctgcatggctggcctattatgccgccgctgttgggcgtctacgacttcaccgccggcttgcctccgtcgccgctgagtggtgcctccgcctacacggctggcctattaagccgccgctgttgggcgtccacgacttcaccaccggcctgcatccgtcgccgccgagtggtgcctccgcctacacggctggcctattatgccgccgctgttgggcgtctacgacttcaccgccggtctgcctccgtcgccgccgagtggtgcctccgcctacacggctggcctattatgccgccgttgttggatgtctacgtcctcaccgttggctcaccttcgttgccgtcgactggtgtttccgcttacacggctggcctattatgccgccattagtgggcatcttcgctttcaccgtcgaccgccttcgtcgccgccgactggtgtcttcattgttattgatggacgactttgttcccacattggccacttctgccatcaccaaggggaatattacaaagctaagtcatcatttattttattctttatatgatatttttccttttcctctgcctcactacaccaattggtcttccattgagtagtgagtcgggggctacagatgttatatcatatttttcataatatttatcttgattgcttgcgacataatctgagtacaaaagtacctatcgagttatggagttctatcttcctatgctttccgtttggtttgccaatggatggttgcctttgggccgattcctagcacccgggggctcgttggatggaccgagtaacgcaaggtgctaagtattattcggaataaatcaaaagcatagagatgagataaatttattttctgctcttaataattgcaaaagtacccgagtagtaaattctgatccgtgaaactttgttccattaatgacgaactcatgtcactcatatgcatgtttgggaagtgcctaggccgactcccggtgcttgatggttatgactagtcggacagagtgtttaaacgtacagagtcatctgctcggggaaatcaaaattgacaagaggagaaatacatatttataaatattttaaaatacttgattttttctcgagtattatatttatatcagatactactcatcctatatgtttgttctgcaggatccagatccagatatgcataaaagggattcatggctttaagcttatctcttacgctccaggaatggatcagtcagaacatcaccgaccggcttgccttcgccgccgccgactggtgtttccgcctgcacggctggcctttatgccgccgttgttgggcgtctacgtcttcaccgaccggccgcctcgtccgccgccgactggtgcttccgcctgcacgtctggcctattatgccgccgttgttgggcgtctacgtcgtcaccgaccggccacctcgaccgccgccgactggtgtttccgcctgcacggctggcctattattctgccgttgttgggcgtctacgtcttcaccgacggcttgccttcgccgccgccgactggtgtttccgcctgcacggctggcctttatgccgccgttgttgggcgtctacgtcttcaccgaccggcttgccttcgccgccgccgactggtgtttccgcctgcatggctggcctttatgccgccgttgttgggcgtctacgtcttcaccgaccggccgcctcgaccgccgctgactggtgtcaccgcctgcacggctggcctgttataacgccaactgatgctatcttcttcacggctggctacatcgctgtcactactaataggcatcagtatcttcaacacaagctgcctacgtttgccatggctgccgactggtttcttcacttccatggctgcatgattctgccagtgttgattggcctattatgcagctgttgttgggcatctacatcttcatcgccggtcgtctcgtctgctgctgactagtgcccttacctctacgtctggtttatacagctaccactactgatggacatcatcatcttccgtcgccgactgattatgctgccgccgattggtgcttttatcttcacaactacgcgtcttcactaccggtttgcttctgttgccgccgacttgtgttcacttcattacggcaatacaactttgtcatcatggtggagcgacttcatctttattatcttcggcaccggcaaactctattgctgctacttcgcaagttttactacttcaccaaccacgacgtctttgtgaacctcgacatctcggcatgcaatgccatgatattttactacaacaagtgactctccaatattcaagatttctacttggacaccttcaacacatatcttcaatcaagcaatgactactcgacgacaagaagctataattctcgactctatgttcagttgtttctcaactaaccaaagagtcgggggctacacaaatataaggctcaaaatttgacaaattttatgtcaagctgaagaaatcaattaatcagccaatgagtcaactccaggagtcattatcttcatctttgcttcggaacagacattctacttcaacaacttcaaatatttcggtttagacgagttgggcaacaacatcaactctcctccaattatttgtcttcacggttggcctactacgcaactgccgatagaggatctcatcgttatcatcggctgctacatcgctattgactggatcaccgacatcgtcatcttcatcaacatcttgttaagcctcttcaacatagcctactctgctgccgttgatgggaaacttcgtcatcatagtcggctatctctgttgccgctaatcatcattaccgtcggatgcgtttgtcgccgccgattattttcttcatcttcatgattggtggatttcgccatcaccgttgatgcgcgtctacgtcttcatcgtcggtttgcttttgtcaccaccgactgttcttttgttgttgttgttgggcgcctacatcttcactgctagctgacctgactgttgccgactggtttctccgcctccatggttatgcaacttcattacctttgattggtgtcactgtttttactaccactgacatcttccgttacttctgatgagcaatttcgtcttcatgttggtcatttcatctccatgccgactgcgtcagctattgccaatagacaattttgactatgacagaaggacaagctatatgctcaggggctcatcaactcaagcgtgaggattatatctccaatttggacttgttccggatacattccacatggattcatagtcatgagtctattttctatgctcaaagactggaccaattattattccccgtaagggctatcaaccgaatacttgcgccagtcgggattcaattattatatatattttggagtatctcataagggataatcactcagatcagaagctattcatatgagctacacctggtctatatcacccggaagatttattactcgagagcatgttacatgcgtcatcctttaaagggtgtcgaaggcatattttttggtctaggcctaatatgtctgcagcccatattttcaggtgtggcctgtcacgttcttttagggacttaggcacttttcgcttaggccaaagtgcgcgtgatcaagtgcccaataccttaaaatccttttataccgcagttactcaactttttaggagttggtacaatgcatcttaaaaggtgtcaaacagtaaagctttatatagctggcccgctgacttttttatatataagtcaaggtgctgtttgggtttttaagcaattgattagatacaatatcattgcttttcgccacgtaagtgtgcatttttattgaccaatattatggcttaggctgattatatattgtggtcatttttcaggcggttggtaaatcctttatgagtttatttacttggattttataccacatatgccatatatttccgggtgtggtgaaaccatgtgtcttttagggacttaagcacatctgttaaagcagtgtgcgcatggcgtatgcccaatactttggaaatttctttattcacaatatataagcttctttatagctgttttgctatgtgaattttcaatgatgtaaccaactttaggttacactcatcatattttacaaagcagtcggtatatcactcggatcatgttattcagggattcacaccgcatatgctacatattaatatcaggtcgcttggttgactataattattaaaaccactcggttggttggattatttattccttgactatatgcttggtttgttcaattaaccacatagtcgggggctacacctattaggtgcatctagtcgatgcacctgactttatttttcagccctccacagtcttcgtatttggtaaaagtacttcggagaccatggcgaagatgattgaagcactcagctttggagtaatctagttcgagagaagattatcttttcgactgtgaaggtctcaggggctactgtggagattatgggtaccccatacctacatggcatagttatccgactggctataggggataacttatatctatggaatatgtaacagatcatgacttgggtattacgtttccctgtatattatggaacggcctaaagtcctggtttgataagattgtaaagtagatttaggaaaccgataccgtattggttaaggtttctatcttgtaaccctgcccccccaacctatataagnagggcagggagccccctctaggggcatgatgagacaacctgatcgtcagatcaatacatactcggcggattcaaatccccaaacaggagtagggtattacctctcattgagagggcctgaacctgtctaatcctttgtctccacatccatccacttttaggtctcgtgcgctaccccgttttattattgccgaattcatgtttcgacactatgtcatgacgatgatattagagtagtatctggtagtttaggcgtggtgtctagattacgggatatcattatttggagttatatattgcggatgagaggtgggccgctgatggtgacagctcagtacgggtattcctccacgccggtatataatcctaagttaatttcctagggagggtattcctccatatttagccccggttgtatggtcatgacgggctgtcgtaaggaactcggcagtcaggggtggcttctcgaagtaccaggaggacatcggatagagggtattagctagtatatcggttaactagaatgtatgtatactatgtatattagaagtataggaatagattttcttcctcttttctatctacttagcttagatgatatattatgagaatgagtagtgaatgattgtgtgtcactctacccttggattatcttaacccctgcttagaatatgatcatcacaagtaatgtataaattattagtcaatgttccctctacatgatcttctcacgagataaaataaatacgatacccttggaatactctcgggtgaaatgctacaatggtatatctatgcgcttgcggatgaactctgtaaccataatatatcagaagtatttctgcgccattgctgggtattatatttctagtaatgttattaagaaataccaataagcatttctggcgccattgccggggattatatttctagtaatgtcgttaagaaatatcaacaagcatttctggcgccgttgccggggaagattcataatagagattacttgaacttatactttatatttacctctgtataatcattttcctttgcaggctaaccttggttgttttcactttttgttgtgcaaacagggtagtgcatgactggtttcaacttgccggaaaacttcaaagaaaatccagaagctttcttccggagtgtcaggccacgagtcgctgctccgcagaaaactctaccgacagagaaatcagccgtaccagcgccaccgaccttcaagactatggcaaacaagactctccgcgaattcactgctccctctgctgacaatgtggccattgggccgcagatcaacatgggagacgtggatttcgacttgaagtccagcctcatcatgatggcgcaggctagcccgttctgtggcaagcctaatgaggatgccaatgctcatctgcaatagttcctggagatctgtagcaaacaagactctccgcgaattcgctgctccctctgctgacaatgtggccattgggccgcagatcaacatgggagacgtggatttcgacttgaagtccagcctcatcatgatggcgcaggctagcccattctgtggcaagcctaatgaggatgccaatgctcatctgcaatagttcctggagatctgtagcacgtacaccatcaagggcgtcagtccagacgccgttaggctaaggctgtttccgttctcccttctcgggagagcgaagcagtggttttatgccaaccgtgctgctgtcaacacctgggacaaatactctacggcattcctctcgaaattcttcccgatgggcaaaaccaatgcccttcgtagaaggattttaagtttccagcagacaagagatgagtctattcctgaagtatgggaacgactgcaggagtacatggccgcatgtcctcatcatgggatggacgactggctgatcctgcagaacttttacaatggactcaccccgatgtcccgcgatcaccttgacgcggcagctggaggagctttcttctctaaaacagttcaaggaaccattgatttaatagagaagatggtctccaatatgggttggagcgaggaacgactccagacccatcagcgaggcatgcacgccgtcaaggagacggagttacttgctgccaagctggaccttctcatgaaacgtttggacgaccacgagaaacggccacaaggcaccgtcaaggcgttggactcacacgttatgtgtgaggtctgcggcggcacgggtcattctgggaatgattgcctagaaacccgtgaggaggcgatgtagatgggcaacaacaacgggtaccgtccacaaggaggtcaggggtggaaccaaccacgcccatattatcaaggaggtaacaacaacagtaatttttctagccaggcctccttgaaggatctcgtttttgcgcaatctaaaaccactgatgcgttaagcaaaaagcttgcggccaatgataagatcctagataacattaatgtcaaattagatggctttgcttctgctttttaaaatcagctgagctttaacaaaatgatagaaacctagctagctcagttggcatccttagtccctgcaaatgaaactgggaggattccggggcaacccgactcctccattgaaaatgtcaaggcgatcacgatgaggggaggtaagtctactcgtgatccgccgtatcctaaccctgcaggaactagtgggatatcaaaagaagcgccatctaatgactcggctgacaaggaagttcaaccagaaaagtcagtgccgcaggagtattgtgacacacggttgctgccgttccctcaacggagtaggaaaccgtcggtggacgagcaattcgctcgttttgttaaagtaatctagaaagaaatncccaaccatttcccaaaaaacccggtttggccccccgggttggttttgggggaacgccctttaatttggggcccaaaggtcccacatacgcccgttatctcaaggatatactcaacaacaagagacggctcctaacaacggaggtggtcaagctgatagaacaatgcagcaacttgatactccacaagctcctagaaaagaagaaagatccggggtgtcctacgatcatatgctcgatcggggcacaacaattcgaccaggccttgtgcgaccttggagctagtgtcagcgtcatgccgaaagacgtcttcgacaagctcaacttcacggtgttggcaccaacaccgatgcgccttcaactggctgactcgtcagtccgttacccagtagggatagcggaggatgtgccagtcaagatacgggatttcttcatcacggttgacttcgtggtactggacatggacacgggaaaagaaacgccggtcatcctggggcgtccgttccttagtaccgcagtagccaacattgacgtgggaacagggagtatccgttttcatattaacgggaaggaggaaaagtttgagtttcaaccgaggacagaacaatgctccgtggtcagaatcaagtacgggccaaacccgtagaatattcaagtggtcgaagtggagccacccaaaatggacagcctggtgaaattcatgcagaatttcctagagaaggaaataacgatgcccaagcaccgttattggaagacgccggtaaaaccacccataccggccaagaagttagagcagccggctcagaagaagccgtcttccgcaccaaagccgaagaaggtgtggaaggaaaagccaaagacgcccgctccatcacccccgaagatgggtggaactaaatcagaaggaggtatggtcttgcacgtcggactttaaatgacgcgagcttcgccaacaggtaaattggtatgtatccgcaaattttctttcaacaatttgaatttttgcatcaacatatgtttgaacttcaaaattgcatttatgaattttgaggaaattcttcaaatgaatctttcaaagcaaaccaaaataaaattttcaatgtaaatttgctgtgccacgaccacactgaccgttggaatccaacggccaaaagtggggccggttgggcccaccaggggttcggccgaaccagtgactggccaggccaacggtcggctgcctctctttttgaggcaatggttagtgggccccacaggtcagttttgatcgttgtgggtgcacttcttaagccaaccggccgggagagggaactccaccctgtttaaacacattttcattccctctccaaagtttgctctcaagttcaatcaagctttgatggtttccctcaaattcaaatacttagttgcatatatacaagttgcttgggtgaaactaaccggcgggtgaaattcttgtcattcctaattaacccccgccgagttagtccgttcttgttccattgtgcagaatgaggaggcgactgtctcgtctgttcaaggggtccggctcttcatcaagtcatcatgacgagtctagtactcgttcatcagcagatgtctcgatggaagatgccgaagctctgaggcgactcctaaacgacaccgacctcgaacttgtcagtgatcgggagagacaaacctactacatgctgagcgaccaggagtatgctcacacgcgagagtactcaccggagctgctaaaaaagataggtatggatgttgagtttcactctatttggaaagctgttgattggtagagatttgctgtggtagatgagcctggttctcgtctgcttactttgcaatttctgtacactttgaaagaaatagaagatggtatttcctctcgctttttccgtgaggagttcacacttacatggaaaggcttaagtacacttcttggttttcacgattcctgtaaaatcgatatccagaaaggaatttctgggttcgagaaaaataggttttaggaagatatttctggtggtccaatttgcaagaaacctaggacgaatgatatccataatcctacacttaggctcatgcacaaatggattgctatgactttgtttccttgaggtgatcttagacccattaggggagatgaattgattatcattgtcggtgacatggggccgggggtatcgtgactagaggcttgggtagccgcgatcactcacgtggcccgaccccctcgggggggtcgggcccgacggtgacgtggccacctctccctctgtctccccgaggggtcgggccgctcccatttcggccccgagggctggggcaccccgaccccctgtggtgattggcgccacgtgtgtgggttaggtgagcacagcggcactcacctaaccgcatttatagcgggttagacaagcgcatcacgccgcattcaatgcggcgcagcgcatgcttatccggtctgtgaccagtcgcggtatgtgaccggtcacagaccggtcagatcgcgggttatgtggcaacaggcggcctgtcgcacgcctcaccccgtcccgtcggaatgatgagagcttcctggttctcgtctctagccggagctggcatgctgactcctggagttggtatgtcagtcccggtcagatccattccaggcttcagtgcaagcatggcaagaaaatcgctggccattgaatgaaggatgaaacgggcgtccaccgggagagctgacgagcggagcaggaggcgtgtgtactgcttgtcagaggtcatttccggctgtagattagccctcattgtaaaaagcatgtttcttttcttaggcagagagaggcccatgtggtgatccctaaccagataaaaaaaggaggctcaggcctaaggagagaaaaaagggggggaggtgagaggctggcgacttgatcggagagcctgaactctctctcgctctcgagctctctggctctggagctctcggttttccttcacacacagatccaccagaacacaggagtagggtattacgcttctcagcggcccgaacctgtctacgtggcccgtgtcttgtgcgctttttctcgctgacattcctcatatcgagggcgaagaacctcacttagcgcccccggccgaaccggcaaaggggggcctgcgcggtctcccggtgaggagccccacgctccgtcaatcatgtttgccacggttagaaaaattaaaattactcctgtgaaatgtatgataaggcaatggttagaaagtataaagttctctgctcctgttgagtgcacttctttgattacttggatagcaaaagggctaggggtcgttagcaaccaaattgcttttatctcagccgctcgtccgtgtattgatgaggcttatctagcgcaaggcaatattctgaaacatggagtagatggatctttgatttactttttacccagttgtacaaatgaaatcccgttgccaaccgtatagatgtatgaggcaggttgggcaccaaccgaggatgcacccggatggacctaagctccacgccatagcatcggagtctcaacttgggcaagtgccagtgaggaccggtggcatgcgcctcatgacatccaatggggggacaatcaacctcccagatcatgtggtgtgcctccatctctaagtgaatggtgctcaagttcctctcgttgggacttgggtgaaatcactaggagaatggacacccttgatgtgcagacaggggagatccagtacaacctcacggaacacatagctcaaacgtaagaatggcaacaatctgctgatgctcagttcaccaacatcaacatgatgcagcaacagcacgatgacctacaagcgtactttcgctttcaggggttcaatccttatcaaggaccctgagcgaaagccaagcttggggggatatacctctccctccactaaggtaacttgtatcacattgtatatttccctttccaattgcatatttgctttccacttgcatcttataaaacttgaaaacaatataaaaatttgcaaaatagaaaataccaaaaagataggataggtttaagtcatgctaggtaagacaagctagttctcttcgttgaaatgatgaatagttgctctgttctatatctctgatatatgggttcttggtaaatgctctctcaaaggttaaatattagtagccaacaattatccgggaacctgaggtaaatgagctgcagttgctgatctaagtctaagttgttgcgagatatgagatagtaaatatgagttgctatgatcctgatactagtttgactttcattcaggatgttttgtttttcaaaatgataaattgagagttcctcatttgatataaattcctaccagagccaaaaatgtgctatcatgattaaaccatatacattttggttgcttgtcattccattgaactttgtcaaactcttgtgagttgtgtagataattctcatgctctatgatcaagatcatacacccacatatatgcacatgctaaactcctacactgggagctaagcaatattccattccatttccatattaccaccaaaataaattctccatactttcatatgttttcttctcctaaaaaaatccttttgaaaaagaaaaaaaaaagagagagggaaaggcatggttatgaaaaaaataaataataaaaataaagttatgctccattaagcatgagcatgacactgaaaaaaaaatgtagccatgccctctcctaatcaataaaagaatgattttttgggagaagaaagtaagcacaaaggagaagctttttctttattttcctttatataccatttccatcatataccacacacacatattgcatgatcttgatcttgagtatgtttagtcatttgctttagtctaagtttttatttagtaataaaggcgaatgcaagtatgccatgtttgatccctaccgagctccacatatcaagccttagagtaggaatcaaaaaggcaaagtggtgaggaattcattttgatacacttagagagactgagtgaatcatttgaggaactaggctttcttatgcaaaatcatttgaaaacttccggaataagagttgaataatgattgggtgattggtgctctaattgttgttctgtctttcaactgcccaaggcaaggagaagcagtgtctcgtgggaatcaggggtaagggtaagccaccgtaccaaagattatttaatctgagagagagtacatataccttgcacctatatctttgagatatgcagcatagtagcaactcctgatcaacaaccaagtctttgtttcctttcgtccttcacttgggacgagcaaaggttcaagcttggggggttttgttgacggttgttatcgatcagttttgaccgtcaatattgccaaaatatagaactagtaatgcttgcaacgcatatatctgttagaataataatattccactagtattaggtatactaaccttttgcagacaatggcaataaagtggaggagaatcgacatcaactcagacgataaatcaatcagacgttgtcgataaccagacttatgtatgaatgggccacaaactcagaattgacacgatgaattgggccaaaatttacaagtctacatagtgaagcaatagaggaggccgccagccgaagatgggccgggaagacccagcccatggttcggccgaacccatcctagcaccgttggatgcaaggtttggcgtggacgtccaggattgcatcccaatgacggttggagggcacttcggacaattccccttccacaaccgtcataactacctctatataaggacttcaccttctcacttcactcacacacttcaagtaatagctctctcattcccctcaagtttagtttagtagctctctcattctcatcaagtttagtttagtagtatctagctggtggaataggaatagagtagaaatcaggagtccggagccttcggaagagttcaggtatggctctagtagcttttctcttctcttttgtaagctttgtaattttattagaatactcttttatataaatttatggtattgaaatactttccgagtatatgagtacctactttacattatgttcatgttatactgaatatacggttagcttatctgggagatgctttggtgcgggtataatgtttgcttatgcaattactctatgtcatgacgatgatattagagtagtatctggtagtttaggcgtggtgtctaaattacgggatatcattatttggggttatatattgcggatgagaggtgggccgctgatggtgacagctcagtacgggtattcctccgcgccggtatataatcttaagttaattccctagggagggtattccttcgtatttagccccagttgtatggtcatgacgagctgtcgtaaggaactcggtagtcaggggtggcttctcgaagtacaaagagggcatcggatagatggtattagctagtatatcggttaactagaatgtatgtatactatgtatattagaagtataaaaatagattttcttcctcttttctttccacttagcttagatgatatattatgagaatgagtagtgaatgcttgtgtatcactctacccttggattatcttaacccctgcttagaatatgatcatcacaagtaatatataaattattagtcaatgttctctctacatgatcttcccacgggataaaataaatacgataccattagaatactctcgggtgaaatgtgtttctgcggatgaactctgtaaccataatatatcagaagtatttctgcgccattgctgggaattatatttctagtaatgtcgttaagaaataccaacaacaaacacaaagaagagtacaatgaacacaccaacaacctttacataataggtagaccataacctcaaatgcccatcaaacaatcaactaggctaacagctaaccaatcagtagcaaagatacctttgtggccactcaaaacaaacattatacaaaacaaaacattaaagcatgtcaaccaccataaaaactttaagcaaacataataacatgataatgcaatcattagacttgtacactcgttctcaaagcatcaagcaaacattccatcgaaatatggtttcatctatccctcacagccttcttggaacactcaagtccaaccccctattatgatattgtgattggctgaaaatatcatcactaaaaagagcactcaaacaaatatccagcctagcaagtagttaagatgcatggcatggtggctagtccatctatcactcaaatatttttctcaaaatggatagttgtgaccctaacaattgagacagaacaatagaaggcactagcactcaacacacatacattgttttattacacttactatgtaggaaaagaaaacaggcccaacagacaagagcaacaacaaaaacctcttagcatcgtcatcacatatgaatacaaaatcttaatgatatacaaataaaaacatagtgaaaggcaacacaagatcacacacatacatacaacgccttaatgatgacaaacaaccatggtgaaaaattaacacaagtgtacttgtacaaagcatatggaaaggtaactctatttacgcagatgagcaacgatataaaccacatcagggtaccaatacaacaagataaggaacatctacaacaggcattaagaaatatgggaatcataatcatttgcaatacaaaaataatagttggatgcaagtcgcaaacccacagccatcctatatgtgcatgtgtgtcaagttaatcattgttttccctagaatctaaagcctacactctgataccaactgtaacaccccagaaattcccaaaagcctgggatgccactaaagaaccatacgaccatgtgaaaatgatgaaatttttacattagattctttttgttataaaaaaattattgtggaagcttcgacatatagatacaaggatctaagatggcaacaatctgacacatatgaacaaactaagaatggtagataaaccatggtgaatatctatagtatttaataaatccactataacaacaaactctaattttaccccctaatcacaacatttataaactatgtgatatcataatgtgcagcggtgtagctactcccatccattcgtgcaaacatatccgaccgagtacctgaaaaggctataaggtggtgagaataaatctcggcaagcaaacggctttgacaagctatttaaaccatagattcattgtatagttaattaaatatcgagttatgattcacatgaaaacaatttgaacatccaagcactaaaacatcataaccttatcaataaaatccacatcctcacaaatcctagagaagaaaacacttctcaaagatgtcttcgactgtatgatttccatagcatcctgcaatatgtgtgtatgcaatgcaatgatatgaactactgccttcacacccaacaaggtgtgaagctgcatcatattacaacaatatacgatgatgtaccggtacggtcgcaacaataggttcgtagcataaatccaaatccaatgcaaatgtgacgcgaatgtaggttgaattctagagtaataatacgacaactgcattcctacataggagaccaatatacataattatctccaatagcataaagcataaccataagaatgtaaatcaataagtatgactcggataggtaaatcctttgtataacatataaaagtatcttggttgatgatatataatttcaaagtagaggtagaataaaataacaagtcaaagcggtagcaaaccaccgctacgtttacttgcctctaacaacgaagagacaataccaagcatcaccacctattcacaagtcaacctcagcgtattcactaaaacacgcatataaagtaacgacaaaagttgcacctactgcctcatcccaccaaaacacaataacaaggaatgccacttgaactataaacaatattactacttcaaacctttatatctcaaaatataaaaaggctatgactgcaaaaaaaatacattttagaaatctacaaaacaagacctagttcttttatgtagaaagcacttttttgttctgccatttaaatggtctaattcacacttgaatgcaggcttcagaatctgtacagaatttcagaggatacatagaaaacaactatatccggagttctacccatccgatcaaagtgtactttaccaacatggaaagctcacagaaaactctaaggggcctgattgattccactgtttaacctctccaaaaacagttcaatctacaactatctagattttgacaaaaaaaagcaatagtcatactcaaaaattcatatcgcttattccacttgagataaaatcattccctttggtcagaagatagatcacgatgttatctacaacgtttctgtggacactttgttcagaatatatcattttgaccatgtaattgatggaaaacagaggcactataaatctgcccagcctagctagaactaccaattcgattcacaatgtccaaactcttctctaaccgtctttaaccacgaattaaaccactaaattcaccccagaactgatgcacaaggggataaacctcacctagggttttccttttatatcccacgggaaacagcggggaaactccgatctaacccctccttctactcttctcctcctccacgttccatttttccactttgcttcttgatccaagctatgaaggtggagatctagggagagcaaggtctgctagagaggagaggaagcaaaactaagtataggaggtggaggagtcacaaccggcgtcatgggggaagggagggggggatggttcggttcctctcccctagggttttaggtgggggtaagggatttggctaggctcttgggccttgacccaagctaacttgcccacttacaaaggaactttattcaactaattgtggctatcttaataaaccaaaaacattatcttttatttttttaggggtattagaactatagagcgagactgcagatatatactttttatgttaaaccatagtcctcttaaatggtttaattttgatgaatatgattatttgaaatgatcataaatcgattggtaaaatctatccagtgcgtgtgcactgcatgttcttatctagtgacccttttgtgagccgtctgaatcagttgatgatggttgagatatatattcatgggtgttgtactaaccaagagacaaaaaggggaccacttgctagaatatgaggaccatatgctatctaccagttgtcatagcaattcacttgtattttttagatctgtttgaaccaccctactctacttaaagagaaaattccctgtgtacccctgaaagttcacctaatcccttctataccccctgagatttgctcattctctcccatgcccctaaatttcagtttggatcacttctataccccttccgtcaattgaccgttagttgaccgttaaattcacatcataaagtctattttaccctctagtatcaagaaaatataaatttataaagtatattgatggagtgtataaatttattgtatgcgactattatatttatgagtttatttcgtgaggtattatttgcgacggagcggcggcggcaggcgtcagaggggcggcggagcggcacggcggtgtggtcgtggcggcggtgcagggcgtttttagctggtgcgggagcgggcatgagaaggggaggcgcgagtgcggtcgtgagagggggaggcgcgggtgtggtgtctatacgtatgtttacgttggcttcaccatcaccactacgaattttttaagtagtaaagagtaaagatagtgaggaaaaaaataatctatactatatagtatgcatgttagcttagtcaatactcaatagttagcgatgctattaaacttgctctaacccgatgagtgttaatgagtaatgaccggcacaacacgctagcacgtgcggacgaattgcgacgggaaatcaccatggccgagcttcctctctatctacttctccttgctctgctggtcgccgtccccttcctctgcctgacccgttggtcgctccggcatggcggcggcggcggcggccggctgcctccgtcgccgtgggcgctccctgtcatcggccacctccaccacgtcgcgggcgcgctcccgcaccgcgcgatgcgcgacctcgcccgccgccacggcccgctcatgctgctccgcctctgcgagctccgcgtcgtcgtcgcctgcaccgcggaggccgcgcgcgaggtgaccaagacccacgacctcgccttcgcgacgcggcccatcaccccgacggggaaggtcctcatggcggacagcgtcggcgtcgtgttcgcgccctacggcgacgggtggaggacgctccgcaggatctgcaccctcgagctcctaagcgcgcgacgcgtccggtccttccgcgccgtgcgcgaggaggaggtcggccggctgctccgcgccgtggcggcggcggcggcggtggcggcgttgacgaccccgggggcgacggcagcggtgaacctgagcgagcggatttcggcgtacgtggcggactccgcggtgcgcgccgtcatcgggagcaggttcaagaaccgcgccgcgttcctgcggatgctggagcggaggatgaagctcctgccggcgcagtgcttgccggacctcttcccgtcgtcgcgcgcggcgatgctcgtcagccggatgccccgccggatgaagcgggagcgacaggagatgatggatttcatcgacgacatcttccaggagcatcacgagagcagagccgccgccggcgccgaggaggacctgctcgatgtcctcctgcggatccagagccaagacaagacgaatcccgccctcaccaacgacaacatcaagaccgtgatcatcgtaagccgagctcagctcgatcagctacctccccacttaaaaagttcaatttcctcttctttttgtgcaggacatgttcgtggcgagcagcgagacggcggcgacgtcgctgcagtggaccatgtcggagctgatgaggaaccctagggtgatgcgcaaggcgcaggacgaggtccgacgagccctcgccattgccgggcaggacggcgtcaccgaggagagcctgcgcgatctcccctacctgcacctcgtcatcaaggagtcgctccggctgcacccgccggtgacgatgctgctgccgagggagtgccgggagacgtgccgggtgatgggcttcgacgtgccggagggtgtgatggtgctcgtcaacgcgtgggcgatcggcagggacccggcgcactgggactcgccggaggagttcgcgccggagaggttcgagggcgtcggcgccgccgacttcaaggggacggacttcgagtacataccgttcggcgccgggcggcgtatgtgccccgggatggcgttcgggctggccaacatggagctcgcgctcgccgccctcctgtaccacttcgactgggagctgcccggcgggatgcttcccggcgagctggacatgacggaggcgttggggctcaccacgcggcggtgctccgacctcctgcttgtccctgccttgcgtgtgccgctccgagaccatgagcgatagattgctacagtatcatttggaaatggataagacatacagaaaaaaaaagaaggatcaactggatgtcatcatgtcatcagtatatatacagactcatactctcatttggtgatgtttcaagtgttatctgtaacttttaaattactgggttttgtcatcatgtaacatatttaacctagcattgaatttgtggaggggaatgagtaactcaccagcggtggcgacaacgactttcagattgtagcatcagcgtgttaaaactccgacagagaacttggaattccactacaagaaacttgttaatccatgacgaattcttggtgacggattcataaaccgtcactgacagaggcaatccgtgacgataatttgttttccgtcgtggacgtgcactagtggatattcttggcccgttaactcgtgacggttttatccagatcgtcacagtgtgtgattttaaaatcgtcacagtgtgacgataatcaaaaggcatttcaaaacttgttttgcttgaaaaggatttgaatttgaggttcaaatgaatttaaaaaaatgaaaagctacactctctcttggaccatttctggctcactctctcctcttgggctcgggccagcctccctctcgcgctctgccccttcagctgggccagcggcccattttccacatgggcagccaagacaggctagccgcaggccaccctgcgccttgtaaaaaaacaagaaacaaaaaaatgtagccctctaggggactcgaacctacgacaacacgcacagtattcatgaggaaaccccactgagccactgaagcgttttgccaaacgacgtgcactgtattatatatattaaactgtagcaggtaatggacctgccacctactcgtggtgttcatcataaaattcacgagaatagctgcagatttttacttttaatgcgtgtataaaaatttaaattagtttatctccctcatactaacttcaactttaattattcttttttataaaattttctaaactcatgatctatccatttattgtgctattacaactattatttttgtcatactttcatgtgactttgttttatcaattgaagatttaaatttcaaaaagtggcaacttcaaacaacattttgaagcagtaaatgattgcaaaacaaatcaaacccaaaagacaaattttttttgaactaaattattttgttactaatttgttacttgtatatgttgcatatggtaaaactgaaaatatttgcatatatatagtgtgcgaacaaaaaatatttggagcttgtaggaatttaacctaacacctatagttatccagcaacattcatagctacttcttttagttgattatgtatgcactcacttatacttttcactacaagaaatatattaaaagttaaagcaatttaatcaagtgaattaatcaggaaactaaatttttcctttaaaaatcatggccggaaatatttttgtaaaattctaagcggtctaaattattctctaaaattttccgtgaattttcggagctcaataactagttttaataccacaaaattcatttaacctattaaaataaatggaaaataaattaaaatatctctctgtccttgggccttttttggcccaagtgttactctctccctccctcagcccgcagcctttctctccctcctgggccggcttcccattcccctccttcttcttcgggctgccagcctagcccatttgctcccccctcgccgagaagtccattttagctccctcttctcaattaatttcaaaatataaaaaatccgagtcaaattttatcatactaaataaacttatgtgaaaaagttatcaaaaacaaagttgtataacttaattagatctatcaattttattttggttatttctccatctgactttgattgacctatataaaatttgaattttaaatataagaaaaatcaaataatttttctggtagtaaataatttgaaatgaaaaaaaaatgtcaacaacaaagttgtatgacttatcaagatctacaacttttgttttggtcattttgctatatgacttcatttcaataatttgaatttgaatttcaaattatgacaacttcaaacagcagtttcaaatactaaatgatttcaactgaaaaagtcatcaataacaaagttatataaatcatcaatatctataacttttattttggtcatttcttcatccgacaaagtaatagtaacattatttataaaatttacatatctctctcatagtttataaactgtataagagatatgtacattttgtgaataatgttacaattcgctttaacggatgaagaaatgacccaaataaaagttatagatcttgatgagttataccactttgttattgatgacttttttagttgaaatcatttagtatttgaaaatgttgtttgaaattgtcataatttgaaattcaaattcatattgttcaaaccaagtcatatagaaaaatgaccaaaacaaaagttgtaaatattgatgagttgtacaactttattgttgatgactttttcagttgaaatcatttattatttgaaaatattgtttgaagttgtcataatttgaaattcaaattcaaatttttgatacaaagtcatatagcaaaatgaccaaaacaaaagttgtagatctcattaagttatataactttgtttttgacatctttttcacataaatttatttagtatgataaaattcgatttgaagttttaatattttgaaattaattgagaggagggaggaaaaacagacgctgggccggcggcccgaaggagcagcgggcgccaaactttcagtgtggcgggatgttgatcaaaatttcaacgtgaaatgaccattttgtccagatattttagtggtaacttcggatgcaccatgggtattttagtaaaatcgcattggttcctcaaccctagccgatccaaatcagataagccgccaccacacgcgaggcgctactgcagatgagaccgccggcctctgtctccgccgctgctgggcgccggcctccgtcttcgccgccgccgggcgccgctcaccgcgccggcttcctcccccttcgccgcttgccatgccggcatccgtctccaccgctgccaggcgcgggagcggtggatccgctgccgccggcgcctctcgggcccagagggggcgtgcagcgcagcatccggggcagccaccggtgacgtgaatcgaggtggaagaagcaccggcgagggagagctccgacgagtcctcctcctcctccttctccggcagcaggtcagggcgcagatcccctcccagcagcgcgcctgcttcctacatctcgcgagctccgtccatcgagaggctgctcgaggaggacgccgcactgctgcacgcgtgagcatagggagcacggtaggcgatcatggtgggcgaggacggtttgacacggatgaaaaagaagaggagaggcgccagtctttctttctttgtttcttgcattagttttcttggcgagttttgacgcatgtgcctcacccatgtgcaggagggcggaggcgggatctgctactgtgagagggactggtgattggtgaagcgccccaacttcgactgcgagcgaccgcatcccaactgtaaccaatctctctctatccgctgatgctagttgcttatcaaagttcctgaatctgatgaatgcagaaacctctaatttagttaagcaagtcaattcatgctgtaacaatatgatctctgacaaaaaactgaattccttgtttctgcaaatgcaagtgcagtcataaataagaaagaatattcgtgaaagtttcatagaaactagataaaaaaaagaaagtgttttagataaaaaaaaagaatgtgtttattttcagaaatccacagttgctatattttcagatatcttcaaaactgaataatgttttaatccatttgccaacaaaaagaaaaagaggtgcagaaaacagcttacttgggggataccatggatcatgcttgatttgatcagctcaacggtgatttgatgctatctagattcatccttttttttttaagttcaacactgtacacatttgctggacataatgcatatatgttgttttcagcgtgacaaatacaatgaagaagaacctaatgcatttgatttgttcaaggagttccactacagcaagaaaaaaaatgctacaccactgctgtatagtaggctattgtaagataagtttcaaactttgctctttgtaatgcttatttttaattctctcatcaacaacaatgtttgctccttgcttgctagactcaaatggaaaacaagctgtctacaagttcgatgaagaggactcaatctgagatggaagcggaaacttaatcttttgatcagtcaagttcgatcaagttaattcatgcatgatgctatatcttttgctactacatgcattttgctgctattgctaacttgtgtcaagtcaatttttgactaagctaagctatacatgcttgcattttgctgccgcagcattcattaagctcctagacttgtatgcattgcttggaatctctatttgttgttggcttgagccatggtaaactgcaaggttgtatgcactttgaatgttgtaatctgatgttggatgaaaaatcatgtgatatgatattgaatggaaaaatgatatttctatttgatttgctgctgcaactattagttgcatgggctgtgtatatgggctttagttgtgaaattaagctgtatatatgggctgtaagcgatgtagtagtgggctgaaaagggcaccaaaaaatggtgacaaaattgggctgcaaagctgctgaaatgggttgtaaagctattgaaaatgggctgccaaaatggctgaaaaggagctgcgaaaatggatggaattgggctaaaaattggcccatctttgattttggcctgttaataaataggttgaggtagtgtctacgtcatcatccacgtaagcaaccatgtaagcatccatgatgatgtggcattcaatccgtgacggttatttttcgtcataggaaatgaacttgggctgggctaactaggcctcgggctctatcgtgatggtttaaaaccgtcaccgattccattaatccgtgatggtttttggtaaaccgtcacagaggttaatccatgacgctcaatccgtgaccatctctgaaaccatcacaggtgctacatagtgacggttttttgatgatccgtgacggaaatttttcatcatgcattaacagattccttgtagtgttcaatgttccagggtgagctaggacaggagggttaggggagagagggaggggaagtttcctagactttgaagcataggcgtgtagagacggcggtggcactgccgaagccatggttttggaggagtatggtgggcaggcttcgacatctagggagttagacccgaagtggttaggaggcgtgagcgatggtgacgtctttgatgacagagagatacatgagacaaggaagacattggtgcagaatgccttggagagatatatgagacaaggaagttgtcggtgcaggatgccttgctactgtgcggcttgtggaggaggagagattgggggggggggaaggtgaagaaggtaagtccggctagccttgctagcaccgaaattggcaggcgtcagcacttggttaggaggtgcttttaatgggtggaggtgggacagaggaggtggtatagaagataggagaatgttactatggtgcacatatctgaccatccaaaataactgaaattttatatgtattttcaggtgtttcctgttttcaaatattacaaaattgttagtaaaatatgattggtaactatagattttgaaaaatccgtagtataaacatccaataatcacatcatatttcaataagggagtatatgtatggctgtcgacatatttttcacatagtcatggtaagaagagaactctgtgttcggctgctagggttggcaactaatcactgttgcacggaaaacagagtggtccattagcgcgtgattagttaagtattagttattttttttgaaaaatggatcaatgtgattttttaagcaacttttgtttagaatttttttgcaaaaaacacactatttagccgtttgaaaagcgtgcgcacggaaaaagaggagagtgagttgggaactctggctaccgaactcagcataggaagtacttagatattgtagtttcattccatatatagagtattacaccatacttatattaatatattccatagcacaatacgaatagattcacaatagaaccatcaacacaatccataattttaatatatgacaaaaacattgaaattataaaataagcatagttgcaaacattgcttgctgctcatttattcctcaacaagttctctagctaattggtccaacacatcttcatgtctcttcagttttgcttcattgaaggttgatgtatccttctccatcaatttttaaatacatttggtatttttctacccttgcctcctctcttttagcacttgcgttctcttttatttttgcttctgctccaatcagtgttgcttctgcggcctttagcaatgttgctgctttagttgtaatagcttcatgaaagagaaccatattttgacttggcttgtcccccaaagttgatggagcaccttttccttttttcctctgttttgctgccttttgcctctcaaggcacttctctttgcgctctgttttctcctctatttcttggttcgatgatgaagtatatgctcctgattcagaaatcttgttcctcttattatggctactctcttcaaggactctacaccatttaggttgttctttaagatctttccacatataatccaaggtgaaagtattttggttgttctaacttttgtgccattcacgggctttctctattatcatatgatcagaatacccattagtgaaagtacttctagctttacaataaaatccacagaacttagtgacatctctcttgacattatcccaatgtgttctgcattgcttggggttccttttgtgcccattgctaggcaatactggtgttgaactctcaagctatagccttccaatactaatattattttttgtcattgcctttgatgggatcaactgagttgttcaaccaagagctcattagttgtatattgtcatcttcagtccaattgatgcgtgtccctcttcttccttcttcactgctttcacttgcctcttcaatctcaactacttgtttctccttatatcttgtatggtatggaaaagctcatccatgtgaagaagtgttggctgcagccccaattgaagtactatagtgcataccaaattgtgatctattggctgcaaatccaaatgcttggatagatgactacactagattttcttgaagttgaaaacctttaaagcttcctagagtagtttgcgcataataatcttgttggtgagcaccttaaaagattgaagggtgtccatatagttggtagttgcttagaggaccaaaaggatggaaattttggagaaaactaggtctcaagttttagggataacttgtgggaaattgggtagaatggggagttttggacatcactatttgttgcttacttgtttggcttaacaaaaggctccacttagtatctagggaactgaatggatcaatatgttgttcatctcacttgtgcctcctttcgtaggtagcacaagaatgttgtaagaagccaatggctaggaaagcaaatgagcaactcaaatgaaagagcaccaacggctagtagaagtagttactatctgtagtaactgacatgtatattttattggtgtgaacagaaaaacattacaagtattatattttgtagctttgtggccacaccttaagcttaaagtctagttttattgcatgacttgtggtctgactccacaatgttaaatgtgttgtactatagcagcatttattgcttatggttactttttagtgtacattgtgctattgtggatgtcctaagacagtatgtaattcaaaggcaataaaattattaaacgagataaaaaaaatgatgtagcttgatttataaaaaatacagatttaaatttcattcataataaataaagataaaaagttatatacatatttaacaaaatttacctgtatagctagagaaattatattgcaactatgtaattacaatgtaattagtctaattcagtaacatattttaagagcacacgttacgcttacaaaaaatcctcgaaaatagtaaaagtgaagtgatttcttgcatacactgtttaatgcaatttcaaatttaaatttaagtttagattgtttgtgtgtttttttttaaaaaaatcgaactgtttggatcagtaaaaaaaaacaaattgttcggttaagtgccaaaattatggaatcgtttgaggtactgaaccgaacaagcacctccgccgaatcattcgcggcatatcgcatcggcatcggattgcaattcgcaccaaaccgaccgccaccgccgcaccaccaccgaaattctcaattttctctcgcgacgaaaagggaataaaagcgcttcgcctcgcccactgccacgccccccatctcttctcccgactcctgagagaagaagaaccgctgcttctccacccgtcgcggagccccgtgtccatcctccggcgcggcggccgccccccagcgatccgcctcaggtgagagcaccgcccgcaccccctactgctctcccctcccctggagatcggcgtcccactcactcccatcccccacctcatcggtggattggattggataccagtaggggggcgatcgctcatcgctgcttgtgtgcatttcttctggtaggattgggggatttactgcgtgaccgtggtgtgatattatgttcgtgttcagtgcattgcttcttcttccaggaagagatatcaactctcttttattaatcgacacgcgtcctgtgtgttcttctttttatcgcatcgtaacatcgttaatgatgcagggtggttatccgcgttgttagaagatactatatggattgtaaaatctatagaggattgtttcattttcttcttattgttgctaacattaagaagatgctaggataggatcataggatggtgtaggtcgacactgaccactgcattgctattcgcgcaacgccaatcttttagtacttcacttcctgcttcactcctctgtcaaaagtcgatgcttggaattaaattcttctggaaattgggagcttcttcaaagaatcgtgttgtcctgaatttctttgtcccgtttggcattttcctttttttttatattgaatgactcaagcccatctagtgtaagtgtgtaactgcgtgctctaacattttcaactgaaccaggggatagttttcaagtttatcaccttgcctttgctggtttagctgtaccaaaagataaaaggaacaatttccaatgaattacatatacattttgtttaacaccaagtgagctttatataatatttatcaatagacttgaagacttatatatatatttgttataccctatgccttattcgaaacgaatccagtatgcttttttgagtaatggcctggactgcaagttgatttactgtttatgactattactattcacagttaaaactgcaaatttatagaggtgttaggaaatggaagaaagaaaataaaaccaaacagctgtttccatgtctcctaggaactctcagttgctacctaaaaagccaggtgtttcacttgcttggtaaaatgccaccgcacaatttggtaccactgcttaggacctggcacagtttggcaccgttgcttggaacataaacagaaggtctctttttagtgttctgctcaagagctttaagacctctcaagctcacaaccattatcatatgcaggttgctaaaatggataagctcagtggttctgcacgtcttattatcgtttcagatcttgaccacacgatggtttgtgtttttcaactcatatcttagacttgttcagagataattgcagcctgttatatgtcgttttaatccttcttcaattcaaacttgcaggttgatcatcacgatgaggagaacttatccttgcttagatttggcgccctgtgggagtccgtttactgtcaggattctctactagtattttcaactggaagatcccctactctttataaggaattgaggaaagagaagcctatgctaactccagacatcactatcatgtctgtggggactgagataacatatggtgaggcaatggttcctgatgatggttgggaggaatatctgaacaataagtgggacaggaatgtagttgtggaggagacagctaagttttctgagctgaagcttcaggcacgttcaatatttcacatctgattctgttaatctacaattatttcgaaaatctgatggctaaaataactagtaacattgttctattgccgtacatttgcatggatacagccagagacagaacagcgtccacataaggtcagcttttttgttgataaaaagagtgctcaggaagtgataaagtctctctccggtaatatggagaaatgcggggtgaggcaacattcgacttgatgttagcttgtttcaattttggataacttaagaactatttatggtttcttttcgtattatgttaactgctatatttcttgtaaacagcttgatgttaaaataatctacagtggtggccaagaccttgacatattacctcagggcgctgggaagggtcaagcacttgcatatttgcttaagaagttaagctcctgtggaaaaccaccaaacaatactcttgtttgtggggactctggtaatgatgcagaattatttagcatccctggtgtacatggtgtcatggtcagtatacaataaatttcatgaagtgtctaacaaagttcatgccagattgaatataagtttactgtaactgcaatctttttttaaatttttcaggttagcaatgcccaagaggaattgcttcagtggtatgcagaaaatgcgaagggtaaccctaaaattattcatgcaactgagaggtgcgccgctggtattatcgaagctattggacacttcaaactaggacctagtgtttctccaagagatgtggggtttccttatgttaaggaggaccatatcaaacctacagatgctgttgtaaagttttacgttctctatgagaagtggcgcagggctgaggttccaaaatcagattcagttgtacagtacttcaaaaatatcactgtaagtacatcactgcccagtgtgatgtttcttcaaaataatttgtaacctttgtcaaaatcagttttatcttttacctcaaaagaaattatcagaaccttctaattttggaaaagaagttatatttccaattaataaagtgaactgggtctgacgtattatattgttgagttaactgattttttatttgtttttggtttgtcttagcatgcaaatggtgttatcattcaaccttctgggcttgaatgttctctccatgcctctgttgatgcattgagttcatgttatggtgagaaacaagggaaaaaataccgaacatgggtggacagactatttgtctcacagtctggttcagacagttggctggtcagatttgacttgtgggaggcagaaggttagtccttagaattgtgtagaatgagtgaattagctcttatatgatattttttacacttcattcaaatttctttaatgttttacttacacaatttagcttgttcaatcatattttttcacttgtaggtttctctagacatgtcacttcaatctattaattttgttgtgtgttgtagtatatcctcgtacacaccagaaattatatgaaggttttaggcaatagtttatgaaaagattgacaacatattcaactctgcatctgtacgtacaaatgtcataatacattacacatatgcagtctagtgcaattcatttgtaaataaaagtaagaaaacatactcctcaataaaaaataatttattttatatacgatttaaattggaccaaagccaagaagagaaccagctgtctcggctagggacaaagaagaccctgcaagtacacccaatgaatataaatgattaaaatatgtccaaagttgtagaagaccggcatcaatgataatacattctttggagtctacatttttcaaagtacgaaactttggagtggcaaacacacatgaaactctaatatttgattgaaattgaatatgattctctgtactaaaaaacactaaaaattttcagtatggtatttatggatttccatgtttacctggatgcatgattgaacatctactctcttttgatgcttgtggttcagatgtctatgctgcaaactgatatatgatttatattagcttgtattgttctctgtactgtctagacaacagagcacaactactgtctaacagagagcagagcacaacacataaccttgatgacaggctataatttttgttattttattctttttgtacaaatgattctcacctgaaagttttaacacattcctactttaggtgatgcgcggttgtgctgtttgacaagtcttgcgctgaatgtaaaggtacatcatctctactcagtcttgcactgaatcccgttgcaattttgcatcgttagcatgtctgcatgatctaaaaacgcaggtttaacttcactttttttttttcaataatatcagcctgaaacccctgctggcttcctgataacacatgtacacaaaacatggctcaaaggatactcttcagcggatgagcagtcctccaagctttaaaccctttttcacccctgtgcacacggaatgaatttacttgatgataaatgaaggacctgctcgtctgagaatctcattttcttatttaatgtaatataaatgatctgtctcgtgactcgtgcgatgataaagtgaacgatctcagaaggcaacttcaacaaatgttggatatgattttacagagagttcagaattagatttcatgacacaagtaccgctaagctggcattatttgtgggcacttgccaacaagttttgcatcactatgtgcctagcggtcaaataccttgcaaaaattatgacattatgcatgtttttctttatttctgaatgatattaggtaacatcattggttcgccacggataaaaaacatttggttctttcttttcccctaccaaaataagcctcttgccatttaaaaaatatatggcttattctgagttggcacaagtattaaggcaattaaaatcaagaaaaatatgagttaaagtatttatgctactgatgcttaaatacatcgaagtagggacatcagctagtgataagttttagtagagagggagactggtgataagtttaaattcaagctaattatatattttaaaattcacattgtcggtgatatgtgtctgggggtatcaagaccagagggaggaggctgccggtaccaacgtggcactcccccgaggagggtcgggcccgtggta

SEQ ID NO: 4714 - DNA, 48397 bp, Oryza sativa
gccgtttcctccgcaccacacggtcgccaccgctccctccctccacaggccggcgtcgccgctcctccctccgcgagccagcgccacgcggatcccctccctccctccacaagccaccgccgccgccgcaacacctcgcggtcgccgccgccagcactcagagagagagagagatggaatacggggagagacgtagatatggatagggtttggtcgagggtattttggtcattacaaaaattaattgtatttctttcttttttaaaaaatgaaaacttaacagtgttaaaaaacagggccaaacggagtgttcgttttaaaaatgtagggtcaaataagcaaactagaaaaagtagggtcatattggtagttacacttcaaaacagggtcaaataagcaattgtcccatactaaataccatattaacacagccttaacttttgtattcattcaaacggttgtatctatctattgatacattaataaatatattcgtcaaatgaattttttttcagtcgtatagagtatcatgaatatacttctgaaatgattgtaacaaaagttttgatggatagacttaagaggtgattcattacctaatgcatatgtaaaaagccaaactgcctttctaataaataatgtatcatggaggcctgttctcgaataaacacgatcactattacccaacgcccaaaaaatgttaaactctcaacaaaaccgtccaagaagagctgcaatgttttacaagctgatctagaaatcatcccaacacatcgaaaaactgtaatttgtacaagcagattgaggagtgagcaatcgagtaaacgagctaaccatgggcaatgagatcgacacctccgtcttggccttcttggcctcgaggctccagatgcactactcgaaaggtaggccatcacctcatcgtgaggcggcggagatggcatggacgccgggagatccaagctggccagcggcgggggatcccccccatctacgtgcgcctcctcctagtcctgcctcccctgcattgcgtgcactcggacaccgcagcgctgttgagttatgatccaaattcatttgcacttaataaagaccagcttctgccgaagtaaagcggaggcccgtcgccggaggcttgggccacccattgggttctgcggtacggattgtaatacctgttagggtttcacctcatatatatacctcttgtaagccgctgtgcggtgttgtaccctcaccccgatacagtgaagatattttgctggctggcgctagtggtttttttctttcctactttgagaggcttttttcacgttaaatcttgtgtcttctacgattaatctactattctttgtcgtttgtttgcccatcgttttctaacgagcgctgcctctgacttgccactgccgtgttgagcccagtgctgccaagcgccggccaccgcctacatgtgccttcctttccacggacaggctcggcggctcccacgacctgaatggaaggaaggagagggaatttgggatgaagaaggaagaatagagagagagtggaggaagtatgacaggtgggtctttcttttctttgatgcttgggatgccatgtccgattagattggacttaaataggactcaatgtggacttattccaagcagtagcggtagtagtgcaggccttgggccttggcccatgcagcagcaaatagcctagctaggtactcccaatagagcagcaagagctagcaaacagatcggcagcagcagctaaagtttagtcctatttggagagaatgtcaccaacttagaaaactagaaaagagatggatgctgaggatttaacactggttcgaacgatgacgaaaatacggtgttacattgtgggtgtgatctagcaattttaggaaccggtaaaccttagattccacaaataaagaaaaagtcgactcgaaacatgggatgaatcgaccaatgctttgagcaaccccatcaccccaaaacccatcggcatccaagaaaaaaaaatcgcaaaaaataagcatcagctctaatcgagccaatgctttgagcaccccatcaccccaagatccagcagcatccacaaaatcaacatccaagaacaagatcatagaatcaggatcaagaagaaaattgatattcacacatgaaccacaaaaatccatgaacgataaaatccaagaacatggagaggaggacgtcgtagggaaggccaccgtagccaccgcccgccacccaccgtgggtgaagtcgagcttgtggaagccaacggcccatggcgagatggaggccaagggagggaggtaaggcgaagggcatggatgttgaagaggacgtcgagcgagccctgagctcgtggcggctgcatctggccacccctgagtcaccttgtgtggagattatgggtaccgcatacccacacggcatggttatccgactagttatagaggatagcttatatctatggaatatgtaatagatcatgacttgggtattacgtttccttttatattatggagcggcctaaagtcctcatttgataatattgtaaagtagatttaggaaaccgataccgtattggttaaggtttctatcttgtaatcctgcccccatcctatataaggtgggcaggaggccctctagggggcatgagcacatatgatcgtcagatctatactacacccggtggattcaaatccccaaacaggagtagggtattacctctcattgagagggcttgaacctgtctaaatcctttgtctccgcatccatccacttttaggtcccgtgtgctacccccttttattattgccgaattcatgtttcgacaccttgtgagggaagggcaccaccgattgcttggggctcatcaccatggagcaaccggagctcaatgttgatgggccaaccaccccccgcctccccgagctcatgacaacaagatttagccacctccgaagcacgtggatgtcggatctgattgcccctgagccagccgcctgcatggaattatgtttgtcccattttagtttttttttttttgctgaggtcgagtacatggaggttggaggccatggtgttggtggaggcgtttgcttgtggtggttgtgctgtccctattctacaaggatgtttgatcgaattcgggctccagggttataagcagacgacgaagacagtttgtttcaacagatatggagcgaccttgctcaacaagaagcggcgcggctaagggatggatgggtgtggaggggaggcggcaatttggggagggggaggtggggatggggaagagctgacaccaacaccctcgtcactgatgcgctcgctaacggtgtgcaactacgtgttgctacaggcggtggtggttgaggaccggagcccgatgacaaggagctggtgcaatccaagcacccatcacacttgcacccgcaccacctccatgttactgccattggcctgtacacctactcatcctcacactttcctttgccatctacttggtgttgttcctactccatctctctccctaatcggttgatttaggggcgtcagtcagactctggtgagatgttcggcaagcttgcgagatggggattccactagccaggatctagcagcctcaaatcaaatttcttgtcacctcttccttaacgtccttcatcgatccaacaagacaactctttcacgaccatctgagtaccgttgccactatggttatctggattttggattcatctttctatttgtttcttaatagctgcaaccatacatgatttgccatttgggtagagcatggaccacttgtgcaactctagttgacaggattgcattctaagctctttagattcaatggtgaactccgctgaaatcctttgccgagtctgataacgcttatatacaccaaaatctatggctcagcaagaaacctctgctttgagccgtttccgtggagatagccaaaagagattgccagcctgtcaagtggtacacacgttgaatgcggtccaaggatgtcaagtagtatgcatgttgaatgagatccaaggacgtagttgtcgtggcaatgccgtagctccaaatcgacctgctactctactattgtttggtttcattaggaatagattgcttccttagttcagtaaactgagccctccataaagttgcatggttcaatactttcaactaataagtacgacgatgtgttgtgtgtgtgttgggggggggggagggggggtgttaatgtaacctgccccctcaatctgtcatgtgtaataaaaatgttactccctacattctaaaatataggctcaatcacttttaacacaaagaccaattcaaaatttaccttgatgcatataagcaatgtgatcggagggggaaggggttaatggtgtaggatttaaagtgccagtaatatatgcatgcatgcacgtattatattatgagacacgataaaaagtatccgtgacttatatttttgagatggaatgagtatgagttctgaaaataattttaaaaaaataatacagtggcccagccaaatttcccttgacacgcacctaaattaggcgcacccagttatcacaccaaatctgtcagttgagagttaggacctctctggcaagtagacgtggcctaagtgactaaaaggcaatgtatttcttattaattgtctctcatgttcatgtacatgaagggtttagggaaagatagttaaatcatggagggttttttttggttaatgtgcatatacgtagggatatctgaaatttactaaaagaaaatatttcacgtgtacgatatacattatcgttaacttcaatgatcatcatcgagctgcttttcacgagtttgcactttgcatgacaaggcaccacatgttttgtcacagtcgtcacatgtctcatctctgcaaccaacttctctttagctcgaaaataaatcaatctcgtacgaaatatgacacatcattatttaaataaatcaatctcatatgagatgtgagacacatgctaatagacatatctaaattaatagtattaagatgtatcacatacaatatgagtttaatatattttgaaacgcaggagtacccataaatatgtatgcgtacaaacatggagcagcagtctctcgtgctgccaagtgacaagtgcaacaataatcgttcacatagggaaaacaaaaaagaaaggtagaagccccactctccttgtacgtacgacagcatgatcggcggcgccgccaggccaccgacaccgccggcggtcgtcgacaagacgatgtgcgccgcgtgcgacatcctgaagctcctaccgacaggcaccgtgctggccttccacgagctggcgccgtccttcaccaaccacggcggcgcgtgcggcgcggccagccggtacaccaccgcggcgctcatcgccgcctgcaccgcgtcctgcgtgctgctctccttcaccgacagcctcgtcagccatgtcgacggccgccgcctctactacggcgtggccaccctccggggattccgcccgttcaacttcgaggggacgcgcgaggagatggaggagaggttcggcgacctcccggggatgaaggtcagggcgctggacttcgtgcacgcgcacgtctcggcggtcgtgttcgtcgtcgtcgcgctcggcaacgccgacgtgcagggctgcctcttccccgacgccggcactggcttcacggagatgttcaggaacctgccaatgggattagggttgctggccagcatggtgttcatgatcttccctactaccaggaagagcatcggctacacggacatgatgccgcacaaggaagactacgggaaaggaggtaataatattcctggccagaccacgccgtcggtgtgatgaagtaaacataacatgatactccatttatactttataggaaggtataaatgactgtacagtgtaaatccgtagtggtgtgtagaagttggtatatatattggacatatatccaagcatggaactgtagaatgtactcatgtggggctttaagccctctttctttatatctaaactagcatatatgtggtgtaaaaaaatcatcggaaattacatatatctcgcgcgttgcagcggaatttgtaggtaattgtcaaggaaaacatatttggataagttacctacataagattagacagagtaatgaaaattgtggattttatttattaccatgcttgattgttcgtacatacatacatacatacatactatggactggagcaaacctcaacatacatacatacatacatacatacatacatacatacatacatacatacatatacacggtgcagtgcacgtacggcaaacgacagcggcgcacaggagacgatgcgccgtgcacgagacattggtgctgtgccgagtccttcacgtcacggcgttgcctcacataggcattgtgcgcggcatggcgcacgactgcacgagagaagcagggcagcagatcggcggctagcgttaggggcgaaagggattaagtcggagcgagtggcggctcggctcgatggcttttgccagtccagttcggtcggtttaggccaaagcaaagccgcctggagaaggggaggaagacgggtttgcctcatggccgagctgggtcggcttggtaggcttgatgggctaggccaggggaaatggaaaaagagaagaaaagagctgagcgactcaagttagactttttagaaaaaaaacaagaggattagggtttgggtctagatgagttgggctaggcccgcaagggacaacattagactttagcttacaagtttgaaaaattgattatcaaaatactttagtttacaaaggttttaaaaaaatacttattagtttcttttatttgtaaataaggattaatcctttaaaaggattttttaaaaaatatttgattttatttgtaaaagaattcattaaagggatattaattaataaaagggttttcaggaaagtaattagtatttgcctttaggtgaaaatattttcttgatattaattcataatcatggttgtttaataaatattattttaactccacaattgaatttagaatttgcatttaatttcttatttaatttattttggcagcatgaggtaattttgaaaatccaataaataccagcataagggaattttcaaaaaaaaatatttgtccaaattttggtttccacattttaaattcgaaattttcgggatgtttcatgctaatatctagtacaactctaaatcctaaactataaccgactacgtatatgtatctgacacaaatctaacagaaacattgctcatattcttgttcacataccaagcccttgtatttcccattagctttatgtgttgggcgtgcgctctccttgtcatgtttaacagagcagcttgaaactatttttttttcaggtagtggatatcaatccggcctatacatccctcaaggatgtaaattactagctcaatatcctttgtattataaccctttagcttgtcaatgaattgccgtttcgattgggggtagttcatactcgttagagaccaaactgtgggtttgttgttcatccggaacttttgctgaactgttgcaggcaatgaggatgccctgctccaatgccttcaacagcgcttcatcgctagttctatgtgttgaacacgtaataataaattttcatattgcaattcacgataaatgtatcttactccatctgaagagttccacgagctgcagattcagatagtggaattgttcttgataagatccctgcaaccagcatatatgcatttcaaaatggtcctgtctatgcagcataggtcaccaagtgtcccttagctcttcactcgctcaaaggacactagctctagccacgtagctgatatatgaaaagagaacagggtaaaagtcgtaatatacacaaactaaaataggacatatatatatatattcccttttctagtgtttgactatttttagatgctttgctgtacaaataactttttaggtcaattcttatagcgcattcttttccagaaatttggtgtaattcgcatttgtcattggctccgatgaacagcaactcaacaagctattgaacagttgacgttcaaccttacaatgataattatttcattgatgcgatatggaatgagaagtatacgatggcatgtaagaatctggtaaaaagaatataacagcaatatatgttattcttgttgagagattgatactactagagaggggccatgatatcacaagaggcttaaactgtacaagcatggcatcttttctaaacatgcagaagttatttttttaatcttaaagagaatataacttaaatggaaggtacgagagaaaaatatgtttttcttgctaatttaccagctgccagaccagtttttatgaatgaaagacataccaacaaaataaaattttgttttactttgttttgctttggaacttttaacagtctcttcggctgatcactgttgctgtcataatttcaaatgcaaattcttgaaaagttgttgtcatttttgctacagtacaagctcagctatctgttgctcttgttttctcttcactagctgaatgccgtgctttgctacggatgataaaaaagtatattagaatattgtctaaaataaattaacatgtgttttctcttaattgtgttaacaattcctttgctatagggaactctgaccctaatttgattttatatgtgggcatcatttagatttgtttgtttttctaataataagaagttcaagagcaaatttataaaattgacaatggaaatagatagggtgacagattcactaccagcaccattaatttcttttaaaggagtatagatgttctatgtgctcgtcttaacaaaccttactttttttacatgattacatcatttaatttgaattgaaattatgagtgcagtttaaagtgaatcaataaattaaattaacttcccaaaaagtaaattaataaatattattaactgaactttgaacatgcattgttcaaagttaccttcatctctatatatgaacatccattctacaaagtttgtcatcacttcatcttgagtatgccactaattgaagaatgttgtttctaaccgacgatctatagatgcttacatgctttgtaggagcgatttgaccaaagttaggaatacttttccattaaagattcccagaatttctctgggatacaatcgatctgccaattgcagcagccagccccccctcttgcctgtaagtatcacacccatgtgtagcattgttcctttcttttcactagcaagttacaagctgccacatagcagatctcttgatacccactttgcctggaatccctaccctctttcagatgctccttatccatacaaaatgctgactttctggccagtactgaaagaacaagagagaaagaaaaactcatattacaataggcgacttcggaacgcggcatcgcatacctctaacctctccatatctgatgaggtgtgaggaccttgctttttgtgagattctaattctagacatacgggataagagttcctgttgagaggccattgctgttcatgagagcctctgaatggaatcaaagcttctctcaacgttgacttggctgacgatgatatgattccttggggatgaccacaacacatacatttggtggctctggcctaatgtcagtgttgctgatcaattggtaatgttgtaaaccaagagggtgatgttgtctgaatttgaataaattgattttcagttgaacggtgaatccgggatgacaggagacaatatttgctgaatttccaagcacaggtatagattatccagagtgctgaatttccacagttcagtttcttaataaaacactttgcatacttccattggatactggacagcaaaagcaactatacaataggacaaagaaaaaaaaattcagaatgaattgatctgtacttagatcttagtaggaaagaaaaaacaactcatattctgatgttggcgttgatttgcattcctcatacctgtgacctgtgcattttacatcatcaagtttgttattctcacgcaaaggtctaagccgtacaatcttacgcagacattatccataccacacctaatggctgaaaggcaaaattctctttctcctcaaaatttttctccctaagcatggtacttcctagttcctatgccttgagaccttgaccctggtaattttgttgggatttgagagattatatatcagcaagcgctgctctcttgagtaataaagaaataatttgcattagttagtcagtccatgctatttataacagaacatttttcatatcattctcgttcttattcataaaggtgaaaaactagtaaaagcagatttatcagcaaattctagcaagttgctttgttctgattccttcacagttatttgatattttccttggattttctacagaattccatagtattttatatctaagactacaggcttgttcagattggtaccattttaaaccataccattatttagtaaaattgacaatcatgttgttgcatttagtttcttaccaaatattggtaatgtctatgaaattttggcaatattgtattaagactatcctatcaaaatttggcaacgttgcaatttaccaaaattttgacaataccaaattttggaaagattcattttggcattaatctgaacaccaccaccagcgtctctctctctctctctctctctcttctgacttagctttgtcaaatatgatagaatggaactactaaaagtaagaggagggtcaaggccttatcaacacctcccaaggaccatctcggcatcagtttgctgcatcaccattgtcatccatatattccatattccacactaaatccatcgatccgtggaccgtggtgtcgcgaggagcaagcttgcttggccatacattatccgaaccttcgtcttttccccgatcgaattgccgcaaaatctcatgtcgtgcacgcacattttccatggctatataagcaggcaggaggctcctcacctatgcacagctcaaagcaaagcaaagcacaacacaatcaaagcctcatacaagaagctagctagctagtactcaagctaaatacctagctagcagtagcaggcgaccagctgcatttttccagaggaaaaatctctcagtttagcttaattaattagctcttgggagaagaaggcaagaagaaaatggacagggtgaacaggctggcggcgcagcgggcggtggtgatcttcagcatgagctcgtgctgcatgtgccacaccgtgacgcgcctcttctgcgagctcggggtgaacccgacggtggtggagctggacgaggacccgagggggaaggagatggagaaggcgctggcgaggctcctcggccgcagccccgccgtgccggcggtgttcatcggcgggaggctcgtcggctccaccgacaaggtcatgtcgctgcacctcagcggcaaccttgtcccgctgcttcgcaatgcgggtgccctctgggtgtagcaccaacgacgcaactatacctaccagcgactggttcttgatttggactgataccgtggcgcagaataattttatacgggtactttggtttgtatcaggcaggtcaggtatatctaagggaaaataaatagtacgtgcaggccttttttgcactgcaatactagtaaatctatagagagtggggaattaagtgtgtcatgtcagccgcctgtaaggctcttttgagatgtaataatgacacatatccgtttaatggagtatacctcttttgtcgatcgttggtcttttcgtctgtgtgattttttaaaaagctatctaatccagggttttcactttcggtttgcatcgaaatttagggttttcactttcggtttgcatcgaaattctgaagttttggtgcaactgaaatttccaaaaattttgggaaattttcaactttttgtccgaaattatttgaaaattttaccaatttttgactgaatttgaatacattttgatcaaattcacaaaagtttgaaaaaaaattagggtgcaaattttgcttgccggaaggggggggggggcaaaattactaaaatttcaaaaaacttaaaccgaaattgaaatccctgatctactctagcacaaacacatatatgcttaattaggaaaaccatctccaaactggtaggacgattggttaattagggacttggggtatacctcttgggatgtggatcaagaacctataacacagcgtcttcaaactcgcattagttcactctacacgctgagtggacccacattcacataatcacatagcaactcgcttatattttcgtttttgtttcgtgtaaaatggttaatctagtgatattgtgtttggagtgaattggatatttaagcagtctcaaacctatgaagactctccatataggactattatcactaaatgaacacttggaccttacaggtctaaaccgaaataagaacactcatgagctgaaacagactaaacgggttggagtattatagaacaatatattttttggacagtggtttgggacaagaggagattgaaataggctaggtgtgttgcagcatggaggctagagagctcgagcaatggttgcacgagaagaaacgcactcagaaatctagggccacgtttgttagctgggctagatgattggcccattaacaataactcgaaagttttcatctgctaccgtcacaaccatccatcgcacaatcgtcccttcccaccacatcaccagtacatcgctgcaccaggtaacaccatggatgatatcctataccaagtagcgacccgtcgattcctgagactcccttccccctgtcaaaattcagcggcactattctgaaggccgtaaacacggaataattttgaacaagcaaaaaaaaaggcgaggaatgtgatctcctggtcaaaaacgattatctcctggtcaaaaaagattatccaagtctaccaagcttgtgaacgtaagttaaaatccgtcccacgtaattggtactttattttatgccgattgacatcttgcttcgtgtttgtagagaatataccagcaattccaagctaagtctgaaaccctagaaagacttatcttgatactttggagtcggccaggaaagaatttaggccccttttaaaacaaaggaaaaacataggaattccaaaggacttataccatgtggaaaataatcctatgagaccctttgaaataaaggattgatttctaccaattccattgacattcctatggaatggactattgtaggaaattttagaggaaaattagcatgaggtcttacctcatgttttcttcttcccgggtcttgaattcttatgtttttcatgtgtaactatgaaatggtagttttgaaactttcttgtgttttcaaatctcataggaatccaatgaacatgacattctattcctacattttttctattcccatgttttgacaatcctgtatttcaaatgggcccttaaagaagttaaagaagccgccaaagctagagagcatcagctgaggaatgagatcggccagcttcaggatataaacttggaataccgtggattagtcaaaggtaagcaagcaatctcaaaaacttccagcttcaggatataaacttggaataccatggattagtcaaaggtaagcaagcaatctcaaaaacttctagcaaaccctgtctcctgaagttaaataggtccaaaagacaaaacggttatctactaaaaaccaaagggagtagtatttagactgctttgagtcaggcttgggctaacaaaacactacctaataggtaagccgttggcgaagtcacaaggccctctacttttcattataaaaccgataaaccagaaaaagatggattgttttgcgaaagaatctttggacccataaaaagcagaatttgtgcttgtggaaattctcgagcaagcggagctgaaaacgaagacgaaagattttgccaaaaatgcggagtagaatttattgattctcggatacgaagatatcaaatgggatacatcaaactcgcatgtcccgtgactcatgtgagtcattttttgactcaaagcagtctaaatactactccctttggtttttagtagataaccgttttttcttttggaccaagaaaaaggacttcattaaatcacatgggacaaattacagtcgttttcaatcaaccaagaaacagaattggactcaaacccagttcagaagcctgagtaatcgtcccttctagctttgtttgctaattcatggctaatcaaattttgttcccgctggatcttcgtaatggaagtcgtcctttctcctgatcaaagccatcttgcttctctgactagaaacgccagggttgagcagtcctcctccttatcagtgagtagatgcacaactgagatgtagtctgtttcaattgcaaccggcagcagtgtccattgcagtgctaaccgaaggccctccacacaggcggcaagtttagtctctaacgctgaagagcagtttgcaagtgacttgcacatcgtaaagagggtttcaccattgtagtcccgaagaattgcaccgatcccagcactaccatcggactcaaggaaggagccattgatgttcagttttgcccatcctgagggatgtcgtttccagcattctttttgttagtgatatgctctagaggcaatcatagagattattgtatcacatactatgtttacatatttttccgactttgttccttgaagtagataacttattattggttaatgaatatgtgattctttcatgagactctttatgttgtttgttactatttttaaaggatcctgatcaaataacatatgtggaacaaataagtttaaatgatcagcacatgtattaattgatgattatatctcatggatcatggtacagagatatcaaattaataatgtgaatacatgttggggaacatgttgttggatagacccaacatgagacactgtaagagccatatgtgttgtatcatcagtgatctcatttagtgttggtgttgaatcctaattagacctgagattatcatgattcccaacatgtgtagtagcttacttagggactgctaaacgctactccgtaattgagtagttataaaagtagtttacgggtatgctgtgaaacatgcagtaggatatgaataatcaagatgagatttgcccctcctatggagagatatctctgggcccctcgatgttatagattatggaagtgcatggccatgccaaaggtgattgaggagtcaatcacaggttatataatctatcacaggttcgagcgaatgattgagctattaaaggatggcacatatctagccttgagcttaatcgatatcgtgaggcgaaggggttcaaacaagtatacactagaggttcagccgatatgatctttatgtatgtccggtgggtcaatacgttctgctagggaccgctgttgacacgtggaccgaaaaggagttttcgggttatagctgagtgtacatgaacctacagggtcacacgcttaatgggccgaaataaggggattggatggagatccaatataagcttaattcggatagggatccgaataggagtcctacaggccttggaggcccgagttatggatcctatatattcgtgaggggtgtaatcggcggaggtattgcatcacgtgagaaaccctagccgtcactcccctccccgggcaaaaccttagccgcgcgcgggtgctagcacatctgcgcgtgtcgttccgtccctgtacgtgtggataccggtagaggcgccactgctttgcggtgctgatgggcgtgggagtacggcgaggagaacgcacgaggaggataatgacgagctggtgcgatcgactacttcctctgtatcgacgcgcgctactttgcgagagttccttcgacttcttagcgccttcttccgctacacagcgcgtcgagtggtaacgatctatgatctaatacttgcatggttcctagtttacgtgatagaaaattttgatttatgctatcgtagtctacgcgtatcccgacacttttggcttatcatccttttgcgtccggcaaattgtgtcgccctggatctgcttcgcctttaccaagtcactcctttggccattttttattatcagttggccattctttattatcagcaaggattggacgtagctttccaagaaccttttcgatgcaattatgggtgttggtcttttatcgtgcattatctcattatgaatgtaccaagcaatctcaaaaacttctagcaaaccctgtctcctgaagttaaataggtccaaaagacaaaactatctactaaaaaccaaaggaagtagtatttgagactactttgagttttaacaaatttataatggcttgtgaatgaattatgatgttacttttaaaaagtgcaaatttacactgccatagattatttatatcatttaattcattcatatgtaccattgaataataatcatatatagatcattctgatattcagcacaatctagaacaatccctagagcaccaatgtatcccaagaaaatatcgtactccctccgtcccaaaatataaacatttttagcatagtgacaagtcaaacattttcaactttgaccattaataacaaaaaaataaaaaagatcaatcatctaaaattgatgttactagatttatcattaaacaaactatcataatatgcaactctttttatttaaaacatcttatttttatagatattattggtcaaagtagcatatcaagaaccgtgtcagagtctaaaaatacttatattttgggatgaaggaagtagttgctattaaccgttcatcttttgtttctaagcatgtgtttggtttgggaatgagtttgattcatccttcttttttggatgggatagtcctagttttcaaaagatggcacacatgttagggagataaaaaaatagattggatttgtccatcaattttcaagagaccaccctagatgaggagaatatttccttttagagatcatccacctcacatattcccaaaccaaacactagaaaatgggtccgacccaacacgaccaattccatcccttaactaaacgcttgctaagggaagcatgagtggaaccttgagaaccccgctgtattgctcgggtcatgttgcatcacatatttcacattaaatagcactgtagctctgcttgcattcaggaaaaagacatgcatttattatagggccttatttgtgaaataagggatctaataacactttattgggggtcacggcttaatcaacattttatgccaaaaaaaaaagtaccgcaaacttgcaaaattacaagcacaaatagtacttaacaaagtagctcaacttgtacaataaaccacgatgtggggcgaagcaatgcaccattatcattagtgcttccagcatatctacgacatcatacacaataaatattacagcagagatggccatcttactgctttgtgacttgagagtagggcacggttggatcgctaactcatagtatccctccatttatctagattctagacaacatattgaaaatcaacaaaactatatgatatgcagaaaagtaacaaataaggcatcacctagtataagattacaacatttaggagaaccttgcgaagtcccagcagcaaatctttgtcctggcggactctgctgagtttttgacagaccaaccattgcctgaaaactcaaagcagccagtggtgttgtaccacaagacgacttttatcattttcccattcgtaaatgcagcaccgcagggcacagaagtcaggctccggcaagtatccgtccaccagcagaaaacccatcaagccaagtatctgtacacatttgggttgtctttatccctctccaagtaatcccttgtgataagatcctcaattcgcttctttattgccttgaagtcaggctgcaacggaaaagagaaaaaaacttgtgatggtgaagacatcaaaggagtttcgagcaaacaagtgctttacacatttcccggatgtcagattcattatatttaataattatagtatatttcagaataaggaaacaccaacaagacggtggtccaagtctaactgaacaaaacggtgctagcccatcaaggcaatcaacaaactctacatcaacaaagtacaattaatgagttgtaccaagaatttcgtaggaacaccatgaccttaaaagaacataatggattgagcccagcacttacataaatggagtgtgtttaaaatgctttcactaacaagtgcaagaactttcttgaagaaataactcgtaccttaaacatgcgtccaagctgctccacacattccatcacaagttgctgatgacccaatactttgcgactcttcataatacgcacaattgatgcatcaattgcgtatctgcgatccttatcaacatcttcaactactttcttcttctcatcaactggaggaagaggtatctaaaaacagcacaaacacaaagataatacattgaaccagagaaatcagaaaagtacaagcataattgattatgcaacatcagaagttcacgctttcatattataccactgaatatgggttcactttattgccgtcagaagatctcactgctgattttctttaccactctatacatattccttagtactccctccatccaaaattataaggcctatatttttttacatggtcttcaatgacatactttgaccattaatttataccatgttatgtttccaacaaatatgaatctagtgatataacatgcataatatgtagcatatatatgattagtatgattattagtaaaaaaaaattaccaagtttgattttccttaaaaagaggacgtcctataatttgggacggagggagtttttttttttcatttttctttaactttatccagaactgaggacgcaaaacccatcatccttagcatgcacccatattggctagcggccgcttactggcacctgccaatgatgcctttgccagcactgccacattctacatcttacattgccatagtttccattctcttttgttggtgtgcagcttgcttgtgtacaatttaatggctgagcatatggagactaattcaagcctgtgttggcttcttggttgggtagccaaccttgctgtctgatcggatgaggccacatgatcaaagataacaacaggtggtctcagcatcattgaattggttaaaagatgcaacggtgtgaccttggtaataaaatgaacccaaaaatttgaggggtataaaactaaaaatacaaacttccgaagctacataaccaatgttgccagaagtaaattatcaaacctataaaacaaataaattgaagatacctttaatcttcgcagcttgtcagtaaactttgagttgaactcgaagacatcatttggtgaaatagatctattatttggttctttgctaagaatcttgtattttgcacaagatagagaatggagcaatcgaacaacatcatcatctgagagatttaactgtgtcacaatctcagaatagctgagtctatcaactccattaaacagcagcagcaatgcagcctaccaacaaaagtgaaaggcatttcagaagtcataatacaagagggaagtggataatgtgatttcgaactacctgataagttgtaacaatgagctcaatagttttggcctcaaatttagcattaatattacaggttcccagtgaataaatccaggtaagtttcctgtgttttgttcttgtttggtaaaactccttgaaaacctctacacatttcacctaaaaataaaaaaataaaacaatcactgtgtgtagagcagaatgccaaccacaaattttatgcaaaataaggcaaactccggccttttaaaagcctcaaggcaaacttaccatttctgcaggtagatttatatcaaaagatttgtaacttggccaaaatcctgttgtgaggacagtaacagctaaggctattccaggattcaactctgagtgtgtgcttatgaactcttcaaatttagcctggtgatctcttgccacagtgagatcagtaaccatgccctccattttggaagtgaactgccctccacattgttgctttagcttggtaaggatgcttctctcatgttcatcattagcactcttgtcaaaaagcaatctccttgcaagcttctttctgcaaatttagccccagaggttaacaactgcatgaatccatgcgcaagaatttaaagacaaaaagaataagcatgcaagataataacagcttacctatagaactcagcaaacaagtccttgtcactaatgtaggcaagtaaccttacaacctggtaatcacccattcaagattaggacttactaatgacactaatagatcaaacataacaaattgatggttgtaccttctcaagggtatcttcaattgcttcatcactaagcttttcactaccgcctttctttaagatattgtcacagaaggtagctagtaattcagcacttgaactgccagaaacacctttgttgcaaaaaacttcaaaagcctccttaagtgcctgcataaacaggatacagaacatgatccaatattttgatatcattatgacaataatggtgtgagcatatcaaatagcaaaccttatggaagagagtgtgcccctgaaaacaatccgtaacataagctacatacttgtcatgaagctcaatgattttccggacaaaaacctaagataacaaacagtgagtaattgaaacaagtgtagagccacgaaagaatatataaaaagttattgaaacaaaacctgttcctgtaaaccaactatctccttcttctctggctgcagtataacaaagaaaaagcaaaattacttcaagtgcaaatccaaagtgtttggcggagtgcagagctatatgtacagatcagcagagtaaatatcactacatatgttaccagcaagagttgagtacaaagtctagctaattgattaaatatcctaaccaattgataccaccccaagtacacaataagatgaatgtactaagacaacattaatacaaacaaaagttaatatatagactgtgcaccttcttattactagcagcatcttcggcttgcttcactaaggcagtgccctcattagtaacatgctacacagaagcaacattccattacatcatcaaaatagatttaagaaataaaccactctcttctgaaaaacaaaatacctgcttaaatatttgagaaacaggttctaaaccacgagttattctggaaaagagcctgtacattctagagagatcatcaacctggagtaaaacagaagatgctatgttagcagacttcatttgttcctgataaactgttgagagacgtggagcttctccaagaaaccttgtcatcacgaagcaatgcatggcatccagaatgctccttctccaggagctgacttgcgtattgagttagcaactcatgttgcactttctgtgaaaatcatgtcataccggagaaagtgaattatacataatgctctatcaggaaaaaaatatattctgatttctgaacatacaattataaattgtatatggacatgtggtgtgtatgcacttagcaaacgtagattaaatatcaaaaagtatgctctaaaatgtggactgtggagtagaagcaacagcagacaattcactaacctccaacaacttctgttcactactggagtgcaaataatgagcaactcgctctttctcccttttcagacactcctctgcctatgaaacaaacaaccattagaaaaaatatatattatgcttacctacagatagggatgttcatgaaacattcttgagaatacctttaacatgtaatctggacaagagtcctcaagaatccaggtctgggcttttatagagtaatagtctgcagtatctttgagcaagaaatcttcaaaatcattttcgtagtagtccatgctagtcaagccaatctcaacaaatatatccagaacattctttaacagggccctatcaatttgttcaccctcacgttcttgatctatctgttcgagaaagtatgtctatcaccagccatacacaataaaaaaagatagcatcacaagatacaatgactcaccaaggatatcaccgcactttttacttttcctttgatctcttgatatacctgttacaataaataaaactgattaaattctagatatagtcatcaagcaaagaaatgcaagttgtattgcataaaaaacgagaatcatgagtaatcaagcaagtagtgttaccagatcccggaaacagctaagcccaacttcacttagttgtggtagggacctccttgaaataaagtaccgatcaagataatggaagaagcgtgatagccaccgaaccatcactttatggtttgaccaccgttttactagctctctcagcataaactcatcatgtttctctcttaatgaaggtaagacctacaaaatattgaaaccaaataaaggacttatcttccaaaagaagtgaacaatacaaaagaagatctgagataggcaacatgcaaatgatgaagagtaattaaacttcattgaatttgtagtgcatgataattagctagaactactaatgaactatatcataatggaagaggatcctctaactttgagttattgacaagtgggaccgctgagtagagggcgcacatgtcagtgaccacgttagagagaagtaagtcagaggatctcaatcctatcataataggatggaaaaagtctgttttcatctctcaacacttcacacgttttaatttcatccctcaactataaaaccatataaaagctgcccatcaactctcaaaaccaaacaaaacttatcccactgccctatcctatagtgattttgactcagcaggtggggccccactatctatttgggaaatggactggagaatggtgaatcttacacaatcagccatgacactctatgacaaatgggccccactatctatttgggtccaaactatcaccaaacatggtggaggggcaacttttacccggttttcagaattgtgggagtgggacatatttaaccctgttttgcaattgaggtacaaaactaaactgagtcaaaaattgagggacgagaaatagactttctccaaataggaagggaaacaggacagggagcaactaagctcaggacttcatatacagatcctcaatatggcggggaaccagggtcccgaccatagaatcgtatgcattgcaatatctagttatagaaaatgttgtatcaattatatgatcaaccatatatttgagatatacttaacttatcaacaacaaatagcaattagcatatttacatatttaatacaagtcgctgcacactaaatagcaatgaacacatacatcctagaaacatatgcatatctatatgccaggatgatactataaaggtcctgttgatgcaaagggaaaaggaaaccgatatttcaaatggaatggatgtagtatggacagatttcagcagcagcaactgttccagcatcactaaatcaagtaatcgatgcttagcaagcaagttatgacctcgaaaaacttacaccttgaaaaacaaagttaacatattagacaatagacgcggcacaattcagaacattgaaaagcattttttctggtgaattacatgaggacttgaggagcactttgctcagcattaaaatgatccaatgcaaaatgagtgagggagagtgtaatagatatgcatatggtcattatgtaaattctctcagatatgaaagatgtgacattaaaccataaacagttcaaatcacaatatcttcgaagtgtttatgacacatcatgcaatcaacaggtaacaaaatcaaagattagctttgaacaaaaatgaataaactgcattttgcaccaagtaaagcacggtaagcaccgtatttcactttgcatgaggtgtggcacacatttcgcaccagattacatcatcgaactaatatatatcccaagaaatgccataagccctaaatgaaactttgtcaaacatggtcaagattcatcaagtttcataaggcttcactcaaatttcatgaggttttcctccgatttcatgatgcaacctggtgcaaggtacatttactaaagaaattgatccttttgtggataataatttattgggaaagaagtaaaggtcaatacaagggactgagggaggataaagaaacaacagtaatatgcatccaggcatctagcattctacccacagtggttgctcaattgatcctacaatcacaattcatagttgaaaggaacatatgccttgcaaattcagtatttctcaaaacttctcatgtcgatttggcgcccaaacagaaagtgattacacaataaagtgtggttgcacagtacatgctgccatgatgaaaagggacaaaatcatgaaagaacaatcatttcaacataaagggattccaattcagaaaacaaaactcaatatgatgctattttgttgaacctttgaagctttcagtaaagcagggcatgagccttttcggtaaaaatgatgctagtctgctctgggtaacaacaaatccaaatgtgctgaagaaaatcatcccaaattgaataatcaatgctctctaagtaaatcgcgaagtttatataaatgcacaggcagtgaattggagtacttctgtagtgatgatgttagtagcctacttccagtaagatcaaatccaaatgcactgaataaaatcatgctaaattgagcaactcatgctctccaagcaaatcaaaaaaaattgtatagtggacacaggcagtacaaactaaagtacttttagcagacagcatctaagagcacagtgaccaaataataagcaaaacgcagtaagctatattcaaaaaaacatgaagtaatactgcagtacttagtgcggtcctccttagttaagaaagtacaattatctacctatcagaagaagccaacaaaaaatatctcgattgctccaaagtatcgacaatgatcaaaattagagcagcatctttcggcatcgaatctatcttctctatgtaaacagctataaactctcaatgcgtgtgctattagtccattggtacatacgacatgattggcataatttcaacgctatccctaacccatctgcgttagaaaattcaacacaggagcgcattaatcgagctagtcaatgaagggaggaacccaacagccgctcaccatggacgtgatgtactcctcgaaggactcgcggtacttctcgtagagctgctgcgagtagtcgtgcggcggcttctgcgtgcacatgttgtaaatcgtcctggagcacggagacgaaccctaaatcagatcagcgcgcggggaagaaaaaaatcgaataaatcgggagagaaatcgaggagggcgggcacacgcacgtgtagagcatcatgtagtcctcggagctgaactggggttcgggcttcccctcgaggatgttcttcagcttggtgatgcccttctgcatgaactcccacccctgctccagatcgatcgtcttccgctcgtgggtcgccatcgcggccggcgccgccgccgaatcgggggaagggcggcgcgagacccaccccgccgaggatccgccggggagccctagcttggggggggctcttcgctgtcgtgtacgtggggggaggggaacgaggtcggtgggttccctcccgccgcacgcgaggtggacggaggcgaagaggggaggaggaggggggatgacgaaatgggaaaagtggaggggcctttttcttttctttttcctttttttttttgctcccttttcgctgatagggtggggcgcggccgcgcggggtggaagttttgctgttggggcggtcgtgtgatcgtgtctcgtgtgggaaacacgccggggtaaaggaaccaggtcttttatatctgtaataattgattattctgaaattcaataattggtaaattagtggtgctattctatgaaaactggcccatttgtaaattggtaaaaaaattattattctcggaatatctgaaaagtttctttcgcatttacttaaaagttttaatcacctatctactctactcctctctaggcattaattgaccctttcagatataataatgtgagatgttgttataaataaagattttaattgaaataaatacaaggaataagtctacttcaccccccaagtattgaggttggtctacataacccccagaagtacgaaaccgggtattctgcccctctaaagtatcaaaaccagtttaaataacccctagagtggttttatatgtggttttgttgtgcacacgatggcatgtcaatggttctggccttgtaacatgctaagcattttattcacaagtgaaaacaggctgagaatgatgtaaattagtgttaatatatactccattcaacccataatatgaggcgcacaagcatttcaagattcaacttctataatatttgaccaataattagtataatatgaattaaattttatttgttgggaatattatcattggattggcatttgaatttacgttcatatgattataattttgttgctataataaaccttatagtatatgagaaattataagccaatcgtaccaattttgatcattttttatattataggataaagggagtaatatattttaggcttgccgatcaatgagtgaaaagcaatagttagatcaacttaggtttactagactaatctttgtgtcatgcaagccaataccgctgccacataatcatttacatggcaaaactaccaacaaaactactctagggggttatttgaaccggttttcatacttcaaggggtagaatattcggtttcgtactttaggggggttaagcagaccaaccccaaggggtgaagcagacttattcctaaatacaatgatgtaatcggatcttaaaaattatactctctttaaaagagcggaataactatatatcattcgacagaaatttggggatgaaatcttacatattttggaccattggatctgtgccaagatttatgcatcgacttcttttcctccaattccagtggactccccttcttccccggcgccagcgacacccgcaacttcagcagggagcatatcggttagggtttggagttaagggagggggaagaaggggtttctcggggcttaagagggaaggatgtggggcggtgggtggtgcacatggacaggcggccaagcgccggaaccgcgggattgacagcgggcggagggccggcgttggcggcgggggaaaacggattgcaaccttgggaaagagatggggggagggagaggaggccaactagggggagccttgcgggcgccgttgaccccttccggctagccagcaaggctaggcggcggggtagcggcgcggcgactgcacaggacgtggaggagcgctcacgctcacgcatgcgtgaaagcggtggtggcggtggatggattgagaagtggaggaaaagtatgtttgttatgttgcaagatttggggaggttttttctgtcaaaagacacctagacagtccctatagtatttgattggaaaaaatagagtgtgcactagttaaggaagaattatgcgtatccactattcagattttgcctacatgaatttgcgtgtgatgttggtaatggaccacagcccacaagcccttttataattcaactcagtgtttttcctttggaataagttcacattaactcccttaacaagtgacagaatctgattcgtatccctcaatcacaattctatatctcgatcccttaactattaaaaccggtgcaatttgactccctcgacggtttcactgatatggcgcacacgtggcaatgttgacctagtctccttcccacgtggtattgacgtggtgtttatatggcattaaaattaaaaaaatatatttggaacccatttatcattcacacaaaaaaaattgtggaacccacaaaaatgtggggcccacatgtcatcctatctctcctgcccttcttcctcctctctctcccttatttctctctctttctctcccctttacttcactcaatctgctggaggcaggcgggggatcgagtgccgccgccggcggcggcgggcggtggacggtagccggcgggtgggcgggtgttggagcagcgacgcaggcaggcgggcgagggccacagcggcggtggcgggcgggagggcgggcgctggagtagcgacgatggcaggctggcgagggccaaacaactctccatggccacccgctgccgcaccgctgcaaccaccggtgtggacctcgacatccgtgctgttcgatgccgccgccgctccaggtccaggggtgcctatcgccgccgttggtcgaccgcctcgcccttccgttccccttggattcacttgccgcggcggcgccatatcaaaggtagaagaggaggcgacgcggctagagaaacaacgcctggacaccatgcttcgctgcctggatcctctccttgccaccaccgagtgaagtaaaggggagagagataagggagagaggaggaggaagaagggcaggagaaagaggatgacatgtgggccctacattttgtgggtcccacaattttttttgcgtgaatgacgaatgggtcccgcatatttttttaatcttattgccacattaatgccacgtcaatgccacgtaggacgaatactaggtcaacaccgccacgtgtgggccacgtcagctaaaacgccctccaaaaccgccaagggagtcaaattgcaccgtttttaatagttgaggtgtcaagatatctggcattatggttgagggatacgaatctgattattcggtcacttgttaagggagtcaaagcgaacttattccttttcctttcctttgttttatacttttgggtaaagtttattttatgtccctcaactatggtggagattcattcgcggccttcagccataaaaccaactacaaaatttcctcttactatcaaaactattgcaaatcgagtcccacgatggtttcatctgatctggcgtccacgtggtatgttaacttggttttcgtcatatgtggatgcttatgtggcagtagaagaaaaactttaaaaacttaatgagatccatatgttagtcagaaaaaaaataatatatacttcacacatgcatgcataaaagcgaatacaataagatgatatagctggctataaaagtttgcacatcagatttgtgcttaagtggagtagagagaagaaaagcgagatatatggtataataattaagttgtgtgagagaaagagatgggccatactttaatagtgttgtatatatctataactaactattgtatgtatggctatttaattagcattagattatgtgttatttttatagctagcagttggctatactattaaccttgaaagaaataacaatctagggtaacattgacaaatgcgacgatgtgtgttaatcttggcactcaaaatggtgcgaaaaaatacatatatatgcacatctagctgaggttaccggattcctatttatatgtgataaaaaaaccttatcttctaactactggtctcctcaaccttgtgccgttgtgcgcataccacgtatatattatctgtaacactcgccgtcaatccaaactatcaatgttgagattgctcttgaactcttcaaacgggcgcatagccagtggtttggtgaatccatctgctatttgatccttggaagaaatatatcctatctcaaataattttctagaaactcttctcgaacaaagtgataatacaagcatgaaacacatgatttgctgatagatacttaactccaatgttatcacaccacatgattcgcgaccttaggtgcatctataccaatttcacataacagagtcggcaaccacataatcttagctgtttcatcagctaacgccttgtattctgctgcagtgcttgacctggacacagttgcttgcttctttgcactccatgacactttagagcctagaaagatagcaaaacctctagttgaacgcctgtcatccaagcatcatgcccaagtccgcatcagaaaaaccattgaccaacaaagaattgacaaaccttgttaactgagaaagaaatacctggtcttgtcaaatttaagtactggagtgctccaacaatacttcagtattgcatcttttggcccaaatagattcatgagttgacaattttatcgcatctaagcaagggagtacttactggtttgcaatcgtgcattcctattcgttgttaaatatcatatgcacacttggcttgaatcaacattatttcatcatttaccttcacctctatactaagaacgtagtgcaagtctccaagtccttcaaggcaaactccttgtaagattctgcaacattaattttttttgaggtgaaagcggcaagagtattgccgaatatattagagagaggagagttttacataacgttcaaaagagcaatattacaggcataaagtgagcgcctcgggctattaagcatataggtaggtataagactaggacgacaagctaaatcagggcagttggaaaacgaaaacgctttcttgtatgtcttcattgatctgttgggcagctcgacttgaattcggttcctgatgtttgaagatttttgcattcctttgcagccatatgtgctaccgtgtcttgattaggatttcgactcggtgtcgtgattctattctactggttccctgtgctaaatccatcatccagtgtgccaaggaggtttggtttattgtcccctgtatgccctgtgttgccgctacaagttccaagttcttctagtgaaatcacattccctgaagaggtgttcagtgtcttcaaaagcgcttctacacagagggcaaatccaatcgcattcccaatgtcggattagaaggttttcagctgttagggctcttttgtgtagcaccagccatccaaaacaatctttgctttggtagtgcctgtgctttccagtttgctctgagaatggggtcttgttggcaagttatgaattggaacttgtaagaacttttgtgctaagtagatacctgtgctggttctcttccagattatagaatcttcattctgtattgatagttgaatgtttgatagaagattgccaagttgcaccagctcgtgtatggcttccccattgtcaatctgtctaagcgaaaacacccagtggttatcgtcaagttcggttgctagattcttgttttttcctgttgccaactgaaagaggtttggggcaatttctttggggcacattccttggagccaattatccttctagaaaagaattttttgcccatttccaatgacaatttgggtgcaggcttggaagagttgcaaatcttttgcattgcatggtaattccatgtcattccatggtctgttacaatcatgccatcttatccataaccatctcacttgaagggctgatgaaaatctttccaagtcaaggattcccaaccctcctagttccctcggcatgcagacgatctgccagtttacaaggcttttttccggctttacattctctgcaacattaatgaagttgcacttgctgtagatctagccactattatattgccaacataaataagcacaaaaattgtgatgtctcctttagtataaaagaataaggatgtatctgctccttgatggtttaaacccaagctcatgaaattttatacttaactaggctcgtggtgcttgtttcaagccatacagagccttgtctaacttacatatataagttttgagttaacaccaagcacttatacaaactcaaaaccacaactctctcgcatacacacacacgaaaatcatggatttggggagaaaccactgagtgtccgtctcgcacaggaacatggtagaacgactcatcttggatgcttcttgactcacccacacatttgcatcgaacccgttagctcgatcggacggctacacaattgctagtagatcggacaaccatggaaggcgtcattgcttaataaagaacgagaacgctctctgttaagatttcacaatttaatatggttataattgtaatctcacatatccttctccttattttctgttgtattccgtctaaggcatagttcatattcttattgcccacattgcaacttatcaggaatggctttggtatgattctgtaaaaaaaaaaaaggcaggccgtggatttcctccaaactcaatcgaagcagacgaacgatccaaactgcctccgcacattccagaaacagaagggccccacacgacccccgtttcctcccctatttatttccgccgtctcccccgcgagatcgattgatcgaatcgaagaaaccccaaaccccaccaaaaccctcgccccacgcctccttcgtccacaagcctcgcgcgcggcggcggtggcggcggcggcggcgtaggcgtgatgaatatgtcgccgcgcattccggtggtggacctcgaggacgggtggcgcgacgtgctcgccggcgtcgccaagctcaagtgcatcctcgatggctccaacgtcgtgcacttcgtccccgacgagtacatgcacctctacacgtacgttccccaatctgctcgctcgtcttctccgcttgggttctctcggattcgcgggggtttttttgttcgttcgttgttggttccaatctgatttgatctgatctggtacggctgatccgtggcaggacggtttacaacatgtgcacgcagaagccgccgaacgactactcgcaggtgctctacgatcgctacaagcaggccctggacgatcacatcgaatccgtcgtacgtgtgctgctcttaatctcccatcctttttgttttgggtgttttttctgcgacccggctgctcgatttcgccgctgcacgtttaggttcttagtgcgatgatgaattattgccgaagggggttttcggtttattctgatttatcagcgattttttgggcgaatttcgcaccaattaggggttgccgctggtccgtacagtttaacatgttgcacttgtaacccgtgatttggaccctcggttgaggacttgaggcattatgtggacgattcttatttcttaactgtctgttattgtttttaaactttttttatcgatccattgttattccgcttttttttttattgttgcttagttgtgcccgtgcgcaggggctgatcagtccctcctgcacccacaagacccatggatatccttaggaacacccccttcaattttttcaccataaattcaattttttcaccataaatgataaactaaaggtccctaaatggctggaggttaaagaaactgtgtaattaagcccccccaaatttttgttcctggatccgcccctgcccgtgcgatgcaaccaaaaaaaccccgatagtgaaaatctcttcatagtgcgtaaatggctgacggaaatcatggaaagtaaaattgaacgtgatcttgtaatggaaacataataggacttgtgtttgtgcagcctttgaaaaagccaagacgtttcaacgtagtagcaattacatagacggctgatggcattttgacgcttatttaatttggttcatttttttttctgctcctgtgttgcaacctgcatgttattggtgtcctcctgtgtatttcctgaatgagttcttggagatggatatgtatgccttatttatgataattgtttgcagtgaagcatgttaattagattgattctgtactttcagtgcgaggcacatttgttgggatcgatgattgcatcttaagaatgatagtatgagatcgttaatgtgcctttttcctaatttatatctttgagcttgaaggtgttgccctccttgaatgagaagcatggcgtgttccttctgagggaaatagtgcagaggtgggagaaacacaagctaatggtaaggtggctgaggaggttctttgactacctcgatcgttactatgttacacggaggtcccttgattcactcaaagatctgggctggagtagcttccgggatttggtgagcctcagttagttttcagagaatctttagacgagtataacttagaagcactacagttgcttattattactccatgatttgacaaatacctttgatgattcttctgttgtgataggttttcgataagctcaaaagtactgtggcaacaattatgattggcatggtgagcttgccctccgcttcttaatctcgtgcgcattctacagagctaacttgatcactactaatttcttttatttaatagattgatgatgagagggaaggcaatctaatagaccgtccactcctgaagaatgcccttgatatctatgttgaaattggggatagtcaactgaattattacagtgatgattttgaacaatcatttctcaacggaacaacagattactattctaagaaggcacaaacatggattcttgagaattcttgccctgaatacatgctcaaggtatttgtggagttctgaaatttacattgctgctaagtttaacgataccctcttactagttatgtgcttaataggctgaggaatgcttacaaaaagagaaagaccgggttgcaaattacttgcattctactacagaaccaaagctatttgcggtttgtctcagttatatgtttgatgtttcttggcagcttttcaatgatgcatgtaaaacatgcaatgactttctgtgcttctgaaattgtacccttcaacctaaatgctttcaggctgcactcttcgagttgatagataggcgtgcagaagaaattctgaacaaggagaactccggatgcaaagtgttgctttgtgatgaaaaggttgcattacactgaaaaaaaaaactctggtttgtgaagttgcaaaatgaggaaatcgctggcaatcaatttactgactattttttgctttctgactgtagaccgaggatctagcaaggatgtttaggctcttctctaggataactgacgggctgcttccagtatcgaaaatatttaaggaggtattgaattgtctcattatgctccacatgctgcactgctgaaatattccaatctccttgaaatgttacttctgtgcagcatgtcattgctgagggtatgtctctgctgaaacatgcaacagatgctgccaacagcagaaaggtgatgattctatgtctttgctctgttccttggcccagtggatttgctctgttccttcatattgtgctttgcaagtttccacatccttgggatgacattcttaatttatatttcatttgtttgtcaaatcagtctcctgtgggtgcataatggcatctaacatcttaattgtgctgactagcctgcaattctataatagcaagagaataagggcatgtttggtatagctccaactcctaaatttaactctagaaattgagtatggagtggagttgtggagctgcctaaacccaactccatctctttagtttattttgtgagagtactcctgcgagctctactctctttctgagtggagctgaaaccgtttggttgagctccagctctaggaaaggtggagctggagttggagctgtgccaaacataccctaattattgctaaatagatacatgcaatagataataatgtgttctaattattcttgaatctgattttcgaatggactatttgttcctagatctcaccctgctgtgaatctttactatgtggtcgatgtagtctgtccaacaaactggttacaataagacccacagaagcacatatggattcgagaaagggatccacgaatattgggtagcccgtagccgttgttaaaccaggtcgagtactttatgaaaagggcggagtatctgaaactgtaaggaagcttattacaactgacagctttacaagtcaattgctattagaaggatttactagttaactggttttcatgctttctactgcaatatttttttcgtgttatttttttcagaagtgaatgcatcgcaaacgttggaattgtattgtgtacaacttgtgctaatcagattacttatattattgtattctgcacgtatacaggatgagaagaagggggtggtggtgggattgccggagcaggtctgaattagacatacatttgcttttaactaaggttgtactactgcttttttagtcttaatgggttaccaccgattttaggattttgtgaggagtgtcatagagctccatgacaaatatatggcatatgtcaccaactgtttccagagcaactcagtatttcacaaggtttgctacttgccaagttaccgaccctaattttgtcttgcagcatttggttgctcaaaccttgtataatgctgattgacctactttatttacttgtctcaggcacttaaggaggcctttgaagttatttgcaacaaagatgttgttggttgcagtagtgctgaactgtttgcggcatactgtgatagtatcttaaaaagaggtggaagtgaaaagctaagtgatgaagctatagatgaaagtcttgagaaggtatatagttattgcaatactgtttgtacaaactagttacgaaatctcttgttcaacagtgtatttaatttgtatcaggttgtcaagcttctaacatatctcagcgacaaggacctctttgtagagtttcataggttcgtggttctctattttcttgatgacaattttattatgttcccaaagtaaataggaaactcacattttggaagcctttgttttttctggaataatctattacaggaagaaacttggaaggagattgctgtttgataagaatacaaatgacgaacatgagagaatcctactctccaagctgaagcaattcttcgggggacagtttacatcaaaaatggaggggatgctcaaagatattacattggcaaaagaacatcagtcaagttttgaggagtacgtaagcaacaatccagagtcaaatcctctgatagacttgaatgtgactgtcttgacaacaggatactggccaacatacaagaactcagatataaatcttccattggagatggtacgtctatggatttcctgtttaatttgcactaaatttttgatgaactatcacagattaactttataaccgtccgattcacagttgtttgagacattctcattttcctatttgagtttgtcttgtaactcatcaatggccacgaaatgcgacctgaatattgcagtgctaagccataatgccatctattgttctggaactccatgttttcaggttaaatgcgtggaggttttcaaggaatattatcggtccgacaagcaacacagaaagcttacctggatcttttccttgggaaactgcgtcgtcattggaaattttgatgctaaacctgttgagttcgttctcaacacttatcaggttatttcgaaatctttgtacaaagtgaatcgctcacacacttaatgcatggaacaaacttctcacttaattctctcttaccttttccctctttggtcaggctgcattgttgctgctattcaatgaagctgataaactgagttactctgatattgtgtcacaattaaaactgtctgatgatgatgccgtgcgtttgcttcattcgctttcttgtgcaaagtataagattctcaacaaagagcctagcaacagagtgatttctccagaggacgagtttgagttcaattccaaatttaccgataggatgcgaaggattaaggtgccatttctaactatttacccattcccccctggtttttcgagctaactaaacgtaattttttttttgtgtgcaggtaccacttcctcaaatcgatgagaagaaaaaggttgtcgatgatgtcaacaaggacaggaggttcgcaattgatgcatctcttgtgcgcatcatgaaaagccgcaaagttctgggccatcagcaacttgtagcggaatgcgtggagcagctcagccgcatgtttaaggtacacggcagaacacatacatgtcgattctgctaacctactttttgaacattctgccaatttgtgtaaagctttcagtcatctgtggtgagaagggagagaaaatccatgttttcttaagacttgtgttgtcagatattgacaatggggatttgttctcactcttgtgcagcctgacatcaagatcatcaagaggaggatcgaggatcttatcagcagggagtacttggagcgtgattcggagaatgcccagacctacaaatacttggcttgatgattggtcctgaggcgacttgctgactgtttgtctgtttactcaccctctggattcctagggcagtgccctgatgttgccaccagtagtctctgtttacttacatccacgcatcagggttgtacactcttttcctgctcaagtgaatgattagaggaaaaacagattaggagaagcagctatggctcggctgtgactgtgaaccacatttacatgtttagctttgacgccctttgctctaccttttgagtttctataatttttgttgattactttcttcttgccgatcattgtgttaaatcgcaactcatcatggagaaagaactttattgcagagtcactggcactttacctgcctagtgcctagcattagcatatgtggtttattaagctcgttattattaaatctaaatacatgtcgatgacacgccctgcattaattgttctgcaggcctaataaacgacctagtactgtataaaataaaataaaaaatgttgggggtaataagcagtttatatctaaactagacgtagtagatcatgccgacttcgataaggctgatgtgcgggatgttgagcacgaggccggggcctctgcaattcttgcggaggaaagcgtaggcgacgttgacggcgaacttcttgaacaccgacgagctcttcctcgccttgatgtacgagtggcccatgatgtaggcgacgccggcgtgcttggcctccaccagcgcgctcagctcctccttcaccctggggtccgtgtgctggttcgccacctcgaaccgcacgcgccgccggctcgcgaaccccggcgactccgcctcgtgcatcgtgtgcatcgagtggatgagcgactccggcttggcggccgcggcggcgcgcgccaccacgctctcctcctcgccgggctcccgcatgaggagccccgtcctggcaaggtcgctgggccgcgggaccacggccatgcggccctccacctccacggaggcgacgaccccatcgtcgctgatgctgcagcgctggtcgaagtcggcctccatctgcacgaactcggcgatccgcagcacgaggtcgttctcgaagtcggtgtcctcggcgagcacgtccttgtagccgtgccgaacgacgcagcggtacatgcggaactcccgcgggccgatgcggccgacgaggtggcgctcctcgtcgcggacgtgcggcaccggcacggccttgacgcagatgaagacgagcacctggtggaacgccggcaggttggtgacgaagtgcgagaagatggccggcacgccggtggccagctcggagtagatgatgccgatccccgggacgcgcacgatgcccaggctggggccgagcgcgtggatccacctgagcgacaccttgttctgcacgtcgaactggtgcttccgccgcgtgccgtagtgccacacgtacatgacggcgacgaacaccagcgacagcaccagcggcagccacccgccctggggcaccttcatcagcgccgccgacaggtacaccgcctcgacgacgccgaacgccaccaggaagagcgccgccaccaggcagctgtactgccagacgaagacgatgacgagcgccatgagcagcgtggtgaccagcatcacccccgcgcacgccatcccgtaggcgttgccgatgagggtggtgtcgcggagccccatggtgacggcgatgcacagcagcatcaggatccagttgatctccgggctgtagatctgcccgtggatccgccgcgacgtgtgcacgatcttcacgcgcgggaagcagcccagcgccgtgcactgccgcacgatggagaaggtcgccgatatcaccgcctggctgcccacgatcgccgccagcgtcgcgatcaccagcaccggccagaagatgcccgctgcaaaatgcgacatttcattcggatcgatgtcgtcgtatcacgattcatgtcacctcaccaccagtgattagcagtagattagaggagtactccacttacttggaatggactcgaagaatacgaagtggatgtcgcagtggggtgatttggacaggaaggccgcctgccccatgtactgcagcaccaagcacgggtagatgagccccacgaacgcaacctgtcaacaagtgtacgtacgtacgtgtcaaacaaatgtcaagatatttaacctgctcttaaaatcaatctgcattatattaaacgagacgcagtactgcactatcagtgctctgacagcaagcataaacagacacatatacccttatggatgcagctgtgaagtggccaagatccgcatacatggcttcggtccctgcacatacatacatatatatattattataaaatatgtagttgatgagtcgcagtgcagcgagcaaaataaggtttgtttgcctgtcatggagaggagaattcccccgagggagatccagccgtccttgccggtgtgctggaagaacctgacgaggtagtaaggggagagggcgcgcagcaccctggggttccacaccacgatgttgtagacgccgagcgccccgaggaggaggagccagacgatgaccaccggcgcgaacaggaacgccaccctgtgcgtgccccagtgctgcaccatgaacaggcacaccagcaccgtgcacgacaggatctccacctccccgctcgtcagcgcggtcgagtgcacttgcagcccagagaaggacgacagcactgcccagccagcagccaggacaaaagatcgatcatcgatcacatcagcaacccaaaccacacaccaagtagtagtagtattacggtacgcgcgctcaccggacatgggcggcgtgaggacgccgtcgccgatgacgagggaggcgccgaagaggacggtgacgaggaggaaggtgcgggacttgcggtggttctcgaggaaccgacggagcgcggtgaggatgggggtctcctggggggcgtagccggggcggtagtaggaggtgagctcctcgtcggcggcctcctggtttggcatgaggctgaacttggcgtggcgcaccagcagcgagtagagcgcgaacgtgccgccctcgccgttgtcgtcggcggcgagcacgatgaagacgtacttgaggagcgggatgagggtcagcgtccagaacactagggagaagacgccgaacacgatctcctcgtcctggaaccgccggagcgacccgatgatgaaggtgctcttgtacacgtacagcggcgacgtgctcaggtcgccgtacaccacgccgcagctctggtacgccagcagcagcacatgcctgtagtagctcctccagtgaccctgtacccgtaattaattctactgattatttattattttatcagattattactttcattcttcgtattatggccctgtttagttcccaaaaactttttcctaaaaacatcgcattgaatcttttgacacatacatggagaattaagtatagataaatcaaaaaactaattgcacagttagagggaaatcgcgagacgaatcttttgagtctaattagtccatgattagccataaatgctacagtaacccacatgtgctaatgacggattaattaggctcaaaagattcgtctcgcggtttccaggtgagttatgaaattagttttttttattcgtgtccgaaaaccccttccgacatccggtcaaacgtctgatgtgacacccaaaaattttcttttcgcgaactaaacaggcccaatatatggagaaatacgtgcttatttaatttagggaagattgcaaaaatcaccctaaatatatcatcctaagttcgagatttcttcatgtaaaacgacttgttacaaattccatgtcttaactcaccttgtttcgatatatattcctcccaattaccattgtttgcgcgttttttctcctcgtgtcttacttggtttagtgtattttttgatggacatgacccaaccacatcttttgcacaatgtaagggcatgtttggttcaatactaaacttaaccataccaaatacttggcattactcaaaaactgtcatccatttgttttatatccaaataatttgtcatgccaaattatttggtttttggcatacttcataggtagcaaataaaacacataccaaaacattagcatccctttgtggtaacaaaccaaattcaaagcctagccaaaaacatttggtaacaatccaagcactttgcagaaaaataaataaataaaaaaaatgaggcaatgatcaaatcttgccatgccaaataaattggcaaggccaacaatggccaagaaccaaacatgtcctaagtttttttttttaatctggttcggctgaggagagacaaaatcggtaggaaaaaaaagctgtccattttccttccatcattggtcgcactaaagtgatacacattgcaaaattatttaactagcgtcagtattcttcatggattggtaatactgtatactactgatgccctctgtgctcacactgtctgactcggtcacaagctatttttaggacggtgttagtaactagtggtgtaaaataacaatgagctactcctactgcatgccactcttaatgtaaatgttctccttgcatgatccactcttggaaaaaaaaacaaacaaatcactctgttattgtcaaataattcagtcaagaataacattttagttgggatcgttcttcctgattaggtactagtaatatattcttccataagtatggtcagagataagatgcagggtacattaatcaacaccatttcctactacacctcagtaacataaaggaggaaataaagagaaaaggaaaaaaaagggtcagattccgttgatggaccagcaccgatgttggtttaggtaacagaaatgcaaaaaattgcaaacggtaggggtgcacatcatgtccgtatgcttacacaatatcacaaattcatcacaagaggcaaataaataaattatttggaaaatgcgatttcaatgcacgccagagcaaggggaaatgtatagctcaccgggttcccgtttgcggcacctgcaccggtgacatctgccggcgagagaccgctttcgcagtcggccaccggcattttattttattggaagatgaaaggagagggaggaagatggccgggatggagtcaccaattgcggacatgcgcactctctctcactgcgtgcttcttctccgattcgccgtcccctaaatctgttgttttatttgggttaatgagcactcgtcggtattcttggggttatgtggatgagtttgtattcatcgaggcaaatgtagaggggagagagagagagagggggagagcccccggtttataatgaggtgttaacagttgtggccatggagtcatgcaaagatgaagcattagaggagtagtagcgtatagtactctaattttgtagctgtgccgctttttaagatattttactttccttggaaaagtactggtacgtattaaaatttacactaaaaaatttgacaccacgaaataccaaatatctagaggtaccaaatttatattatcatcttcgggtacatttttaagaacagtaaaattactcatagtccatgctgtttgtactttttattcgggattgttattaatacttaatagtgtcaaagaccgttacaagtaataacaatgtgttgaggcgttgagcgaatccatttagtttttaacttaaaaatagcacttcctccgtttatgtaagtttggccaggctttaattttttctaagttaacaattcttataacaccaaatttcattaaatccaacagtcaatatattttgatggaatatttgttcggtgttgttcttttataaacttagtcttaagaagtttgacttaaaaaaagttaaactatattatagagtgcattatttatttagggaaaagtccgaattacacccctcaactattggatgagtatgaattatccccctaaacctaaaaaccagacatctttaacccacaactatcaatatggatgaaaaaccccctaacttgactcagtgcgaatttggatcatacgtggcggtccagtcagcttaaaaaatggtgggacccacctgccagctcttcctcttcttcctcgttgccactgcttaaaaaaagctatgtcgagggtgaggcggtgacaagcgacacgggaggagccagtgaaggaagctggggggcagggctggcgcatctcgccgcaccagtagaggggggcgactgacatcgacaccgggctcagatatgatgattttgatttgggggagtcggtcgagaatttgagagcaatggcggagaaagtgagccaggggagcacggtaggggaatgatggcgtcctccggggtcgccgtcaccatgaccaccgtgcccatgacggaggagcacatcgatgccttcactcaccaggtccgcctctgcttggtccccctcaaggatgtggctgggccaccgctgacgtcgccctggcaccgaggcggaaggcgatgacgaccaccactggggaggagcgcgtggcggtggcggccgtcgaggaggagtgcaactgggggcggtgggactcgagtggcggaggtggaggagctcgagcgacactagctggaggcgatggccggaaagggaatcggcggcgatgtacaggtcggtgatgttcatagggagctccacgcagcaggccggcatgagctttggcggcgagcacgcacaacagcagccgtgcccccccaccgccgttcttggctccccctccgccactccgagctggctccatcgtccccgcctgttgccgctgcttcgaggtgccttccccgtccctgcccgctaccactgtcctcagctccccttccgccactgagctgcctccctcgatgatgcccgccatcgccatccttgactcctcctcggccggttgctcggtgatagagagagggggagtcgagaagagaaagagaaagagaaagagagaggtgaggggaaagagagagaggatgagactaaaaggtgggacctatcgatttaaagaaaaagaattgctgactggattgccacgtaggacaaaaactgctccgagtttgagttagggggtaattcgtccggtattgatagttaagggtgaaagatatctggttttcgggtttagggggggggtaattcgtactcacccaatagttaggggtgtaattcagacttttcccatttatttatcggctccatgttgacaggctaggtttgatcaaatgatgtcaaatcatttcaacgtaccagaacactgcatataaggggcagatgactcggtatggcgagctgtggcgctcgccataccttgatctgctagtgagacccccccggggcgcgtcctccttcctaggacgccgcgccgcaccggcacgatcgagagagggagagtgagaacatggcgcgatcgagagagagagagagagagagagagagagaatgggcctaattagttggcctggttcatcctttatgtgcgaaggcttgacgagttcaaagtttgtcatgatttagcaagcctagcaaaaaagatggctgaacttgagagacacattgtatttccattggtatattgtctcattgagttagtattgcttttactggtggcgactagatcagttgagagggccttctaggtaatgaagattatcaagacggagctacgcaacaagatgtccgatggttggctcaatgacttgatggtgtgctacatcgattcaaaggacttgattttcaaaaaaaatcaaaaaaagtatttcagaaaaagaaaagtaggcaaatgcaattgcctaaatctcctagacctctaagcaattaaataaatgtttggtataccttcacattttattccaatcattgctctttatgttatcaatcttaagtatatagtatactaattaatctttgcaatttgttttgcagtttctatatgtctatctatcctcactagtctctagttcttatatgtgatgcattgctgacagctggaatcttagaggtattatttacaattttggcaaatggatgatgaatgtgaacctatggctagtgcttgttgccatgtttgagattgcgtcatgatcggataatgttgcgtcatataatatagtgcattaagattgtttttttttctttgtgctagtccatgggccacaccggcgacaccgtcacacctaattttttttcccgtcctccaccactgtgcatatataaagataagcagcattattaatttgaaggtgcctctaggaaaaaaacagaacaacaattttctacggcgagtgcccgagcggaacgccacaccacacaaagataagcatgcgagatttaggcacaatgctattcttagtgccacaatgcagcaccgacacctgccaagcctaaccgtgaatcccttcttaactcccgccatggcgctcctctccaactcgaggaggacacgcacgttgccaccacaggctacgcaaaattctctcccttcctcctccaccacctccactccgacgatcctcctcctgatcctgtgccggccggcgatggcgtaccggttgctggagctcacgctggtctccgcgagcgacctcaagaaggtcactctcttctcgcgcatgcatgtctacgccgtcgcctccatctccgggagcaacgtccccatgcccatgcacggcacccacgccgaccgcaacggcggcagcaaccccgcgtggaacaccgtgctccacttccccgtccccgcccgcttcgacacccgcggcctcgccctccacgtccagctccgcgcccggcgctccttcggcggccaccgcgacgtcggggacgtgttcgtgcccctcgacgacctcctcgccggcgcgcacgacggcggcgagccgaggccggctagctaccaggtgcgccgccccatgtccgcccgcgcgcacggcacgctctacttctgctacaggttcaccgacgtcaagcatcccgccctcgaagccatcgaggccgcgaccgcgaccgcgacgagcagcgccaccaaacaagggcagtacgtgcccatgtacgcgcaggactctgatgagaaggcgacggagaagagcgtgtcgtcgccggtcaccgcctacccgccgccgtcgaacgccgtggtagcgcacccgccggtcgtgccgtacggcgcgccgtacggaggagggtacccaccgcatcagcagcagtacggttacgcgggtcagccgccgtacgcgtacaacgccggcccaccgccgccggcgacgtacagctacgcggcggcacaacagccggcggcgaggaaaggtggacgaatgggcatgggcctcggactcgggctcctcggcggcgcggtcggcgggatgatgctcggggaaatggtcggcgacatggaggctgacgccgcctacgacgccgggttcaacgacgcactggaattttaggtcttttgtcgtgttttcctgtgtacatgggcaatgcacctgtataaatttgtcacgtgcataagaaatttcacgatccaacaatgggaaacgcgatgtcaggccacaagggtaagcagatcctaaatcaacgctatatatatatatatatcatccagtacgtacaaccacacatctctactccttaaaaaattcaaattggtgttggtgatagtgaagccaaagcagatataggatctaacatacaaagcagacatgcgatccaacatacaaaccatcgacacgtttggagcgacaaaaataaaagaagacgtacacgcgatccggaacaaaaaaaaaaatcgtaaaaaacagaaacgccccgcaacctgcgccccctcctccgcgcgcctccatcgccgccccgcaccctcccatcgcctctcctccgcgctgcccctccaccagcaggcggcgcggtccatcgccgccccgcgccctcccctcgcct

SEQ ID NO: 4715 - DNA, 96046 bp, Oryza sativa
caatataaatatacatggtgattattttttatgaaaaatatggtgacacatttatagcaaatcccatcataatattgagctccagctcttaatagggatggaaagactcggtgtacaagtcgactgcaatacatagacaacaaaatataagacatctcataagttaagctctcgatataacatccgtacatttccccggctttcgcttccgttgaacattatttgttctcctttatctgaaattcagacgaatgcaattatttttatagtttattcataaccaattaaaaatataatggtttgaaaatatttttcatgttgaatcaaccaaatgcatattcttatataaaaaagttttttttgtgtgtccatcaatttttcaaaatattgggttgtctagccgatagatcgactaattgcaattatttagttctcattccgttcgatgcagctgcggcattgttgtcttgctgatccttgagcttctcgaacagcttgcgttgcacgtgctgcttgaatgtgcgcggcgcgaagagcggcttgtcggcgccgtcggcgagcagctccggcaccggctgcagcagcacggactcaggcggcggctcgcagaagacgacccaggagaggcgcacggcgtcgcggctgacgaggccgcggtggagcacgctggtgtaccggccgttggtgaggatctccagggcgtcgccgacgtggacgacgatggtgcccggctcggggcgcgcggtgacccagctcccggcgtggtgcacctgcagccccggcacgccgttgtggaggatgaaggagagcgcgctgacgtcggtgtgtgcctcgacgccgacggcgaggtcaggccgcgggcacctcgggtagtagttgatcttgagctgaaggagcaggtcgtcgtcgacgccggccagctcatgtcctctcaggcggcgttccagcgtctcttccggcaggccgaggccgagggagaggatggcgagcagcttggatgcgagggtccggacgcggccgccgaagtcgcgcgacacggggacgtactccggcgggttcgccggccagagcgagtggtcggcgaggtggtccgggtggacgaggtggaacaggtagtcctcccactccctcttcccgctggcgttggcggcgagcttgctgccgtacccctgcagccgccccgccgccgggtcgttggcgtacgcctccttctccgcgatgggcagcgcgaagaacgcctcgcccgcggcgcgcaggcggccgaggacgtcgcccgggaggccgtggccggcgatgtgtatgacgccccactcctccgccgccgcgcgcaccgcctccacgcacgcgtgcctgccgtcgccgtcgttgtcgaacgcggagatgtcgacgacggggatgcgggcggtggcgtcgtcgtcggacgcggcccgggcgagctccagggcgtcgccgaggtcggcgcgctcctcctccgggcggacgtactccggcgggatggcggagacgccgctgaggctgagggcctccactctcagctccacatccgtcatgtcgccctcccgaagtaggctagtagatgagctgcgtgcgcacgtactcgatcggcggccggtgatggcgaggcaggcagagcgcgggtagatttatactccggcgctgccgccgctttgctccatccatggatcggtgcatgcatgtgttacgtttgtagctaacaacaaccagcggtgtcgggcacgcgcggttagctccatccatcaatcacgtgcgcgttcgtaacattggttgattggtccctgtcaataatgcccctgttgtttcttaattcagatgatacgatccgtatgtataaactcattgcatgctcgttagcctatataaggcataacaagaatttgacttttacaagttagaaatttaaattgtagaacttattttgtagttgaattttttctattgttttctagtttccaaccttaattagcatatatttggacagtgaagaacgaaagtttaaaagtcttaagcaccatttctactatgtgaaactatgattgtgtacgcgcacgagggcatgaacaatataggcccactcctatccaatggcctcaaataacaggtaggcgctgaggcaacacctctaaaaaaaacctacccttttgggcacttctcattttagtcctcgtgcttctaaattttacaagaagatttaaaattttacactactagtaatctgtccgtgctaacgctacggcactataaaatttgtgttaataaattattaaattcatgttaatcaaattaaatttcccaaattctgtccatttgatccatgtcatatatgaaatatatttaagaaaaagtacaaaactatcacattgtctaaaaattaatcaaaaccatcagcaattgtatctactcagaatcatctagcaaatagtagtactaaaaagtctggaaaaactaaaagcttcatatcacgggtttgatttatcatccacagattgccatcctaaaatacaattcaacaaacttatagaatgtacaagggatatgacaaaaaaatatattactaccagagttttttttttgtttgggaatacgcaaggcacgcatatttgtattaagagaaataaagagtatgtacaagcgaagccaaacaagaaaattaggagggggatgcgaaaacaggagaacaataaaaagcttaagcctattctcgcgacatcagaaggaaacgacctagaacaagacctaaatggttagcaccggcagcacctcgtgtgccaaccgccagagagtcgcttccgtcatagctcgggctatctctgaccagggcctttgctgagagttgaagaccctattgttcctctccttccagattgtccacgcagtaagggttgctattgtatcaaatccccgcctgctagccctccccactttaaggcaggaattgtagacccagagataaaaggaatcttcattcaaggggagaaactatggcaaaccagtgctggaaaggaggacccaccaaagctgatgagactccggacaggcaaccaagatgtgatcaatagtctcttcatgttggtcgcagagcacacatccatccgggtgaggcaaacccctagaacacaggcggtccaccgtccaacagcgcctcattgcgaccagccaggcaaagaaccggcatctcgaggggggggagtcttctagatgggttcggagtggaaaggagccctacctagaaagagtgcacgggtatgccgaacgttaagagtagactcccgatgcttcccacttccaaatgaaagagtcggggtggtcagagagccgcaccgacgacctcaggagactccagagttgaagatattgaagaatagcttgcaaacccagcgctccggtgcagtctctaatccatctccggtcttgaagggccttggcgaccgttctgcgacagcgaagccgtgttgggacagacgcccaaaccgccggagatatgtagcgaatggaggaaccctccaaccagttgtcctcccaaaaaaggatggactccccattgcccaaaacacagactgttgaaactaccagagattagatatgcacatctagacaaggagcaacgagatacacaccttcttgccgctgatcaatggtgcttaaacacacagaaatattatagcaacatgtaacaaagatgcacacctaaaaacattgctcgtacttgccggctcgtcagccgtcagatggttaggaaccaaaatcaatattaaccagtattgtggccactcaaaccgttggattagaagggtcaccacgtttgcatccatgacagctgacaccctccaatgaagtttccccttgatgcaatcgaccaccgcaagcaagatacggagatatagacttgtccaacaccactgtgtcatcctcatctctcacctgtactaatccgctcttcatcctgctaccatcacaaaaggtggctgctataaaaataaattaaacagagtgtgagctacaaaagaatccttcgtaatagcatccgaagaacattcatctctagaactgtcacaagtaaacctccatagagcattttttgaagtgttggggctattgcataaaagtaagggtacacttacaaatttaatcgtaccttcaaaaggtcatgatcattccatggccctctgttagaaacttagaaccaaggcaacaccatgactgcatgcacatggaccacgaatgaactatggcaatttactgctaaagaacaatatgttttcacgaaattggtaagctaaatagatattgttgtataaatacgtgcaggctaagcgtttcaataaaggttgccaggcacagctagtaagtatgcacgtggaatccatgtggcataatatttgtgataaatagattaccctaaatcaagtcactcaaatttcgtaaaaaaacgttaagtggtctctctgggtgaagcaaactgaaattcatgcaacttcagagtcaagccacatttatatttcatctttcagtcttgtacatacatgttactaaaagcacttttgccaaaacttgcaagtgaacttcagaattaatgcataagtacataccaattcatgctacacagcaaatggctataattaaatctatgcaaattgatctcactatgtgtgtggggtcctcctgattggcatttcatcaagcaggatgccggagagggtacctgcataccagggcgtgctggaagtgggtggttgtgttgtcccatagtggacttggaactggaggggggcgcaggtgatggtccccagattcctgggttggcgacgtgtttttctctctcagtttgcagttgttcttcagtaacagagttgggagaatggagtggtcgagctgtgaattccacgaaaccagaggttcaagatttggcctgcacagaaggattcatctcatcacaatgcaaattgagagaaaaagaaacatcacaacagattacctgttcacgcaaagatctgatgtttgccatgtttaggcggaaggcataactggcttcgtcaacagaatggacacggtgggcttggagtgcggctgtggaggtctcgacgcttccacctgtgtggaggtggtccgcaacagtttcaggcgatcgatcttattattttatctgccgatgcaactggagagaaggtgatacagcttcagctcgccgatctccttatcccttctatatgagagacagctaacgagcgaggagatatcagacatatatagaagtgagaatcacaattagctttcagaatagtaaatccacatgcacatatgcataaaaaaagactctacattaagctgcattgccatcgttgatagcaatatagggctgttctccttataagtcgtcacgacagtaaaatagcaaaaaaaaaaaaaaacagattaattcctgtgcaatttgatgtggcaatgaaatatagaccatgaatctggttactgactgatcaaagccccctatcataattgaccatgataaagagcgtaatgggtgtaccttcaatttagggaaggaggttgtgtgggtgcgaagcagctgttcacggtgatgtgggaacagataatcggtggcggcaccgtagtctgtgatgacggcgaggttcccccttgacagcagtcctatactgaaacaaataattgagcactcaaccattccagagtactacctgatgtagatcagaacagctagggatatttgttggctgccgcggaggagattggcgaggcagtcgtacggacgcggaaggcggcggcgatgaggattagggcagggagcgcgacgtcagggcgtggacgccggggtggcggggtgcgggcggcattggcggatgccgtcggatgtaaatcatcatatcattctcgatcgttggatgtgtcacatgatgaatgagtaaaaacatttattgaacttatagggtagaaacatgctaaaaatatacaaactaatataaaatctctttttctctcctctccccactatccacgtgactgttcccctctcctctcaccactgagctcactcgacggcaacaaatgcatcctcttcacggtgatcacaagcttgcgttgtctcccctccacctccatttccactcgacggtgaccatgagctccccgctgttattgaattgctactaccgcttgtccactttggtagatatcgctgccttttatttctcactcactatctctttatagtgccaaggacaccatagacaggtcaagaaggccatgcttgtggttgagaccttagtagtggttgagtcctcgcttcagatccaatagtgattgcggaggccattgcagcttcagctcagtcacccccacgcctcagatctacttgtttcccttgcaaattggtcaagcaatggcaatagctcgtttgaggacaccgccaccctccccccttgccctcttctcatttgtcggccatcaccgtgctccgtagtggtgcaggccaaggtggcgtgggctggcgcaaacaaatcgagacggctttggtaaaggggccgagacagcgagtgcagatccaatggcgggccgggcctgggtggcatgtgcaaatccggttacgaggacagcggattgaatgagaaactcctagcgacggataaggggaagggcgagatagatgggaacctatcgcaaagatatgacttcgctaacacaaggctccaagcatgccttcgtggttccctggatagggcaagccgagctcatcgtgccatgcacaaggcacaaatgacctcatgtgcccacccgaccccaccctctcttttctccatatcgatcagcatatggcgtcgtgtggccagatgtcattgtgttgttcataacatgagtaaatccatagacgagaagctcatttctgtccatagtactttaaaatatagtgatggtaacagcgaatctgttgccatacctattttcattgtaattttaaaaattacccttgaacttagtattaaactcaataaaatctcaatggatagccatatataaaatcaaatgaaggtcataataaaacacatttcaaataatatatatttatataacatagcaaattacgggcattaaggtagttaaactttacttatattactccctccatctcaaaatacttgttgttttgactttttgttcgtaacgtttgaccattggacttattcaaaacattgtggaattattatttgttttgtttgtgacttgctttattatcaaaagtactttaagtatgacttatctttttttatatttgcactaaatttttaaaggaaaaagtacgaataaccctcttgaactatcgccatcgaccgaattatcctcctaaacccaaaaaccagacattgcttaccctgaactttcaataccggacgaattaacccccttgacccaatccagagtggttttgtcctacgtgacgtacgcgtggcaatccagtcagcattttatttattaaaaaatatgggacccacctgtcatacccctcttcctctctctctcctctctcttctctctttcacggggcagtgtgcaggggcagggaggtatgcggcggcatagggacggatagtgggcgggggcgggcggtcacgcatgggatggggaaggtagacggaagaaggagggggagtggaggtggatgggaaatgggaggagatggaggtggaaggggtggttggtgcacacggcggtggccgtggtgggcgaggcggcgtgtggcggagacgcggacagtggctggaggcagtagcgaggtgggactttggcggagaggcaggcagtggccacctcgtctccctttcgatctccctcccctcccacccacgtggacaacagcagcccggctgctccccgcgccgccgccgccaacgtgttgtcgtcacccagcaagccagacccgtaggcgcgtaggggaggcggtgacacgcccaaggccgtcatcgtggtcacctccgctgccgccgccgccgtggtcctcgcactgctcaccatcgcggccgcgttcctcctcacaggccgtatgcgccgaccgccagcccgcccccgtgcaacgttgcccgccttcgccttcgttgccagcgccaccagtgttggtatttcttaacgacattactagaaatataaattcccagcaatgacgctagaaatgatcctggtttaaagaaagaatccgcaaacgcacggatatactattgtagcatttcacccgaagtattccaaggtatcgtattaatttatttaatcctaagggaagattgtaatagagaactatgctaataatgtatacatgccacttgtataatcaaagtctaggcaggggttaagatatggcaaacgggtagagtgacacgaagcaaagcactcatatatctcatttaatcattcctaaactaagtggaagaagaaatagaagaacgatcaattcctataattctaatatacactcaactttagtttacacctgctagtatacaaccatatagccagtaccctctaacagtgacctcctagtgcttcgagagaccactccaggttgccgagtttcttacgataacctgtcatggccgttcaatcggggctaaatacgaaggagtaccctcctaggaaagtttcttaggaatatatactatcttggaggaatacctgtactgagctgtcaccatcagcgacccacctcaactgacccgtagcatatgtgcctacttcataatctagacaccacgtctacattattaaatactactctacatcccccgagatgacatatagtaaccgagtaaacgggcattaaacacacaccactacacctctctggtaggctaattatacgactgtaccgatacagatataaagtaaagacaacacttggatgtattaaaatatcgaaagtatataaagaataatatttcattaattccaaaagtcttacaaaagaaagaaggaaaactactaaagccataccgaaattcctccgaagagtccgaggactccgagagcaattctattctactccacttagcactagaatactaaactaaagtgtagaagagatatcttgagcttgctcgagtgtgtggaagaacgaatgaagtgaccccttcatatagccttggaatgacggttaaaacggttggaattgttggatttaccctgcaaccaccattgagaagtcatcacaagcgtacacgtggaggcccaggctgatccggcgctgccagggttcggcacctaggtaggctcagtaggcctccacacttcctaggtcactgacaggtgggtccctatgacggttgcgacagttatgacagtttccgagacggttacacctgacatgtgagcccatcttatccttaagcttgcttaagggtgagttttcttcatttcttctccattttatttgctcaatcgctgcaatcaaataaaatccaagtacaagtggaaatagattattctaaaataaatatgcattgcaagcatagctagttctcctttattttagttatattgacggtcgaaattgatctataacgaccgtcaacaaccagcgacctccacctccgccgccagccgcccgagcaacctccatcgacgccgtccgtggccatcctcagtgccaccgtgctggtgaggggagggagaagagagagagagatggggaatagagagagatagagaggggtggggaactgaaaggtgggtcccaccaattttttattaaaagaattgttgagtgcactgccatgtggaaccaaaccaccatggattgagtcagagagttagttgtctgattttgagtcgaggagttagttgtccgatttatatagttggaggtgaagaatgtccgattttgtggttcagggggcaatttggtcgaccacgatagttcggggaggtaattcatacttttttttaaataagataaatggtcaaatgtaaaaagaaaaaagtcaaaatgacatctaattttggacggaaactgtaattgtttgtccaagattcaaagaagcaggtcaaagccgaaagctgccatgctgattttgcagcgagccagcaagccgcggttcgtacactatgctccgacagcgtttgattgattttgtcaaaactgaattaccaccggccgatctttttctgaattgacatgctagaatccataccagtattaaagtcggctcggccaatcgatcccggagcaaataacttgctttaaatcgtcggccgttaattgtcccaatctggagtttctcttgtagagttcaagggaaaaagtacgaaagactagattggctaaacaacccttatactattatagtagtagcaatattttgaaacataattaacacttaaagtagctatatttaggagggagtatctatcaagtagcttgcacattcgtagaaaatgtagcggttatgacttcaaacctgcaaaaccacgttttgtaacaattaacgagtacaaatagatcttgctttgaacaaaacttctaaaatgttcaactatcgcaaaaatgagtaaattggtcgttcatatgctgtagtggcaaataactaaatacatggtgagcatctattacaaccaagctgacacgaaatatatcagtgcacatttgtagacctgaaattgaggagctaacaggacagcgagaagaactttagaatccagctttctctggttattttagagatcagccctccctgggtatctagggaaggggatgacatctctgatgttctccaaaccagtggcaaaaagaatcattctttcaaaacccaaaccaaaaccactgtgcttgacagatccaaagcggcggaggtccaagtaccattcatatggctccaaaggcaacccggcgtcttgtatcctgtgaagcaaaattgccatgtcattgactgagtatatacattttacggaaaacatgactgataagtttaacagaatcaggggaggaacataaacacgtaatattgtaagatttttagatttttagcatgttcagcatcatccactggatgcatagcttccaaagaaatgatgacatattgaatagaatatatgaggaacaatcagtgcaagattttttgcatgctcaacatcagccttgactaggtacatcagcaacaagccaggaaggatgatataatagggaataatgatgggatgatacatatgtaataatggttaagactgttaccatgtgcaatatctacccattttactatttgattaagcagagagaataccaaaagcatggaacaatagctatcgtactaaagattccaaaatatcttctgcttgaagttgagcatcgcataccttgttttgagaaggtccagacgttcctccctttggcttccaccaaccaactcaccaacctttggaagatattccagcaaataagttagggatcatactatgacaggtcgataatgacaaaatttctgttcatgtaacacattcacatgcttacacctaactcaaaatttatgttcatgcaacatatttacatgcttacacggttacacctaacctcaaattttctgttcatgcaacatatttacatgattacacctaacctcaaaatttatgttcatgcaacacatttacatgcttacacctaacctatattggaactaactagaagtctgaaatatttatatttaccttgggcacaagaacatccatagcagctacagtcttctgatcatcattgagtctcatataaaatgcctttatttctttgggatagttataaacaatcaccggcttcttaaatatcacctcggttaaataccttaaacaatgtaagaagagagataaaaatgtaaacaaagcacagtaagtcatcggaagataaaatattaaattccaatatagatacctttcatgctctgaagctaaatcaattccccattcaaccttgttttcgaatttcttatcagtgacatttttcaatagctcaacagcttttgtatatgaaatgcgctgaaaaggtgtcgaggaaacaagctccagacgctcaattgcagtcttatcgtaatttttcaccatgaattccatgtcttcccggcaatgctcaagaagccacttgcaaaggtactgtacatatctttctgcacagttcatatcatcctggaacacagttcgccaaaatatcatgaaataacaattcatacagaatcttagaaccaatagtagatagattaataagctaagatgaaatatttcaaatgctgcaaaggaaaatatgatctggattatttacctgcaagttagcaaatgcgatttctggttcaaccatccaaaactctgccaaatgtcgtgatgtatgggagttttctgcacggaatgttggtccaaaggtataaacactgctaagagcacatgcataggtctcaacttgaagctgtccagacacagtcagaaaagcctggcgtttgaagaagtcattctcataagctactgtcccatcatctctgtacggaattccgggcttcaacttagatctttcctccagccttgagacattttcttttgccttgttaagctcagcaacagcagctgtgatttcttgtttgctagcttttgcagctttaagctgtgcaaccgcatcacctttttccttgacaacaactctagctgcctcaatatcagactctgatggtgcagggttctctttcaattccttctccaccttttcagcatggctgaacaaagtcgtcacttgaaacatctcaccagcaccctcacaatcacttgtagttattattggtgtgtgcacataaagaaaaccattctcatcaaaaaacctgtgtgttgcacaggctagctggtgtctaatacgcgcaacagcaccaatctgcaaaataaaataagggattgcagagtttgttatgtaaaatattccatctcatgagttatgaacagagaaaaaactgaaacaaagtacatattccattaatttctatatattgcaaaacctagaattgcagttcaatacagagttgcggcaatccaaatggcaaagataccaaattcatcaaccaaaccttttaaggaaatcaaaatttaaaaaaaacaaatcagaaatgattgcattgtaatcaagctcagcttaagataaaatattatgggaatcaaatagcacatataaaggtttagacttaacatgccatattctaattgtggatgcctgaactcaattgggagttaatcatccatagccttacatgaccctctcagcatgtgtactttcaagaatagcaaagttagcagaagaggggactaggcactaaacaccggaaactgccagatccataaaactttaaattaaccaagtgtttgatttgtgtaaaattcgcagtccacacaactcataatccagttcaaaataaacccatccttcaaaatgtatccacatcaatttgatctaatgcaataggtaaaatcgcaataaaagtagataaaactgtgtgggattgttaaccaatccactagacaacctaaattttcacaccaggaaatagactagaaaaccaaaattttcacaccagggaactagacatcctaaatcatcacggcaggatttatcaaaactagtgcggaagttgcaaaatctagaaatttctgtagtctacttcagaaagggcttcagttttcgtggtgtgaggcgaaacagacggaccgtgttggtgcgggagcggagatggacgacgtccctgagattctcgagcgtgagcttggtcttgggcagcgggtaggcggcggggtcgacctcgccgacctcgatgacgcggtcgacgcggagctcgacgcgctgcttggcgccctccggcggcttcttgagctcgccctcgacgagcacggacgtgcccgtggcggtgagcggcgcgagcgggtggacggcggcgtcgacgaggacctgcaggttggaggcgcaggagccatcgttgagctcgaggaaggcgaaggtgcctttcccctgctcccgcccggtcttgacccacccgcccacgacgacgcgctcgccggcgcgcgcggcgccgtcggccaggatggatcggatgcgggtgcggtcggtggcgggctccaggtcgtcggagagggaggccgcggccatggcggccgccgcggcgtcttcggccatgggggaggggagggtttgggaggaggcggcggcggcggcggaggaggagaggagtggtgtcgggtcgggtgggaattgggatttttagggtttagtagtaggtttgttgccacttggcagtttggaatggtggagaggtggagaatgtagcgcgcgtcgtgtggtggactggggggtggtgtagctatagcgggcccgccggccggcccattgattcgtttcatctggaatcggtgtacgagaaggcatctggaatcgggccacaccgccccatttgaggttggagggagaaaaaaccagcaatgaagaaaaggaaaaagtacatcgaaggtccctcaacttgtcatcaagttacaaaatcgtccttaaacagcaaaaccggatacaacacatactccaacttataaaaagtgcaaactaagttccattaatagttttgactccggttttatccgacgtggcagctgactcaatgtgggacccacgtgggccccatacatcagggtgaccacgtcaccatctctttcccctcttctttcccttcctcctctctctctcccaattttctcatgcgggctggctggtgcggcgggggaagagctgcgcgcgggcggcgagcgacggaggaggagcggcgggggagcagcttggaggccggcgacgggccgcggggtggacgcatgcgctgcggcggttggctcagagtagaacaggaattggtaggcgcggtcgccgtagtacttctccagggactgcacggcgaccttccccgccatctggccttcttcgagacctcattcttctcgggcttcccgtccacctccatggtgacgggccgcgccgcctcttcaggcttctcgatctccatcgccgcgccgggattgctgctgcttgtctcaggcttggcattgctcctgctcttggttttggttttggagagcacggcagagacaaaatccatgcgcagattggcatcctcttccactgttttgtttggtaggcaagcaagcaaattacaatccattcctggttcctctccttaaaaaccaaaccaagcgggcctatgtttactgaagattagtctttaacaggggcctatgtcaattccttgccgtcatcaaacagacagacaaacaaacaacacgatgatgatgagttctgtcttgacggctgcttccttccaatctcctcgcaatttcatcaaactacaagtacagctaaggcctcagcagcgacgcctgcaacaccaacaacagcttctgattgttggcagcaacggggcaataacaataggaaacatgagtttgtgccgggattgctgctgcttgtctcaggcttggccttgctcctgctcttggtcttgattctggagagcacggcagagacaaaatccaagagcagcggcttggccggcgccatggcgtcgatgatgctgccgccactgcgagagatggcgtggcctcggctgcgtttccggctaatccgtcgcagctaagaagctcgccgacggctgccacggggcgcttccacctctgcgcccatcgccgtagcgccggcctgcgcccaacccactgccgctgcgtcgccacgccaccccgccgcccgtcgccggccacccagctgctcccccgcccgcgccgctcttccgccaccgcaccggccggcccgcatgagaaaactgagaaagagagagagaggaagggagagaaaagaggaagagatgatgacgtggtcaccctgacgtgtggggcccacgtgggtcccacgctgagtcagctgccacattagataaaaccggagtcgaaaccgctgagggacctagtttacactggtattgtaagttgagagacaccggatatctggttttgctgtttagggatgattttgtaacttgatgacaagttgagggaccttcagtgtaaaactaataatatagccgactgatgggtctaaaaatattcatattagcatttaattaactaataactgtggtatgtatataataagagagctatttgtgtgtcccttcttaatgtttttattctaatttttcttcttttgaagctttcccgtccactcatttatcttgagaagtgagcagccattgtgagtttaacagaaactagtcatgcgccgctagtgttgcattggagcttgtgtggagccggcgactaattagtcgaccgctcacactctctttctactcatttcttccctaactctgtactttattcagtttggactcagtatagccagcaaaaattacctattactagaaaggcttcgcgcgctatgtggcgcggccactaaattacgggaaacagaagaatgtaagattagagaagcaattcttttagggactgcctatacattatgcgatagattttctagcctcctatcatgcaaatttttcaagccataggataaatttaatctcatctatttaaatttagggagtaactattaaaaaaaaagtttgcatgtatttacattgtaagttccaaattacatatgtaattttagtgtatttatgatgtaagtcataaaattacatatgtaattttagtatatttatgatgtaagtcacaaaattacatatgtaattataatgtaagcacgatgtaattagtaagcgtggatcataagcaaagtagcagtagaaaacactgctcaaatgcaaggaagaaaaacaggcgtgtgtttcgaaattgaacggtaaatatgtgagaccaaaaaaacgcaacaacaaagtccacagaacgcaacaacaaaagctcggtccatctcaaagtccacagccgtgcatgactttgctcaatccaaatgcagcacgaattgtaaacagagatgaatggccaaaaaagtgaaagatttagcaccctattttctgtcaacagagcactagcgattccgatatcaaaatatggttattttgccgctggacaccatacacattaattaaaatattaatttccggttgaatatgagagataaatagcgtgaaaaggtcaaaaatgccccctgggcacacttatcatattctttctcttcctccttatttccccttctaccggcagccccctccttgcaccgcctctggtgtgccatctcgttgatgtcactagcttcctccccgcgccaggcgctccacaccggcaaactcctctgaaacctcctcacccatgtagatctcgagttgccgctagggaaccatctccataggctattttcctgtcgtcgcacgcggcccttcacttcttgcacaaccgtcgccgttgttcctcccatggatttggagggagagccatagctttgccccctgctctgctccacccaagggtggtccacctcaccgccggctactaggtcccctcgtccacccccaatgactccgtgtcaaccaccttcatgtagacgaccggccatatcttgccaagctccgtccgttgttcactctaccttcttctctaggatggaggtcatcgagcgcccgacgcctagcacttgttccctcgagcgtctacaccatcgggagccttcgtctccaccaaggccattgggaggcttcgtttgaagtggggtgtttgcagaaaggggaaataaggagcaagaggaaagaatatgacaagtgggcctagggatattgaaagtgcatctaggcccctaatgattttgatgattgattacaatgcgattagagaggactaacacttttattcaagcaaatgtgaaggttgttatgtcctcgacatgttgtaatgagatgcataccccatgaatgcgacatcacgatgcaatgcggcagtgatcaaatggcatattatatcttttaccttgcattgtgtcataggaatgccgtactattaagagggataccacatgcatataattggtagaacactagtgctcaaaatgcttcatctttgtgtgagttgaaaaacctaagccaaaatttcaatcccgagttgtttcacttgtcacaacacttacaccgggtttctttgcaagtttttcaacatctcttgaaggttttggaccatgttttatgttgggtttgatagcccacgaaactagctttccataaagtccaagatcttcgaaatcggagttcggagtaaaaagttattgcagttttacttgagcaacatcagactatctgatttgaaatcagactatccgatttttcacataacttcactctctgtctttgtttggaaaatcctttcgagtgagtttttctatgtgtcggtgtatccgatgttggatcagatgtccgatgatacagagactccgaaatttcatggaacttgagtctctgtttgaggacgaagtttttgcttcaaaaatatcagatactccgatttaacatcagatagtccgatgtctcggaaagtccgaaatttcatggaacttcgttgtctgtttctcgttgcgttggaggtttaaaatatcggactatccaatcttgtatcggactatccgacatgggctgaaagattcccctccaacggtcactttttgggggatccataaataccccccacctaaccctttttctagggttacccaactcatttcattctcattcattttgggttgagcttggtgctaaggtgctttggatctttgagctctttctccctctctcaaatccctcctcgttctttgtgtggtggatcttggtggttgtagatttggtgtttgagggcctagtgtgtgtttcactcgatcttgagcactagggtttgaccaagagttgtgtggtgtcttttactcttggaggttgaggactcctaaacggctaggtgtcactcccgagccaccgatctacgtgtggttggccgggagaagtttgtgaaggccggatctcgcctccgcaaggaaagagataccccttagtggaaggaggagtgcttagtgtaacctcttgaggaaagggttagcaaagacccggctcttagtgagcgtctcaacggagagtagaatcccctcaagaatttgaactccaggaacaacttcgtgaacttcatcattggtgatctcccttcatcctccttttagctttgcttaattgtgccgctatagatctagtcactgtttgtgctttactcttgtttgtatgatagatctacttgttgtgcttcattggtggatcagacagtctgatccaacatcagactatctgatattttcggatagtctgactgtggatcagactttccaatcttatttcagttttagcttccgcataaagttttaaattagcctattcactccccctctaggcctaattgaccctttcagacatttttatattttcatgttgtttttctctcctattcaatcggaatttaatattttaatacatgcggtgtccagcagcaattaaacatattttgagagtgtcttcccaaaatatcaacttttgccgtgtccgggagctaaaaccacgaagtcacggtgtcctacaacaaaatttgtcacattgggccggtacgttgaggtggatatttttgtctggtttgaatagttgagggatgtattttatctggtttcgtagtttagcgaggcaaatcacactttggtgatagtttgggtaaattcgacataataataataataataaataattcatattgagagtttttccctttgcgaatttccgtgaagtgaaaaaaaaattagcacataaaagaaagttgaaatttaaacaacaatatgcacaaaggcgctgcacctatgctgtgaacaaaataatatgtccaacaactttatcaaatactagaataatttatcatgaacacttaagacttaacatgattaattaatttgagatctatagtggcccagcatgagaccgaggttttatggcccacttttagataatcatttctaatgggacacctaaaacattattgatatttttgaacaagtttcaatatgatctccatggtgaagcatctaggcccccgttgttaattttggtaattaatgacaagcactaattgtggactaaccgttgctattgagatatattttaagttaggtccacgtcatgtgtgcgcatggatgactatcgatggattaaaatttgatggcgcgaagcgaagaaaagaaaacggtaaaactagtgttttaattttaaaattgatcgaggtgaagggcgatcaaatttgctagtttatttgttagtttcgccgtactatcaagggggtaatgatctagcaaagagatgattaaattgccacattaggtcattgcattttcacttgtgctcacattttcatcacacacacacacacaaacactttacctttcactgggctcggcatgaccaggggcagtcagaccggccacattgtggcggtctgaccggcgtgccttggccggtctgaccggcgccacaacggcggtctgaccggagcataaggccagtctgaccgacggcacatgcacggtcaaaccggccccctggaggccgggatggtgttgctcgaggtggctgatacagagccgacggagccgtattcggtcagatcgagccgaggccggtcggctcggtctgaccggccaggccgatggggccctctgacagcgctacaacggctagttttctagccgtttgtcgcaaccgagaaaatttgcattttcccgaacgctagtgtattaatccccgtcccaggaaaagccggggtacaccacacaaacatgatataaaagacacatctttattatatcgataatatttaccttattacaaatgcacttcaggcctgacaataacaaataaacagcagcggactagcgggcctatggctccatcttcacaggcgctcaactagggtataagccaggactctacctaagacatctcctccaaagcttctcttactgaagaggggaaagatagagcaagaatgaatacaaccacagtactcagcaagccacaccgggagatgcatgattaatgcaagggagtacaaggggtaataatataggggttaagttttgcagtaaacagcatttaaaagtcacttagttgcccaaagctattttataaagacgatcctagagctatatagtattattaatcaaggccgtgaacccgcacgaacctgccttaacccaaggcctacgatgattcagaccgaactggcaacccaacctgggtcccagctcgtcccaagccaacacaggccaaccattccacattttagttgttaagcaagttttaggaattaaaccactaacttgggtacattgctaggcttgcccataaccgagggcgcggctattcgaatagattatactctgataagaggtgtacatctttacccacaagacacatctttactcagcattccacggccgtggaacccgtcgtaaaggatgtgacataacccctttacccatcctagccgtgacaaaagcaccgacccaacctcgcctatggccggaatcccgagacaggtaggtaagattgagcccctagcagcaggacaccggccctgtgccatgacatctcgactaccgagccgcagcccgtgtagccttcatttggcctcgagatgtccatcgagccccgacttcatccatctccatccgtgtactcttgctaggactagactgagcaccgagttaagccttacccattagacatgtggttagtacggtagtgctttgcaacagaggctcgaagactggtccttatagtggccgaggtgctactagcagaaccatgcacctcgtgcccagcctaaaaccattttgggagttttgaatagagggggggggaggtgtgtgttcaattccatcacaagccaaccattccacagtgtccaaatgatatgagaactcccaaagtctaaagttataaaaccacctagtgttgcctaattaatcagcgaagcatctacctaaattcatactagtggaaccgttaatagagtacccactagttggggttttgtttatcctaaggtgaacaaggtaagaataacaatagcaataataataaggtcataacaaaggtaaataggcgtggctaaataaaacagtgataacgcgggaatttaagtaaagcagtaatgcaataatttaaatcaaaataattttataaactgagattcaatatgctcaagggtgatgcgacttgccttgctcagagagaacggccttccgaaccttcggcgacgaccacaaagtacgctttggaaacctccggaacgacagaagctacgcgaagcacataagcaaagctacaagcctaaaaagaagcaataacaatacataaaaagaaagcacatgattctttaggttataacaaacattaagagacttgaacgggtcgattcggggttcgtatgatcaagatatgatcatccgaagtttaatgttgttatatgaagatttacggattattatgattaggttttgcaactataaaacatgtgcaagcgctagcctggaaaagacaggaaggctgcgctgttgacatgcggaccccacatgtcaacctaagggaccacggtagaccgagtacacagagacagtctacgggtcgacggaagcggaccccgtgtgtcaaccgaggcgagtggccaacaaacggactccactagacaccacgcgggctgcacatgtaaaaaccacgtggctatcgagcgggcacactaacacggtcaccacacgcacacatgaacgactaccgacactggtacatgggtaccggggtcgacaaccacacgacgggcatggggcgacaccgaaaggacgaggacggggcagcgagaggacggatccttaccaccacgcgacgaggcgtgggaacgacaacgacgaacgggcgcggcggagacggctcggggacgatggaggcgaccggcgagggaacgacgtcggcggtgatccttggacgaaggcgagacacggccggcgcaacacttgacgacgcggagccgaggacgaagatgacgacggggctgcagcaaccttgacaaaacgctggtgaagcatctaggcccccggtgttaattttggtaattaatgacaagcactaattatggactaaccgttgtctttgagctatacattttaagttaggtccacgtcatatgtgcgcatggatgattatcgatggattaaaattgacggcgcaaagcaaagggaaagaagacggtaaaactagcactttaatttagaattgatcgaggtgtagggcgatcaaatttgctagtttaattttagtttcgccgtactattaagagatatgtgcgcatggatgattatcgatggattaaaattgacggtgcaaagcaaagggaaagaagacggtaaaactagcgctttaatttagaattgatcgaggtgtagggtgatcaaatttgctagtttaattttagtttcgccgtactattaagaggggtaatgacctagcaaagagatgattttaattgccacattaggtcattgcattttcatttgtgctctctttttcattacacacacattcacttgcaaattcactgggttcggcctgaccaggggcggtcagaccggccacatagtggcggtctgaccggcttgccctggccggtctgaccggccccgcgagcggtctgaccagcggcactttcccggtcagactggccccctagaggctgagatgatgctgctcgggatggccgatacagagccgacagagccgtagtcggtcagaccgagctgatggcggtctgaccgagctgaggccggtctgaccggccaccccatgtcggtctaaccggttaggccgatggggccctctgacagcacttcaatggctagttttctagccgttgcagagtagcacggtctgaccggccacataccttcggtcagaccggcagagcacaaagttgggggatttcgccaccaacggctagttttggtgggtgggagtataaatactcccccaccagcagcaagggggctctcttggcacccaattcaattgcatacaccccttgcacctctctcacactcacttgagctttgtgttcatccatctagtgtgttagagggttgtttagccaagagtcaagtgcatttgcttccattgtagagctagtatggcacttgatcatctccacaccgggtcattgcttgttactcttggaggttgccgcctcctagacggcttgtggaggagttgcccagtgacctctccgagaagattgtggaggaggcccggcgccggtttgtgagtggtttggagttcaccaccttcgaagtgaagaaagaactaccccgagtgatcgaggcttgggtagtcctctccgtgggccggctcccgccttgcccaccccttgacgaagggggcgtgcggtggcttcgtggttgagtggtggagttgggctcgcctcaacggggagtaagaaaccggcgagtttccgaacctcggtgaaaagtctcttgtctcattgtctcatttgattgtcgcatttacatttgtgcaaatttactttcctagagatatagttgagccactatcaccctaggtttgcaaaacataacttagttgcttagttagagttcaccctcaccaagcctagcaacttaggttagatttgattaggtgttatttaatttttaaatcgcctattcaccccccctctagtcgacatctcgatcttacaagtggtatcagagcttggtctctcttgattgggcttcaccacctagagagaagatgtcgaacgaggtgaaccatgtagggaaggctcccatgtttaatggcacaaactactccacttggaaaattaaaatgtctactcacctaaaagctatgagcttccatatttggagtattgtggatgtaggctttgctatcaccgacacacccttgacggagattgatcaccgcaaccttcaactcaatgcccaagccatgaatgccttgttcaactctttgagccaagaggagttcaatagagtgagcaaccttgagaccgcatatgagatttggaacaagttggcggagatccatgagggtacaagtgagtacaaggataccaagcttcatttcctcaagatccaatatgagacattctccatgttgcctcatgagagtgtgaatgacatgtatgggaggcttaatgtcattgtgaatgatctcaaggggcttggggcaaactacaccgatcttgaggttgcccaaaagatgcttagagccctaccggagaagtatgagacccttgtcaccatgctcatcaactgcgacatgtcaagaatgacacccgcaagcctcttggggaagatcaacaccaatgacatgtacaagttgaagaagaaggagatggaggaagcctcaccctccaagaagtgcattgctctccaagccgaagttgaagacaagagcaagagcaaggtgaatgaagtcaatgaggacttggaggaagagatggtccttcttgctagaaagttcaatgatctcttgggaaggagaatggagagaggaagggactccaactcaaataggagaagaaatagaagacccaacaagactctctccaacttgaggtgttttgagtgtggtgagaagggacactttgcttccaagtgcccttccaaggatgatgatggagacaagtcatccaagaagaagagtggaggctacaagctcatgaagaagcttaagaaggaagggaagaagatcgaggctttcatcggggaatgggactcaaatgaggagagctccacctcatccgggtccgaggaagaaggtggtgatgatgcaagctccaagaagaagaagatggccgttgttgccatcaaggaggctccatcactcttcgctccactttgtctcatggcaaagagctcctctaaggtaacatctcttagtgatagtgagagtgatgatgattgtgatgatgtttcctatgatgaacttgtgagtatatttgaggagcttcatgcttatagtgaaaaggagattgtcaagttcaaggccctaaagaaggatcatgcttctttagaggtcttgtatgaggagctaaagacctctcatgagagactcaccatttctcatgagaagcttaaggaagctcatgacaacctcctttccactactcaacatggagctctcattgatgttagcatatcttgtgatttgcttgatgatagtgctacttgccatattgcttatgttgcatcatctagcatttctaccttttgtgatgatcttgtggatatgcctaactctagctctagctcttgtatttctatttgtgatgcctcacttgttgttgagaacaatgagcttaaggagcaagtggccaagctcaacaagagtttggagaggtgcttcaagggtaagaacactcttgacaaaattttgagtgagcaacggtgcatccttaacaaggagggacttggattcattccaaataagggtaagaaaccttctcaccgtgccactcgttttgtcaagagcaatggtaagtattgctccaagtgccgtgaggttgggcatttggtgaatggttgccccggtggtaagccttctaagacatgcatgtttgattctcattatatgcttaggaaggctcatgatggtagcattgttgctagatatgtgggttctcctatactcggtggtaaaaagaatgccatttgggtgcccaaagttttggtctctaacctccaaggacccaaacaagtttgggtacctaaaagagcttgatcttctcttgtaggtgaactaccgcaccgatggaagccattgggtgcttgatagtggatgcactcaacatatgactggtgatagggctatgttcaccacatttgaagtaggagggaaagaacaagagaaagtgacttttggagacaatagcaaaggaaaggtaattgggttaggtaaaattgctatctccaatgatttgtcaattgataatgtctctcttgttaaatctctaaatttcaatttgctttcggttgctcaaatttgtgatcttggcttgtcatgtgctttcttcccgcaagaggttattgtttctagccttcttgacaagtcttgtgtgttcaaaggttttagatatggaaatctttatttggttgatgtcaattcagtgaagcaaatttgaaaacttgtttagttgcaaaaacttcattgggttggctttggcataggaggctagcccatgttggcatgaatcaattgagcaaactttcaaaacgtgatctagttgtggtcttgaaagatgtgaagtttgagaaagataagctttgtagtgcttgtcaagccggcaagcaagttgcatgttctcatcctactaaaagtatcatatctacatctagaccattggagctcttgcatatgattttgtttggcccaccaacctataagagcattggtggtaatagtcattggcttgtgattgttgatgattattctcgctatacttgggagttctttttgcatgataagtctattgttgccgagcttttcaaaaagtttgcaaaaagggcccaaaatgaatttagttgcactcttgtgaaaattagaagtgacaatggttccgagtttaagaataccaatatcgaggactattgtgatgatcttggtattaaacacgaactttccgctacctactcacctcaacaaaatggtgtagtggagagaaaaaatcgtacattgattgagatggcaaggactatgcttaatgaatatggtgtttccgattccttttgggcggaagccataaacatcgcttgccatgcaaccaataggctttatttgcatcgtctcttgaaaaagacttcctgtgagctaattgttgggaggaagcctaatgttgcctattttcgagtttttggttgcaagtgttatatttatcgaaagagtgttagactaaccaaatttgaaagtcggtgtgataaagggtttcttctaggttatgcctcaaatagcaaggcataccgggtctacaacaagaacaaaggtattgtgtaagaaaccgccgatgttcaatttgatgagactaatggctcctaagaagggcacgagaatttggatgatgtaggtgatgaaggcttgatgagagctatgaagaacatgtcaataggagatgtcaagcctattgaagtggaagacaaaccatccacctccactcaagatgagccatctacttccgctacgccaagtcaagctcaagttgaagtggaggaggagaaggcacaagatccacctatgccaccaaggatacacaccgctctttccaaggatcacccaattgaccaagtgttgggtgacattagtaagggtgttcaaactcgatctcgtgtcgcttcgatttgtgaacattacttgtttgtttcttgtcttgagccaaaacatgtagatgaagctctttgtgatccggattggatgaatgccatgcatgaagagctcaacaactttgcaagaaacaaggtgtggactttggttgatagacctagagaccacaatgtcattgggacaaagtgggtctttaggatcaaacaagatgagaacgggttggtggtgagaaacaaagcaaggttggtggcacaaggtttcacacaattgaaggtttggactttggtgaaacttttgcccctgtggcaagacttgaggctattcgcatccttcttacatttgcatcatgctttgatataaaactatttcaaatggatgtgaaaagtgcttttctaaatggtgaaattgccgaacttgtctttgtttaacaacctcccggttttgaagatcctaaaaatcctaaccatgtttataaactctcaaaagttctttatggtttaaaacaagctcctagggcttggtatgaaagattgagagattttcttttgtcaaaggatttcaaaattggaaaagttgacaccacccttttcacaaaaatcattggtgatgatttctttttgtgtcaaatttatgttgatgacatcatattcggttctactaatgaggtattttgcaaggaatttggtgatatgatgtttagggaatttgagatgtccatgattggagagttgagcttcttccttggacttcaaatcaagcaactcaagaatgggacgttcgtgagccaaaccaagtacatcaaggatctactcaagaggtttggcttggaggatgcgaagcccatcaagacacctatggcaaccaacgggcatcttgaccttgatgagggaggtaaaccggtagatttaaagctttatcgttccatgattggtagcttgctttaccttaccgcatctaggccggatatcatgtttagtgtttgcatgtgtgcatggtttcaagccgctcctaaggagtgtcacttagtggccgtgaaaaggattctaagatatttaaagcattcctctactattggcttgtggtacccaaaaggtactaagtttaaccttgttggctattccgattcggattatgccggttgcaaagtggatagaaagagcacatccggtagttgccaaatgcttggtagatcccttgtgtcatggtcatccaagaaacaaaactctgtagccctctctaccgccaaggcggaatatgtttcggcgggtagttgttgtgcccaattgctttggatgaaacaaacattgtggactatagcatatccttcaccaaaaccccactcctatgtgacaatgatagtgccataaaaatagccaataacccggtccaacattctagaaccaagcatactgacatacgccatcacttcctaagagaccatgttgccaagtgtgacatagtcattagccacataagaaccgaggatcaactagccgacgtatttactaagtctcttgataaaacccgcttttgcaagttgaggaatgagttaaatgtcatatatttctctaatgtggcttgagatggtgcaccatggttgcttctttttgcattatgtatatttgctctcatttgctttatgtatatttgctctcatttgctcttatgctttggatttgttgccatttggttcttcattgcgaaaatggagcatgtcacattaagggggagttttgcactcttgcatgtgctctacttccctttatatgtgagcaaatcaactagtggtgctagtagtattttcaaaatgcctaagtcaacataagtcaaaacttttgcaaaatcaatgtaatttgaaaactatctcttggaaaatgtttcaaaaggtttcctatatgttttctaagcctcacattgcaagaaaaatgatttctgaatgaaaatgtcattttggccctcttttgaagaaactagattcttagttttggccaaaatgagaattatccccaaaatgagattgagaaggaatttgagaaaagtttcaaaacaaagttggtagataagaagttttgaaatgtttttggtattcaaacctatttcaaaaaccaaatcatttaaaagttatttgaaaatcaaattcgcccaaaaacccgtatagaccataaaaggtcacctcctagcacttaagtgagttttgttgcaaatcatcataatcttcaaatattatgggtggttagcaatatttaaactcacacatttcaaaaattgctccaaaaatcaatttttttattgaattttattgtgtgggggttgtcggcttgtgcaagggctgtgcacagccgccagggggcctggcagtctgaccgacgctatatgcgtggtttgactatccaggtgcagcggtctgaccggccacatagggccggttgtcacatcctgatttttgtttcgggatttataaattatttaataaattattattagaatttatattaaacgttcattaatttacaagtgaacttaaatatgggaaataaaatttccttaatttaaagcatggatggatttaatttgtattaaattctccatgattaattatactctctgcaatattctcggatttttcggagctcaattcctaattttaatcatacaaagagcatttcagtaattacccacatattaaattaatcattaaatggtctaattataatttttaagtactttgagtgtccaagtattttcaggatttttcttgaaattatttgagcattggaagtatttttaacaattcaaagatcatttaagtgattattttaattggaaaagtaataaaattctcctcccttgtcttaggctgaatcggcccattcctttccttcctcttctctccctcctcgcgcgcgtgttgtgcatcccacgccggcccaacccgagcctgcatcctctcttcttctctcagccaaagtccggttttgctccctcttcaaatcaggctgagaaaagaaaagcccggcaagaagtctactttccttccccgcgctactgttcatcttccagctctggactgagccagagccgagccgtgccgtgcctgttggctgttgccgccgatccccttccaaaatccaacctctccgttgctcttattttcgaattggttgcgggaatggaatcctctcaatctcctcttccttgtccccaagaaatccccaaaagtttatatggaaatcctttccaatttcgcggttcaacctttcctttttccggcgaagatctaaactttcccgagtttttcccgtcgttgtgggctcgatcctggccttccatggctatatataggacccccttgtcctcctctttcgtttgccccctctcccgtgatctcccgtgcctcgtagcaccgccgccacgtgctccaccccgccatcgtcgccggccgagctccatccgcgtcgcgccgccgcctccgtcgtcgccgccggtcgccgtcaccaccgttaggtgcgcgggagggtggagaagcccggccgcctgacccccgaagccgccgaccaccgcagctccggtgccaccgccgaccgaagccgccgctagacccgtcgccggccgtcgtcgttcgtcgtttggttcgagggtgagtaccgttgggttcgtctcgtcgtcctctacgtgttcatatcctccaaagtcgcagccgaccatccaatctccggcgaggtcgccatcttggtccggccattgatgaggtcatcatgacgtcatcatcgtttttctttttcctgtttttctaatagattaaatcttcggaaattcataactaaatcatcgtaactcggttttgagtggttcaagttgctaaattcatctaaaatcatgatctacatgttaaaaatatccacatgtactgtttatgcttgtttttgtactgtttatttagtttttattagtctttctcttcgttttgcgtgttagcttgtcgtttccgtcgttgcgaaggttcgtgagtgcgtcgggagtgttcagaagattaattgaagactgattattgcaaggcaagtcacacagatcccaaacaaccctttgagcatgttgatcccgtttaaagctattgtttctattcaactattgcatttattttcgaatgtcattgggtggaattaacctattgtttgttataacccttttgttcttgattactttattccttgataccttgggttattataacttgactagttgggctttatatattggttcagctagatattagttatgattgcttagccatgcttagaaacattaacacactattgggataacttatgactcactattatttaattatggcttaatgatagttcacgatggtcaatcgtgattggttaattaattacttgccaactaaaacttgataatggtgggttgtgagcacatggttttgagagttgtgctcatggcaattaaggaccggttcgcgagctactgttgtgaaacattaaccgtgccaaccacaagctagcgtgggcaacggctttaccttttgtatagcatggttcattgcggagcaccagactgagaagtggcggagataagcccacgggggtcgctggggagtccatgccttgttttataagggggtgattatgatccaggaatggtgcactgtggtgagttgtgttgtgcagagggtattgtcacagcctctattcgggtactttccagtatcgcgacgcatggtagacatgatgttgaggctgtgtcttgtgggtacagtggtacacctctggccagagtaaaactattcgaatagccgtgcccgcggttatgggcgggttgagcaatgtttttcgtgattagtctcacacctctcacaataattatggatgttatacctggtaataatttgcttagctcctggtttggagttagatctgtacagccgggtatggttgttcaggatggttgggcctgtgcaacatgggtgtgttgttcagtgttgattaaaatttctgattaattactccactgttttacttctcttaaatgttttgctaaatgctgcttttgcaaatgagcctatattatgccatcctttggtatccttgtgcacttgcatatttgctgtgtggcttgttgagtatatcatatgctcattcttgcaataatcaatcaacctcagttgaagaaaaaggatccagaaggagaagacgtttggcttataccccagttgagctgcctgtgggagtggagctgaagccatcgctagaccgttaattccgctgctgtttttctttttttttaagtatgtaacgttattattatgatggatttgtatattaaattgtcagtttatgtacctcggctgattcctggacgaggattttatgcacaaattagttcgaaaattattagtgaatttccgggcgtgacaccggtctgaccggccggcaggtgggcccaggacttttgtcctttttcttctcccttcttcccctacccgacctaatctcctcccattcaaccatcttcttccccaactcgaaaaaaactcatctctcctctcccaaaccctagccacctccctccatcaaatccattcggtttgaccgcggatttctctccggttacaccgtaagtgattctcctccgcttcctctctctattccatggattagtttgtgtttttgttgagtttttgatccatggcatggaactctaggtgaagcacgaggtgttcttcgatttgcaccaatagagggtagtttcttggtttgattcaactcctccaaccggtaaatcactctccctcttgtgcattctctcaaatcaatctatttcaccctagggctatgggtagttattccaatcttgatgaaataggtccaaccctttgatgttctagttccactcttgtgcaatattgttctagcaatttttagactcaaatgagtagatgtgaaaatttttggatgcttgaacttgtgggaggaggtctgcccggagacacaggcggtctgactgtgggtcagccgccggtctgaccggcgtgtgcgcgcggtttgaccggccgtcagtcgtcggtctgaccggccaccggcaggcggtctgaccggcctgatatcgtcggtctgaccgccctactggctgtggtctgaccacccctccacaggatataggcaaattttcacctctccaaattgtttctagaattattgctaatatctatcatcctttgctctttgacagtgatgcctccccgcactcgccatgatcgtcgtgcacccactccgaatcccgtgagtgagcctgaggaatcgagcggagatgagtacgctcaaagtgatgaagaggttgaggccaatgttgagggggatagtgaggaggaaagtggagatgatgtcagtagaagtggagaggatgaggatgaaggaagtgatgatatatgcacattgatccctccatccagtttgttgtgaacatgaggaatccatcacaatataccatcttgaggcaccatgatcagtttttgaggcctcgggacaccccggatccccgttttcacaccgctttccagaagagtgtgtatgagcaagtttatgcagggaaagcttttgcagagcataaggggatttcttggagagacatcaatgtccagagtttgaggggttgcaggatctcttcaagactgttagcattgatcggattgttactctcaagcaagactacaatgaagatttgatccggcagttttatgctacagtgtgggtggctggagacaatagtgagatgaagtggatgtccgacaccctccagtgttctatctctaggaggcaattccggcggctcctcaatattcgcttgaactttgaagatgacttgcatgaggagcacactcacaatccgctctccatagactacctctctcagttttatgaagatggagtgcggtacacacatgggaaggttgccggcttgaggaccatccccagtgtggttaacaggattgtgagagctaccatcctccctcgccttggcaacaatgatgacattatgggggcggattggcacgtcatcgatgccatcattcagggccgtcagttcgacattgtgtctcttatgatgcaagagattgccatctccaaggggaccttcacttagggaatctattatgccccttacatcatgaggttgattcaagacaagcttggggctgctgggcaaaatttgaagaagcacaagcagtacaagccccgcctttagcttggagctccccgtgctcctagggcggcgccctcctctcatcctggagctagctcaagctcagcacctcctcctcctcctgggtattatccaaatgctttcatccttccacttcatctttttaccgggagtaaaaagataccaaccgggactaaagatcataaaatgctatgggcttttcaaccggggctaaatatgatttttagtcccggtttttttaatgaaccggaactattgtgaattttggccgaccagacaaagatggtttctccagtagtgaaagacagatagcgtatggagacagtcgatggacagagcaatatattgtgctagcggccgaagtggacggggacggtgagatgagtggaggctgcgccggctgttagagcggacgcaacaggtgtatgacggcggaccggaggcggcgttggctagcgacgcggaagccctttcctacgggagcagcgtctcgtcccacgtgcgaagacaagattggaattggaggcgcctcgcccagggtttcccaaaccaccagggccagagttaccatggtaaccgcgccgtggcaaaccgtacgaaaactgtataaaatttatcaaaattttaaattatttttaaaatttatttgaatttaaggagattgccgtggttttctttttacaggaccctccggtaaccctggtctcgcctaagccttcccttcttctggcttcatttctctatggtttcggaggcacagaagaattagggactggtttgggtagctgttggagcccataaatcccaggtaattaatatataattgctctaaggtccaagagaactacaaactaaacattgaattaagcataacagccacaacacatcaaagaggcttactaattaccattaacctgtatacaaaacagaaggttgtaaatttgctttattagttacgaaataatttcagaacattttacactggtacactccaacaatgaaatgcactcacccaacatctaaactactctcccccactgatggaaagtatatcggatatggtttgtgtggcatatattactgctgaaaactccctcccaagtaggcctacaacaataaaagaaagaagattagtctatgcttgccgatgacaatggtttgaaggttgacaaattaagcaatgaattttacaatcccataggaaagtatactacagttatcctgcattcagtcaaaattataacacctcttggggagctctgttatctctctgtcatatcaagttatcaacagcggtgaaaggaacaaccacgcagttgtgatgctaaaataacttttcttgctcaaattttaaggtgctagtgctagtaaaagtgttttccgcatttaagagaagaaaatggatgggcatatagttggattggaaaactttaactatggggtaatttactctacatatttgagaaaactaattaagtagcatatagaaagagctagtttacccaattaatgcatttaaactgactattcattgatgcaaataggtggcattaattgtctggacaaagattctttttatagttcaaggtgaatcaccgggatacataagagccacatctatcctaccatcactccttagtgggctataggaaatcatctctattttcaacggcaaatactttgcgactattctgagctcatagctagtaattcagttttaaaagacagatagctgaatataattatgaaaacttcaataattccatcaaaataggtattgcagaaggcctggatgactaaaattaagataataagttataactcacaatagagaaggatgatagggaaaaggaagggaaaaaatatcctgcagacaaatatacaccatattagcatgcaacccaaaattgagcatattaaccattcaatgatctatcagctaagagaattaaaagtgtaaagaaggatctaatccatttggtccaatgatatatagcaatgctaggataagtatagcagtcgtacaacaaaaatactgaaaatggcatgtagatagtagagtatcgaagcaaatcggatcttcctgcatataaatcatccatttaacttaaaatctagttctattagtgccaaatctaagtcatctagaaactacattaagaactaagtgggcagtgagagcaaacacacaaagaaaaatgctaatcagtaagtgactaaaagcctacctaatgcttgaaatacaaagagcttcaaaacacatattgtctgtacattatctataagagctcctctgacgttacatagcatgcaatttgaaatgtcccatttgaatgatatgactttatgtagaattgcaacacatttttttgctatgacttgtccacataatagaaaaatggtaacataagcatatgctatttttatttcgatgctgaatttgaaaaatagaacatatcagtcggctagttcgtacaattgcttccatgtaggaaaatataatatgtcaaacagtagtgaagtattatcaatgcaaaacagctttaagttcagttaaccaataaatttgaaagcagcaacagtaccaaaacacatatgtcctgacagtataagttggcgatctgccttagtatggatttgtgccctcacacgtgcttttttgcaaacacctagaacattgtccctctgtaaaaagcacattatgcatatcctccctgcagcaagtttagaaaataaattgttgattcaatattaagatgcaaaattaggatcaggggatattcatagatcgatccagatttttatttaatgatggataaagatggtaccagtcagtagctgcatgacgtaggagacggtgatggccccagcagctgagttgatgaactcggcagactgtttgtcgaagtaatgaatgacgacttgaactatgtaactgaacaaaatggtattcaactattcatgcaaatggggaatgatggagtgagggtgaagtagaagaaacggggttggaagggaagagtgggcataggtgttcaccttgaaaggagagacggtagatcagcttgtctgaacaacagcagcgcctaacgatggagacagatacgccctggacgcttcaggagttgggatccggaaggctcaaatgattcgcatgatatgggtaaataccacatctcgagctcgagctcgcagaccatcgagatgatgctatgtattgatgctgccaatatggcaatcgatgtgggacgaactgccattgatgggccgatgacgatggaggaaaaaacctgcgagggcgcaagaagagtgagaagaagagaaggggagggaaagagaggggcacgcacgccatgccctcactccgttgcgtgaggcggggaaccggcgcccggctgcgtgcgccgatgcgtcgccgtccgcccgtgagagggctacagcagcgtggcggcggatgaggccatatgcgagcgggccgcgagcgctgctagggttttggctgtgtggggatatgttgggaagatcttgaccgtctgttgtcctctcatcgatctgatggtggtggaagaaccggcaccgtaggccaggtggacgactggatcgatcccaatgcggcatcgaacggcgccatggtaggtgaaactcggacgtgattaaccggaagaacggggtgtttttggaaaaaaaaaccaatgacgtggcgcccaaattttccagcactcccacgacgtttagagagattaatattttggagatgctcaatgtaacctgcaaatttttttttagaaaacttaaccgtcctcccacagctataaaacatcaaatatgtgtcggcactataggtgccggaagtgctaaaaccagcacctataagccttttcccacttccatgggttgaaatcgcaaaaaacggctctaaataagaaccgacacctattctataggtgttggttttcttaaaaaaccgatacctttaatatattataggtgtcggtaaattaaaaaccgacacttatgaattgagccgagccggtgggcccctccagcatgaggcgatcgataaggttcaactccctcggtccctcctcatccatgcatccactcgcgtcctctctctctctccatccctttcctctctctccctcccttctctcccgcggttggcggctagccggcggaggtggcagcggcggccgcaccctcccctccgccagatccgacggaaggggaggcggaggccgcggccggcggaagggcgatgcggtggcggcgagcggcaggaggatggcggttggaggccgcgaatcgatctcttcccctccccttcttgtccctcctcctttgtgttttgtattatttcctctgtaatttgttgaatatgatctagatgtgttcatggatttgatgcattttagttcatgtgttcatggatttgatgcaattttgggatttaggtattatttgggatcggcttgacggcttgatgcatcggccgatctttttttggttcgtgtgcgtctcaaaggtgctggttttgaagccggcatctttaatctcctgtgatttgtgtcgccttcatggtgccgattaggaaaaccggcactgaagggggtttcccaaccagcaccgaatccctattttgtagtagtgccaagagatatgtactagaaatacctagggatattctagctagctctacaagatggtgagctaaacgacctgagttcaaagtctcatattttctaattatttaatattaggccattctctaatattcgcgtttatagatatctgtacgtgcaccttaattaattggagatgctgaacgtaaccggcaatttatttcgagaaaacttgatcgatcagtgaaaattatgtttctttttttggcctttggtctctggtgaccctattgacagcctgttaaaacctattttaactatcacgaaaaaaaaccgtattgtaatagtggtgacgaaaacaaaacatgcatcaaagattcttaaatcagctggttccgtggttcgtgcactcataaggcacgcaaactagctggtcgcgcggccactttctcataagggcatgtacaacccacagacggtgggtcgtctgcagaaactcgaaattctcatacagatagatataaagacagctcatacaacccacaaacagaggggccatctgtaagctgtttaatgctttgcatgtagcttagatcaactataaatgtatttgtatgtaccattgtgtggctaattgatagaataaatatgaagattaaataatagaaacgcgattacaataatttttagaaaccatatatataataattatattatatatagttacaatgctttttgtctaattttctttgtttccgtagcgttgccatatgtgctcgattagatccttcttaagttgcctatgtgttggtcgagctttgatagccgaatttctacgaagtgcctctgcaaagcttggattagggtcatcatttgtacgcacttctggtgggatcactatcgtcgcacttggattttcattcaaatccaagacatccctaactgagtccttctcatcttcaactatcatattgtgaaggataacacaagcttgcataatgttgataacgtctccttgcttccataagcgtgctggtcgacgaacaatatcaaagcgtgattgcagaacaccaaatgcacactcgacatctttcctcaccccttcttgcctcaacgaaaatgttttatcttccgctgattgaggggcattaactgtcttcacgaatactgcccattctggatatattttatcggcaagatagtaacccatgtcatattgatttccaattacagtatagtgtaccgtaggagattccccttttattgcttgaattaacagtggtgacttgtttaaaacgttaatgtcattctgagaccccgcggtaccaaagaaagcatgccatatacgaagattttttgatgccactgcttcaaggatcatagtaggaacaccttgtttaccacttgtaaactgacccgcccaacctttcggacaattcttccatggccaatgcatgtaatcgatgcttcccatgcacccaggaaaaccacgagcctcattttcttgtaagatttattcaagttcatcgcttcttggaggccgtagatattcgtcaccaaatgtttcaatcacaccttcagcgaattttcccaaaatctccaaacaagtgcttgcagctattttcaagacctcatcaagttgatcagccgaggttccataagctaacatcctgatggccgctgtacacttttgaagtggtgaatgactatttctaccaatagcatcgactctttgggtgaaataaggggaccaatcgctaagtgcatgcacgatacgcaggaacaatggcttattcatcctaaatctcctacggaacatgtcatcggtgtagataggatttgcggaaaaataattagcagatttgcggaaaaataattagcaacaagatcatcatgaccttgttctcgattccttggtatgtacctccttggtccactctgtcgacgtcggcgatgtacagtcgatgcttcgatgcttctctgtccatgtcggccttgaatccctctgctactatttcttcaaaaatatcatcctctacgattaagtcttccacggtgaacacctcttcaaactcttcggcatcttcgacttcatcttcttcgtgcggctccattcaaagagttacgatacaccttgtttgatgcaagtgtttggatggtggagtagtgtacagaggagcgcacagaacaacgatgttttatagaataaaaaaatatgaccattcatatttacaaaaactgatcggcaccactaaactgatcaactactagcattcaagctacattcaaattcagcatttacatttacattcaagtggcacattcaagctactaaaaagatcaacgtcgcactacagcggctaaactgatcaactgatcaactccagcaccacttaaaagatgaccattcacatttacattcaagttcagcattgaatttcagaaaactgatcaactccggcaccactaaaaagatgaccattccattcacattcaagttcacacacacaattcagaaaatcatgcgcagtttcagttcacattcaagttcacaaagcacagtttcagttcacacacacagtttcagtttcagttcacactaaaaatatcatcctctgcgatcagtttcagttcacacacacagtgtcaagttcacaaagcactgtcattaccatttagaaaatcatgcgcagtttcacatttaattggatttcagaatttaattaccaggatacctgaaactgaaactaccaggataccataatttcagaatttacattatggcctatagagcaaaactgagtaagggagaactgaacatatatgggtactgaataagcagaaaactgaatttggctgaggttcatatatggctgggtactgagtaagggaaaacacggcaaaactaccagtatactgaacattgatactgaacatatatggctgaggttcatatatggctactgaatatgcagaaaactgaatttcagaaaaaaaaagcatgaatgagcagaaaactgaacatatatggctgaggttcatatatggctactacaagtgctaaatttaacaagtttgtcacagaatttcagaatttaacaagtttgtcacagaatactaaataagcagaaacttcatatcttcataccagaactggctgaggttcatatatggctactacaagtgctaaatttcagaactacaagtgctaaatttcagaactacacagataagaaataccttctcaaacagtttcaggaaaaagggccttcataagacacttcatcatcatagctcgctgtgccttttcctcatcggacattgaacttgtatcctgtgaaacgaggttgttataagtctccatcatctttgtctctttatcaagcttctttccttctttgtactcttgtgctgtaaggtgggcaatttttgtggcctctagcttctcagaagctatcttctcttgcctgtccaatagcttcatacgcttctcattgtttgcctcctaaaatttactgtatctatcaaatttgtctagctcaataggagaatcctttgagtgaccatcatcactactgctggaaccctttaacttgccatttttagcagctagagctgcctttttagctgccttctgaccaattggtcgttgtggcatctgatcacaagtgtcctcattttcctcagattctccttccagatggaatgctttccttttacgtgcattcttcaggttttcattatatgttttccactttggcacatctcggcaaattttccaaacctctgtcagcatataaggtccaaccacgtctttgcattctttgttgtcatccacatagaacttgtgtgctgcatcaagccacatttcagccgaatatccacttgtaaatactctacgagccttagcgtaagcacattcaaagaggtctgtccatttattaatcttgttccatctatccttgcattgcttcgcatttcttcttcgaagtggaggggtagttttgttgtacgtttcgacaacctcaccccaatattggacaccacccttatccgcaccacaggtaaagtcggttgaatgttctaaccaagcgctcatcactctaacatcctcgtccggagtccacatgatcctcttctcggttctaacactgtcattgccatgtaatatttccacttcgggcggtgaactaccattgtgtgcctgattcagaggactcatgtgaataactgcaccaaccaaatgagagttctgtgcttcatttccaaaatagctcatgaaaccaccaggtggacgtacatcttggtccctgcaggaaattgcaattaacatgaaattttccatggtccatctacaaataaaattcagatgcagtagtagtactattgtggctgtatttatgaagggttagaaggtaaaattagcttaaaatgatttcggcacagaagcttaacatgaaattagcttaaaatatgaaattagcttaaaatgatcagttgacacagaagcttgatgggtatttttactctttaagaacaactaacaaagagtacaatatgttggacacagaagcttgatgggctcatttttatgataatcatttatcagttgaatatctaacaaagagttcaatgaatcacttctggacattgttaaaatatggtataaaagggatccaggtacaacagtatgggatttacagattcacaatgcttaatatcaactacaaaattatctagattcacaatgcctaatatcaactacaaaatcagcaatgaaacaaggatttaccatgatccaggagatgagggatcaccgccggccgcatcaaaccaaggttgagacgatgcatggggaccaattgagctggtgaagtcacctccgacagaaccatcaatggagaaagccgggacggtcgtcgctgccgctactgacccgcgaccgtgtccgcgagaacggggcggcggtggtagcccgacagcgtgaccaaaagaaccccgaccgaatgagggagccgccgccgccgccccgacacctagggttcggcctggggccgtcgccgccgcatccaatgtcctcgatccattccttctccaagctgcgccgggcgtggacatcccgccgcaccaactccggcgagaataccagatggggggcgagcagatggcggccgcgcagatgggcgggcgaagaaatttggggcaagtcgcgagcagagcgcgggagaacagcgcgcgtggttgcctgggaaatttgtgggcgagcgcggccgcacgcgggatccgttcgcccgtcgcctggggatgacggcgctctacagcgcgtgggctcgcgtcgactccacctgggagaacgggatgaactcgtcgcgtcgggaggcgccgggctgcccgtctctgcgcgtgcacgggttttttttgcaaaatcaccaacacacagacggggcgaggagacgggttgtacatgccctaagtcataaagcctgcatgcagcccagctgacctgctgctgtacacgtggtagagagaaacgaccacggtcctcctgttcacaaggttttacacgaaaaactgtaaacagcgcacgattcctctctacacaatcaattaatgttaattacccttttcatatatacagaccatcgtccataatttaccttttttacacatgctaaactaccaaaatgggcatgcaaatatgcggactaattaatcatgacatcagcctcatttcaggttcacagcttgccatgcaaaacatgcagagttatatttattaacattaaagaatattcagtgaaaaaaacattactcaatctattgtactgtttgaactcatgacaattaaagattttttaaaaaaaatcaagacgtgtcttgttcattctggaggtgtagtaatatactccctccgttttttaatagatgacaccgttgactttttctcacatgtttgaccattcgtcttattcaaaaaatttatgcaaatgtataaattataaatcacacttaaagtattatgagtgataaaacaactcataacaaaataaattataattacgtaaattttttgaataagatgaatggtcaaacatatgagaaaaagtcaacggcgtcatctattaaaaacggaagtagtattaccatgtcaactggacacaaaatgaagaacatatacaccaatttgatcgcagtgaccaattctaacgactatatatcgatataatcgtatacaaatacaattgtatatatggaaatagagatatgagttgtataaaatctatatttaataaaaaatctagcctaaaaaatccgctatatttttatttttaatccctttgacgaattatacaaaagatgctctcaattcttttgtcgatctcacgccaagccacatatatgagttcaaagctgaagttaacacgataggtagcctcgtgctttttctgaggcgacaaatatcgtctccattggtctgtcagtaacaaaaaccctctaattaacaccctttcatcttgtactttaatttcacctcttcacacaaactgtatatgctgtcttttacttgacttgtagtgcaaccttccactgtcacacatgacgcctccatctgcaatggcatcttaattaatcatcagtaactccaatttccaaatagcacgtacgcatgcatgcgtccatgccatctccttcatctgctcgatcgatcactctcagatagattgattgattttactatctcgatcgagttggtcgccaattcgccatggccagcagcctcatcaacctcctcctcacggaggtggcggccatcgtcagcatcgtcctcctcgccctcctcgtcgtgctcagctcctaccgccgccgctccggccacccggcgctccgcctcttcgtctgggcggcctccacgctcttcctcccgctcgtctcctacgccgtctccgccgccgccaagtgggacgccgcgcgcgtcccgctcctcctcgcctggaccgtcttcctccagatgctgcgcaacaccatcgacaccgcccgctcgtcctcgtccacgatcggcaacggcagcggcagcagcaagttcaggccctccgtcgagcagctggcgaggatgggctgggtggcgttcctcattgtcagcagcgacggcaccgccgggagcccacagctcaccggggtgctcctgtggctgtgggtgctcagcctcgccaagctcgtccaccgcctcgttgccgccgagctcgccaagaactcgttcgccgtcggccttaacgcctacctcatctccgactacatgaagcagctgtacgggcaagaccaaggagaccacgacgtgcaagctcctccgttgttggtgatgggcgaggagaagctgcaaatcgaggcgaggccacaggggtaccgcattggccggacatcgccgccgccattgtgcgtcgacgccgggcatgtggtcaccatggaccggatatgccggctgttctcctccggcgatccactcgtcgcttctaacccgcagatcaaggacacatgcctctcgttcgccctgttcaagctgcagctccggcggttcgtcgggtgccccatcgccgaggcgggctctcgccgttcggtggcgttcgtgctcgacggcctcctcggcgagagccacgagcgggtgttccgggtgatcgagaccgagctgtccttcctcgccgacttcctctactccaagctcaccgtcttctacgcgagcgggtggtggttcccggtgctcaactcgatgctcgtgttcgccacgtgggtcagctgcctcgccgccggcggcgccatcgtgcacgacatgacgtgccacggcacgacgctcgccagcaactacgacaacctgagggagtacctgcagaaccacgacaccgtgttccacatcatcgtcggcctcgacgtgctcgtcaccgtctccttcatcgtcgccatcgtgttcacggaggggtgggagatcgctacctacgtccgctccgactggatcaaggtgtccgccatctgcgagtacgcgcgccggccgtcatggcgcaagtcgccatggactcgccgcaacgtcggccgagttctcccgctcaagccaatgcagcgctgggacgatcggttcgggcagacgtccatcctgcagctccgtccgtgctactgtggctgcgtctcccggcaggttgaccggatcgccaagtcgtcggccactgtgccggcggcggtgaagacggccgtcgtggacacgctaaggacgaaccaaggaaacctgggaaacggcgtgctctcgttgcagcggaacggcgtcgccgacaagctcgcctgggcgtgccaccacgccggcgacgagagaagcgtctccgagcagatcctggtatggcatgtggcgaccaggcttctcgagatcatgcgatcagaaggcgctcacgggagacacgacgacggagacggcgacggcggcggagacagcgacacggtggtcgtcgcgacacggctgtcgcggtactgcgcctacctggtggcgctgaagccggagctcctgccggaccacccggcctggacggaggagctgtacgagggcgtggtggaggaggtgtcgagggtgctcgcgcggttcgcaggggcggtggtgcggtacgagcgcgcggcgacgtgcctcggcgggagcacgaacgcgacgctgaggaaggcggccaagctcgggcggcagctggcggaggagctcggcggcgacgaggagttgccctggagggtgcttgccgatttctgggcggagctcgtcgtctacctcgcgccgtcggagaacgtcacggcgcattccaaggcgctccgccgtggcggcgagttcatcaccgtgctgtgggcgttgctcggccacgccggcattgttagccggccggacactgacgtctgactgacagtgtgagtgtggtttatggcgaacacatggttttctttccgcttttgtcattgtgtataccaaactgtcgacatgagatgtgtttgccaaactgtcgacaatttatttctgatttgcaatagtaaaacagtttccaatcctttacgaacaagaagcagaggttctttttatgaacaccgaatgatgttgcatgatcttctttaaaaaaaaaaatctataggcataaacatgaaggaattttgctagacatctccagccaggtggcttgaaaggcaaggccggaatctgtcatcacataagcaaaagcttctctggtcagaaaaccaggttgttgcacgctgcattgcgcagctgcaatgcaatcttgagacagaatcatgtgccgagtcgaaaagcaacgcaatgcaagctacctgttcagccagactaggtggctagcttttatcaccaggcagggggcatctttatctttcaggttgtctgtattgcctatatttttttttatacccaagtccctaattcaagggcaatgtttatctcttggtgcagaattctaatatctcagaagagctgggcttaccctttgatgtggatttgaggatatcagaagatactatgaggtatcaaattttgtagcataaattttgatagcttcacatacctcccaaaaatttgacaaagttggccctttcatcattgataaggacgttgagaaaatcctggactaggagaacagcacaatgaagcaagttgaatcggagatggatttaaatcttccgggtggatgtccacccgtttattgcatgcatgccaactaaatggttttgaaaaaaatttaaaaaatttgacaagatagattaatgcataatatataggcaataaataaaatgtaacgagtttacatatatttgcagaaaatttgtaattttgttaaaacttgtagaaaatgtttttgaacttgcatctttgtggaatgatatattccatgcttgtggatgctatagcaaactaggcagtgacccaaacaaaaataatcctctggtacttgtggaccttgttaggtcattcacagggcacatacgtaacgtgtgacaatgttggttcacatagacaaattgcttgcgtgtaggagagaggggagtggggaccgctccttcaccggcttcgcgtgaccatagttggtcactagaacctcccactcttgcagcagttctcgatcagaaaaagtggtcatctgcgcgtggagagagagagagagagagaatgggggaaacaaaagtgtctgactgaagagaaaagccggataggggtgcggaggtggtgaagtggcgacgagtctgaccccaacgaaggtgccctcgccggggacctcgtttgcccacgcctcccacctgcttcgatccgcgccggagaggggagaggagtaagggcgctgagcgaggaaaccggaggggagatgaaggggcgatggtgcctgaagcagtgaggggaggggcgtcatcggcttgatctgccccatccggccacgctgccagcgagctcgtcgcccgcaccaccaggtcctcctcgaccgccaccgctgcgtggatttggggtagccaaggaaggaggccacaaggggagagaaagagtggtggtggccggagcgggcgagggaggggcggttgtggtgggcggcggggtggctcgatcttccttgcattgccacgcggtcgtgccagcggggagctcctcaaccgccgccaagggaggaggccgaagggaagagagggaagggcggttcagtggtggtggctagagtggtgaaagggggagaggagagcgtcggtttcgaggaaagggagagtgagagagagaagggggaaggtggaggaaaaaaagggaaaactatttttgtggaccccacttgaggttacaacattgtgaaccttgtgtctttcaccattccttagcctacgagggatgtgaggtccggcaaacacatatgccacattgctatttctattgcccttattgatcattcagtacaagttgatgtagcaagatcagaaaatgctgtccaagcagatatggaggtagagtttcatcgtagcaagcagcggttcggatttttgaaatggggttcaacacttcaactgcttttagtaatatgcttagcttgtcgttccacctttaataaaaaaaaagcttgttgttccacctggatctggaattttgcatcaggtgaaccttgaatatctgggcagacttgtgtttaacaatggtggtgggatcctttgccctgattagcagaattgccgtacttactttgatacaggatttaaaaacttcatatgatattacatgttaaaactttgtttggttaatctcactaacaaggggattggaggagaattaattccacacctatccccctcaatttcctttgatcccttcttcatgggattaaccgcacaagacttaacatgggtatatggctgcattactatatattaagacgatatataataattttgtactttgacttttaacaataaccgtaggtagacttttagctgatcttaataatcatgaaaagagattgaaaaattaaaattgcccaaaaagctcttagatttattctagaatcaaataatacatttatgtaactacccacttttatttgcttcaaacaaaagctattcttgttactctcttcttttaccttttaactctaaggagtacatatgagaaccgatagctggccaaacaggtggcctggcccaatgcggcatgagtccactggcaacacaacccgctttagtacaattcgttaggcacgacacctgtagcaggctatgctatgtcggcctatgtgccaaggccacggcccaagaatagctcaagaagacaccgtgttgtgctgggccatcacagcacgactactgttacggctcgtgggtcaatgacaggcccaactgtacatatgacctatggaaattgaaatttgaggtggaaaaataaaaagcgaaaaagaaatagtgaaggtggaaaaataggaaaagtagtaaaaaggatggaaaataatgagtaaacatatggaggaaatgggaaaaggtaagggaaaataggaaaaatatgactaataaaaataggaaaaaatggaaaattaggaaatatatacagaaaaaatagatgggccagacaggtcgtgctcgtgcttgcccgtagacaaccgtgccatgccagcacaacccacaggccagtgtgccgtgccatgtcgtgtcgtgggctggtacaatacagtcatactctagtcatactctggcctagcttggcatgacccatttggccagttatatgttattgataagtgtggtgatggaagtgaaccattatcttcttttaaagaggtataaatcgcgttgtagaaatggacttacgcacaaactatgacagatggccttggccggtgtttctgatgggtgagttgatggtataaaggcagaagctgcaatgcttggccatgggcagccaatgagcatagtattgtcagggcttgtcggtttcaagttagagtgacaaggaagctgaggaatacagatttggtcctagcagggacatttaactttttgccactcgcagtatataacctgtgggttctcatgtgtctataatacgtgggatcaatgacaaatctttaattgcgacttgtaagagtggcaaataattaattattcctaactcgggaatgtttacttcaggctgataggaaacatggtgttttgtcggttaatttgctgaattttacgggggaggcatgagtgaattatcactgcaggttgatagggctacaatcgcaaacatgggattcgaatccaattgtaatgctgggagctgctatagttgccaaaatggcttgcgaattaggccttgaggtcaagccatggattaagacaagtctcacaccaggttctggacttgtgaagaactatggttgtactacttgcttaggaaattctggagaacttgatatgtatctgctgcaattgataacaatgatattagagtaaattttataaaactacatgtactttacacgatcttatcataaaactacagatttagtatctttgtttattacaaaactacagatactttacacaatatatcacaaaactacagatttaagaacttgtttcacaaaactatatatttagtgtcttcatttattacaaaatacagagttagtgttttcatttatcacagaactacacatttagtatcttcatttatcacaaaactatagatttagtgtctccattatcacaaaactataggtttcaacaatgctaaaatatgtagtttgtgataataaagacattaaacctttagttttgtgataaatgaagatattaaatctatagttttataaaacaagtttttaaatatgtagttttgtgacaaattgtacaaaccaggaattgaagaggagtgtgcacatgtgtacgtttgtactatatttctaaaaagaagaaatatgccaggttttttacgtaatgtcgtgatatcttttgtatgggggtgtataatcgggcaatcactcgtctggaaaaatgttttatttatcagtgtgaaacacgcaatcctcgctccgatgatgctccccaagtgcatctgaaatcctataatatttaagtttttcatcggtgcctttctatttatcacaaatactgtagtaatttgaggacctatttgtccattaaacagcaaacaattaattacaggtgctccaagcaaacaacttttaaccccaaatctaatgcattgtcactatacatgtacacttgtgctacaataaagtcaaagcgaaaaccacatatataaatctattatgtacaaaaacatgatacttgagtactattgtactcaaccaaagtttatcttatgagcgctggagaaatgtttagccgccctgaccatctcgccagccgcatcataccctgcgcggccaccggcggagccagagctcgccaccacctttgagcccaatcgcgcgaaccaagacgccacggccaaccacaaactggagccggatttcctcttcttgcctcccatgactaaacagttactacaaaaacgactgtgtgatcgatgaactgaaccacaaactggagccggatttcctctgctagtttgtttcaactttgatgagctactgtgtcgttgtgtttcttgtgctgttctgttggaagagtttgcagctggaggcttttatatagcattggaggcttggagcagaggtatgcatatgctgggacctgggtcctataagctttcttggcagccaagctgcaaatgaggagagagagtcagagagtccacggttgtgccgtgttctgcattttgtgccgtgttgtgcattgatgtcactctcgcttgacctgaaacatggtcatggtcattgtattcctcatcagtttaaatttaacccaaagcaggaaacgtgtactttgaattttgtgtattaccccctgtacatcttgacataagtcgacgttttttttttccttgtctttattgatacaatcatatatacaagctgtttttattttaatcttctggcaacatgctaatcatggcatgcttaggaatgttcctggatagctgcttttgaagaagaagctatttatcagacagtgatagggaagttagttacatggtcgtttcatcaccgtggcaccttcttcagagaaactcaccgattcctatagagctcacatgctttgaccttttctttttcatattgtaaaccttacatcgatttcttagcatgcttgatttgtgacgaagctacactactagtgtggttttttttttgtttgtttgcattggtcggacaagacagaaacgtaagaggagactgcttagagcactaacaatagtagacactatatgtgtatcatgtctatactattaatttaatgacatagatactactgtacaaactatttgcccaatacaacatttcttacgtgtgggaccaaataatacaaactatttgcccaatacaacatttctacgagtgggaccaaataataagatcttcccagtacatcatttctacccagacaagaaatacgagtctctaattatggaccaagactattcactacgccggaccaggtcatctctgacgggcccaaaccctcacctttaacgggtttggtcttggtcagtgattagtggtcactgatgacaaaatcacctgtgacggatgaaacacccgtcacagataacccatctctgaccggtatataagtcatctctgatgggttaaaacttgtcacccgtcacagatgagtcatttgataatatgagtcacagataagtcatttgataataagatgagtagttgattaaaaagtcaacgacgtcatacattaaaatatggagggagtataacaatattaatagcttgtcttaattatgacatattgtatcttattaatttctatatgtaacgcatgaaatcccaattgtatcttgattgttgcctaatcaaatccccattgattctatttatagtaggtaatctgaataataaattcaaaatttgcagagaaaaaatgaatggtaattgaaattcaaaattggtgcaaaatcatcataggtggctaggctaagtaatctaccaacgaaaatgatttctcatagataattggttgcccgctagcaaaaagatccattttcaccggcctatgttatctagtcacaagcggcgcggctggcctcctatgagaaaatgttcttgttgcccgcgttatgccaatttataatagtgagcaccatccacttccccttccctttcctgtgaagggatgaccatgctcactagatctagcagccacggcctccctggtggagaatttgatcgctcggagccgagaatgaacgcaaggggctagcatatatataggaggctcctcgttaatgaagatgtcgaccacactggtggatttgaggacgtgccaacctccgcagccacaagcccgctcctcgatctaccccttcctccctccccccccccccaaccaccactctctctatatgaaacgtatagttctttttttagaagcttagggcggccatagtaatcggtggatccaggccatggcagctgacggacccgagggtgaggaggcaacagtttctaccgatggatctgttggctcgatgtgatctttgttgaattcaagttaatatacgatttgttgatttatggtgaattattttgttgtgagttgatgcatagttgtggataatttgttggcttgttatgaagatttgttgatacatagtagtggaggattatttgagttgatgtatatatagttgtaggttgcgttgtacgatgatgttgcttatctgttgaattgagtttaaatttaatgattctagttggtgtgtaatagctgttgcaagagaaaatttgctgaggcttgagcccatggctgtactcagtttagaatgcattttctcaggcagggtcagcggcagcgcaatagttcctgggtaaacaaaatcgtttgccataagtcaatatttcggatttaagagcccaattcacatcttcacctggctctttctattttattcgaagtagaaacttcaggacctatttgaccggcccttaatcgaacacttctttttacaaattaacaacgaccttatgaatcctaaatatatacacatatgtgtgctacagtaattgaacagataataattctattatgtacaaagtacaaacatgataacatgcaccattaacagttaaccaaagtttatcttgtgagaactggagaaatgtttagccgccccaaccatcccgccggccgcatcatacccggcgtggccgcccgagccggagcccgcggccgccgcctttgaggcgcccaagcacgcgaaccaagacgccgacgaccagaaaccagagccggatttcttcttgcctcccatggctaataatcaaattaacacgaggggaattaacaaagctagctcaactagtacgtaagtgacagtgtgtatgtcttattaatgctcgcttaaatagcttagctacttgatgagcaccgatcgaactgactacggaatgtttttcttttgctgaaggagttgcagttactggaggctttatataggatgcatgcgagcagctgaggtaattaagctggaagctgcacacttgcttcgtgcttaattacttgcttggcgaccaagctgcaagtgagagaatcagagagagacctgcagtgttctgacttctgactctgaggatcgagagatgatcttgaattataatgtcgctatcacttgacctgaaacttggtcatggtcagttaatactcggtatatatttagtttcacttaaatcaggaaacgtgtacaattcaaattatgcactcttgtgcacaccttggcatcgatggacacgttcgaggcaagagcttgctgaccaagacatgcagacatgcatgcactaggaatggaccaggatagctatctgctgcttgttcaagaagaggagctgtagtgctgtactaatataattaacgacgatatcaaagagtgatagtactgtgataggaacgttagttgtttccttgattttaaaagcatatataaataggcaggcatcagcatcaccgtggcagcttcttcagagaaactcacccgattgataaaatgtttcacatgcttaactgcggttttcttggtatgatgacactacgtatattatatatatatgtgatagctagctaggtagatagtcaaagagaatacagtttatttgcatcatatccactccagtctggctagccaaacgccactagaaagcacagataatttgaagtcgttatatggtcgctcattaaacggaggtagtataagaaatggaaacgaacccatgcatggaagaagtcaaaataaagcgtggtttactattgacttagtattagcaaggagagccagttaaccacgacagcttttccatgatgggcagctctccgaaactttcctacacctgagagaattaagtaactttagcccaatcattttatttgcttcgtacactgacaacacatattgtaaagtttttcagaaacaagcagtaaaataggatacttacgtacctctgacccaaaatagttgtcattttgagtttttctttgtaagatttgaccattcctcttattcaaaaacttatggaattattatttatattttgtgacttgctttattatcaaaagtactttaatatgacttatcctatttttatatttgcactaattttttaaataaaatgaatggtcaaacgttgcaagtaaaaagtcaaagcgaccactaatttgggacatagatagtagaaattaccaaacgatcgtgcttcctaaactgatcagttgattggtgttcatgcccagaataattacgagtactaagaatatgacattcgattaaatttgagaatatacatgacttggacgggtgataggacgatgatgggatagtgttttccccgatgcaagtagccatgtccggtcaccaaggacggaacatgttgatgtatattcaagcaccctacgtacttccacttgctaggcatgggatggcttatcttagtaccgagtgaagttgtggttatctatgcccattcgtcattcgtgtgggatgtttcccttggaggtacccatgcgtgcataggttggtagggggtatctcccacgatggtaatcctaacttagtcacacgcacatgcccacggctaagttatcgagggcctatgcgtggtttaggtggttggggctgagcttgagaaaggatatgttatgagcttgaatcacttgaaggtcacacctatgtgcgtgtgaagcatttgatcgagtaagactattcgaatagccgtgttcatggttacaggatgatcacttgatgtattagtcagtttatgttagcatcaaacctgggataaatggtgggtattagtcacggttaatcttggtggataagtggctaatggttgcttgagcaagggtggtccatggacgatgtttagagcctgttgtgctcatttgttgttcacattcagatttatatacttgttgtacataaatttcagattgtgttattttgcaaattcttatagttttaacttattacttgctcaacaaaacttgctttgtgcaaaatctgaacccttatggtcctttgatatacaagcttatatattcctttgtaatattatatattgtgtaagtcttgcggagtactatttgtacccatgttgctatttttaggtaaggataccggtgactttgatgtgtcctactactatccagccaagggtggcgagggtagtgagtagctgagttggttgccttgtgggctattggctgaccatgggttgagacttctgccactatatttgtgatgtatgaagggcttatgaaccctattgtgtaatatttaccttgttgtgtgtttaattttattaaatacttgttatgctatcaattgcttgcagacgaaagtgccaggctagtcgctttttcctgggaactagctaagcatgagtaagtgttttgagtaattgagatgatcgtggaatatagcgtttgaataagtcctttgagatatataacacatttggtcgccaccttcgaatggtttgatggggcatatctttggtcgaaatcaactaacaagctattccatcgaatatctctcttactcactactcgatatcgtggttaatatattgaaaggtgtcaactacgatcatggatacactgaggatgagtgactatttatgcgagtatggatcccactaatccaaatgcgtgtggtggtcacgttggacactagactgagagaagttgatttgctctctctctctctctctctgaaaagaaacattgacatatatgtttcttttttttagtttctggcctaacattggaaggagtctttcttggaagcaaataagtttatgataaaaaaatatttatcatcttttttccttaaatccttccatatgtaaacttgatttagcatctatatctctcatacatcattactcacttttcatcaaattgtggagcaaaactatctttggaagcatttatcctatatcactttcttttctccataaatgttgcaaaatggttgattccgtcgctctcacacacaaatagttgtttttcaatagttcttgtagtctaactttgggagttactccattggcagttggcacactgtttctgcaaattttgggcatgggaaatctttttaaaggtttgcttttaatggagaaactgatcatcccccctcccccctctctttctgccttttatgtcgccctatatataagggtaccaattaattccaacttttttattttatgtagttgcaattttgttttagtactgaagtgcaattaggtttataaatttttatctataagaaattttattggccctatatttcacacttttccccataaattatgaaaagggtcatttggcctatatcggtttcatatatgttcacttatcatacaagttggcaataagagaaatttcatgatctttacttaatgataccatattttttaacataaaatttggtatctctgttcttgaagtgttgatagacaccatttttacaccaaaaatgttacctacgcatggatcatatataaaatcactcttggaagaatgttttctttgaagcattgttttttttaaaaaaaaagatatgtgatttgtcctacatcacaataagggagatttgatagaaggaaataaaatagacgcccctaattaaatgagttatggttgggactgagaggtgtttggagggaaaaatagcgctactctatttttttagacaaatttaaatagtattagggactgagggagtagtttacttgctccctctgaaaaaaacacatatgtttctcattttttaagtttctggatcaactttggaaggaggctttctttgggtgcaaataagtttattgataaaaaaatatttatcctatactgcttacttttttctataaatccttccatacataaagtagatttagcatctatctgtttcatacgttactcacttcagttccatcaaattgtggagctaaattatctttggaagcatttatcctatatcactttcttttctccatatatcttgcaaaatggttggatttatttttctctctcacacacagacagttacttttccaataattataatagtctaactttggaagttagtatctttagcagcactttacttcattggcacacttactgtttccataaattttgggcatgggagatcttttcaaaggtttacttttaatggagaaactgatcacttacccactttttctcccttccatgtcgttttatgtagtagcccattttacagatttgaaatttatatagtcacaatttagttttagtactgatgtgcaataaggtttataactttttgtctataagaaattttgctcgtctatatttcactcttttcttcataaatcatgaaaaaggtcatttggcatatatctctttcatacatgttcacttttcatacaagtttgcaatacgagaaattttacgatctttacttagaggtggcatattttctaacgtaaagtttggtacctttgtacttgaggttctgacagacaccatttttacactaaaaatggtacttactcatggatcattatataaagagtgaagtatattagcggtctctaaacttctgccggtgtatcatctaggtccccgaacttctaaaatacatttttaggtccctgaacttgccatgtgcgttatataggtccaaacggattctaacccactcgatgcgctgacgtggcaatgccacagtgacacctacgtgttagtggaatccacatgtcaagcatatatacaaaataaaattaaaaaccatattttctcctattaggtagacagaaaaaatataaaaattctaaggtagagaggagaaaatatgtttttctacttatatttttttctatgtggctgacacgtgtgtccaactaacacgtatgaactatcatggcatgccacatcagcgcatggaaggggttggagctcgtttggactcatatgacactccaaaacaagttcgagaatccgaaaatgcattttgagagtttcgggatctagatgacacacccacataagtttaaggaccgctcgtgcacttcactcttatataaaatcactcttggaagaattttttttaagcattgtttttttacagaagatatatgatttctcctacatcacaataagggagatggagggtaagaaaacaaaatagatgccccttaaatgagttatggttgagagtgaaagttggttggagggaaaaatagtactgctctcttttttggacaaatttgaatagtagaagtgcacttatcagggacggagggagtagttgacttcgctctctctcaatccctctaaaaaaaccacacacaagttctctctttttttaagtaaactagaaaaatgcccgtgcgttgcaacgggtgaaggctattttaatcatattattgttatatggtttaggtaaggtgaaattcactatgtcaactcgcttggatgtattattttttaaaatcatgagctgcgattaggagtctgatagtctcaaattaacatgcgtgtttttttaaagagatttcttatacgactctttctgtatttccaaaaacgaatgaacttaagaatcaactcaaatacagacatgtatttcaaaaagcgaatgaacttaaaaaccaacttatacacggatgacgtaccaaagtactagcaaaaacatatttgattttttataatagcagagagtagagatataatctagttaaggtaaaattcattgtgagaattcgcttggatatatagttttctagaaaatcatgagttgcaattaggagtccgatcatctcaagttagcatgcgagttttttttaaaaaagagatttcttatatgactccttctgtatttccaaaaaggaacgaacttaaaacctgactcaaatacagatatgtattttcaaaagcaaacgaacttaaaaactgactcatacgcagatgacgtaccaaagtactggcaaaaacatcttcaatttttataatagtaaagatttcacaaaactacatatactttgaccaaattatcacaaaactacacatttagagtgatatatcacaaaactacaaatttaacactaaatttcacatagaactacagatttaaggtagagtatcgtaaaactatagatttagcaataaaattatcacaaaactacaggttcagtgataatttaatcataaaacttacacgtgtataactcaaacataacactagtgctaaggatttaaactctaaaatatgtagttttgtgataactttgttattaaatctgtagttttgcgatactccaccttaactctatagttttgtgataaatttagtgctaaatatgtagttttgtgatacatcactataaattgtgataatttgatcaaagtatatatagttttgtgaaatttactatatttttttttcagtttctggactaactttggaaggaggctttctttgggagcaaataagtttattgatagaaataaatttaccctatacttcttacttttttccttaaatccttccatacataaagtagatttagcatctatctctttcatgcgttacacacttttcatcaaattgtggagcgaaattatctttggaagtatttgtcctatatctcttttctctccataaatcttgcaaaacggttggatttatttttatctctctcgcacacagatagacttttcaataattctagtagtctaactttggaagttaagcatctttagcagcacttaacttcattagcacacttactgtttccataaattttgggcatgtgagatcttttcaaaagtttacttttaatgaagaaactgatcacttccccacttttcctgtctttcatgtcgtcctatataaaggcacaacttaagctgtcatctatcaccaattcatagcttccaacattttcatttcattcgtaatcaggttttccacagggagatggcaatgaaggtgtatgggctgccaatgtcgaccaatgtagcccgcgtactggtgtgtttggaggaagctggggaacaatatgaagttgttccgattgatttctcaattgctgagcacaagagcccagagcatacttcacgtaatgtaagttattcttacaacttgttctctccattttttttccatcaattttcatggacaaaataacttccatttgtctgaacttttggatcaatcgactatgttgatttttcatgattccattctctctttttccccctcatacagccatttggtcaagtcccagctcttcaggatggtgatttaattctttttggtgagatttttttttcttcccaccatgcaaagtcttttttttcggagatgtttttttttcgcgagggaatgttttatttcttgcatttaccaaaatagttatgaaaaaaattaataagatagatcaatttatgatatcgcatatgtatctatcatcttatcaaaatattttttaaaaaaatattcataactattagataacaatgcaaagaaagaagacattccctcgaggggaaaaaatgctttcactacttttttttcgttcttgattatttttaatccatacaattttacactgtttcaacagagtcacgtgcaatttcgaagtacgtgcttcgtaagaacaactctgaactcctgaaggagcacaacctttctgacgctgccaaggttgatgtgtggctggaagctgagtcacaccatttcgatgagcccatgtccgtggtcatctaccaatgcctcatcctccctgtgtatttcggtggacaaaccgatgcgaaggttgtggaagagaatctggagaagctcaagaagacatttcaggtgtatgaagagcgtctgtgcaagttcaggtacttagctggagacttcctgagccttgcggatctgagccatttcccaactgcgtactacctgctggccacccctcatgctgctatgctcgatgagttccctcttgtgaaggcttggatcgatggcatgttggccaggccgtctgtcaagaaggtcatagagatgatgaaggcaactgcctagaaaaaaaataaatcgtgttgcttgttgtgatgatccttgtgatctctctaaaatgatgttgtctgagaggaagtgattgaataaaaacatggagcaggaattatgtttgggcggtttgcttcataagtacatgaatgtgttgctttgtgaatcgaaactccatggatttaagctaaataattagtttaacaactcaattccccaattctaacattcccagtgaatatgatggctgttcgaaggagcatctattaattgcacttgtttggatgttaaaaaaaaactattttagcaatcatactatcttgccgtactaaagatttatctccgcaatgatttgttttcaatggcgctagacctagtattaccgttgttttacaagtggtggcatatgagagcaatctttggtgtgcagtcggtgtcaaagcgctccatgaacttctatttaggtcagttggctcagctgctgacttgctgtgttttcttgcacgggtactatataaacaggatagcttcgattctcgatgtacctatatggcacaataaaccatgtggcttcatctattctttaccaaatcttgttttatcatggatgctatcaaatttaatacaattgataacctttttacttgctgtccagtggatcttggtgtgtgctcgctgtgtccttcctctgacatgaacagagctggtcttatatgtaaattgcatcagacatacctttaccctgtatctcaaattgcatcatgatgttcatcacagcagcaggatcccaaattgcataagacttgtctttgactcggtgtaaattcaacttctctgcattgtctcaatttgtacccaaaagcttttgttctatcttcagtgagtcaaattgcctgttctttctggttaatggatgaatgaattaaccggcacgattcttgaactcctaaccagtactattttttgagaaaaactttctatatacgaatttcttataatactgttttaaatccaattttctactttatagattcatttgtaccatcaaataattatcccaaatcattcatctattcagccattcattacaaaataattcatataattatcacaaaagaacacacaagctcttcatatttttcagtctttgtgaaccgttctcatccaaaacgcctgcatattattcccacctttgcaatggggtgttttgagttgacaaaggatttgtgcgatcagattagcaagatgatagcgaagtactggtggagcaaccaggagaaggacaataagatgcattggttaagttggaataaattgacattgccaaaaaatatggggggcttaggtttcagggacatttacatcttcaacctagcgatgctagccaagcaaggatggagattgattcaggaccctgactctctgtgctcaagggttcttagagctaaatacttccctctgggggactgtttccggccaaagcagacatcaaatgtttcctatacttggagaagcatacagaagggtctcagagtgttgcaaaatgggatgatatggaggatgggagatggatcgaagattaacatctgggcggatccctggatcccgaggggatggtcaaggaaacctatgacacccagaggcgctaaccttgtgacaaaagtggaggaactgattgacccttatactggaacttgggatgaagatttgctgtcacaaactttttgggaagaggacgtcgcagctattaaatccattcctgtgcatgttgaaatggaggatgttttggcgtggcactttgatgcgagaggatgcttcacggtcaaatcagcttacaaggtgcaaagggagatggagagaagagctagcagaaacggatgccctggggtctcaaattgggagagtggggatgatgatttttggaagaagctctggaaactgggtgttccaggaaagatcaaacacttcttgtggagaatgtgccacaacacgctggcgttgcgtgctaacctgcagcatcgaggtatggatgtcgatactagatgtgtgatgtgtggccggtataatgaagatgctggacatcttttctttaagtgcaagccagtgaagaaagtttggcaagctttaaacctagaagagttgagatccatgctagagcagcaaacgtcaggaaagaatgtgttacaatcaatttactgtcgcccggaaattgaacgaacaagtgccatagtttgcctttggcagtggtggaaagagaggaatgaagtaagagaaggaggaataccaaggagcccagctgagctctcacacctgattatgtcacaggcaggagagtttgttaggatgaatgtaaaggaaaaaagccccagaacaggagagtgtgcagtttggagacggccacccctgaactttgtgaaaatcaacaccgacggagcatacagtagtaacatgaagcagggaggatggggttttgtgatcagggatcagactggcgcagtccttcaggcaggagctggtccggcagcttatctacaagacgccttccatgctgaagttgttgcctgtgctgctgcaatcaagactgcgagtgaaaggggtatgtccagaattgagctagaaacagactcaatgatgcttcggtatgcgattcaggataattcctttaacctttcatccttaggaggagtgattcttgagattaaacatataattttgagctgttttcattccttctctgttagctactcgccccggagttgtaataaggtggcacatgagcttgccgcgtatggttgtaatctccagaccgtgtcttcctgggcaggctgcccgcctggtctggaacggctggtatccagcgattctgctggtttggtaatataaatctctcggtttccctcaaaaaaaaacgcctgcatatttcattcctcacttttcagagaagccacaaccacaaaccagcagcgtgaataatgtttattacggagtaatcactatttccatcagctgacaactttcgatactgaattactgatactcgttcagtctcctgcatacacattacagataagtactgtagtatttttgcatctatgtcatttctcaattactcctagtgccctccattgctgagcggtggaaccttttttttttttttagagaactctgagcggccaatctatccatcgttgtcctctgcgccagatttgggtgccactcgacttttgggtggtggatctatcacgaacagtagtaaccttctgatttgccttccttgaacctctgccagcttcaacttaattatttgtttctttccaaaccagcctccctatagatcagtagctgcaataaaattgtaaacattagccatgtgaaaagtatatcagaaaatttatcttcatatgtagcttcataatattgtataaatttacaatatccaccaacataaaattgtagaaattaatcaaaattactggtaccaggatggcatgtatgtgtaaacagtgtaattttcatttctattatttatacaagctctagttgaataatacaggttacctcatagcaggtagcaccgtggtagagcagattcttgactggaattcattcaacatggcaagggaatacgcgatgcagtgagatccaaacaacgaacagtctgaggttcacttcaatctgattcttgtctgtgttttcccactgttgtagttcattgttaggaaaaccacatcggaggcctatcagctggtgcagaactcaagtacatgatactgatttgaacaaagttttgaagtttgaattggaccagttgaaacctttaactccaaatggctataagattgaaccattcaacgagttaccttactttggttgatcttttcgctatctgttaacattcacttcatagtttcatgtgctacttttgacctcattattctctagcaattcaccacgtcacacagagagacctggccgtggtcctctccaccaagatttctccatactgtgcggcatgctagcattagcaagtcatgcacccccaatggcccttccagtgagatttagtgtacgggttgaattttcagaaatcagttcaaaccatggaaccagtatgcctcagcaccctttttcttcccaaaaccggtaagcaggagctttattcatgaaatagcactacagtcatctcagagcgaactcatgcttcaaggcacgtcaatgctcatccggcactgggccacaaacaactgacagattagcttccctctgaaacaaaccgaaacaaaaacccagcacatcctctcaggtacaggcagcccgcatgcttgacagttagcctgcaaatattttagcaaaataactaaatgccctgctccgaatactcgaatagaataaaatatattatcatattgcctaacataaattaaccatatcttttctatatggaatattcaccttaatttgattttatgtgtggctatctatttagattttgttgtttcttaatattgagaagttcaaggataacttacaaaacttacaataagagtagatggggtgggaatagattgttcttgaggcacccatgaatagatatgcatggacgtagtctcttgaaaagaataatgcagtgtgcattggccaatcagactgcccccttctgtagaatatgacagatcagattgatggtacagtggcgatgaccaatgacaaaagcatcaaacagatatctctggtactacctgtagtatctatagagcaggctggcatagtgttatttgctaaaatgtttcagtggcaccatactaattatgtgtcatatattcctcacttgtgaaagctgacaaaagctgacaatatgctgactggacacgatataactaggaactggtaaaacagaaattttccttggtatgacacctactgcctagtgtctggcccaaggtaccaggtcaattttccacttgcagatttttgtctataactgccactgaattgctatttacattatggtcctgcttcaccaaaatatagcctacaaagccacctattttcactgaggaaaattgaactccgaagtaaagcatcacgatctgcagtaagaccttcccatttttcaggtgcaattttgtgggacatcatccaatgtctcgctgtaattttgtgatgcagctctgcagcgtgaccattggaagtcattatgctggtatcatcttggtttcaacacatgactcatatggatttcaagtttccaaccactatggaaatagtagtggtaaccacatagcgaagttgtgttcaagttgctcaacaagttccttaggtgttacaaggcatatggttagccttcccattcagctaatcaaaaagtcgccatcattcttcattcctggtgtacacaccagagctgatggattaagacagcatgaagttatgtaatataggaaaaagcagaaaatcatggttagcactcctaaatagagatgtaagaaaactaactgaaatcttctttatgctatgctaattcatactttggtagtttgggcacatatgaagaacttgtcaaacatgtagagatggctgccgaattaagctgtctttataagttttgctgattcttgggcctgcatatcaatagacaaccacagtaatgagaaaaacaactcaagactagcacaataacaacatttagaataggaaacaccgaaacagcaatgtaaattgcaaattgcatacaggctagtcatcttattatcataaaattctgaaattatgttttcatgtaaaatcacataggataaatcagaatttcttttattacaatggaaatctctcacttagacagccacaccacaatagtagtggcatatttacaattagacattttaatggagttttcaagtacaatgattaaaatgattaaactttctaatatgcatgagcaaagggaacaaagctaaaaaatgttatacaaagacagcttctgcatcaatttttttgcacacaaacacatgtggtacgtgtgaacaggttgcgttatcatgtcagttacacaaattgcagtaaaattcagaagcacatagtacgtgagtaagaagggctctacaacaaccaccttactccagtggtgttagtagcgtggtgtacagtacagggccacaggggtacatctgaatcctcagaactttcgctagtatgccaattacataaccatattgtataaatatactcaaacaggagtcaagagaagccaatggaagaaaaaacaaaggccatattgtcatcccactgtggcaatccaaccattgaggcatctggctatcacagccagctaaccgcatcaagccatcgaaaagatccctaatttcccatctatccgtcattctgaagcatggaaaggttcaaaggcaatgcacctaacaccatgacacatgtagccctgtatcaagtgctacccccccccccccccccccaaacccacccctttcctctccaaaaataaaatagagtaaaattcctggctctgccacttactcacaagcaagttgagatacgctgaagatgagacccaaatcaagccacacaaacccaaggaaagtataatactaataataagaagggctctactgctgcaacgaaaattgtgtggtgatcatttttgaacttcgtaattcaaaatttcaaatggtaacatttcatagggttgtaatttaaatcacatttttttctagtacggcagtctaaatgaaatatatgtgaaaaagttaaggttagatagtttacaatatagggaaaaaatgcacaacagaaccagcacttctgtgataccataacagaaggggaacatgaataattcctactggcattgacactgagttagataatctaatagatgccaaaagtactgcaacaaactttttatatctcagtttttcttttatcctctgactttccagtaaaaacaattagtacttacttttcatatcctttacaaagtcagctataagctgcagatatccattccagttgatcttcttcatgagattctgccaatggacccagctcttcatcaaacgataacttagatgatgagtggtaaccttcatccttcatgtgtttagctagccttctcagctgtgcatttatattttctgcttcaggatgctgctgttcgccaactacaaacacatgaactcggctgttaagctcaacccagctacatccaggatctttgttaactcctcgaagtctcatcaaatgcctcaccctttcaacatcattccattttctctgggaagcatagatgtttgacagcaatatatatgctgaggaatctccggtacctaactccatcaaccgttcaccagcatatgctccgacatcaaaatctcgcaaagagcgacatgctcctagtactatacgccacaaacatgttccgtggtcaatagtaatggactctatgaaatcctttgcttccttaagcatccctgctcggctaagaatatcaaccatgcaagcatagtgatccagcctaggagttaaaccataatcttttgtcattaaactaaaatattcccatcctctgtcaactagacccatatgactgcaagcacacaatatattaatgaatgttatattatcaggtatagtgccctccatcttcatttcttcaaaaagatccagtgcaccattgccacacccattttgtgaaaaaccagaaatgattgagttccatgcaataacatccctatcaggaatccttctgaagacagacatgccatcttcaaggttcccacactttgaatacatcgtagacaaggcacttccaacaggggcccccaaacctaacccatatttcacgatttgcgtgtgcaattgtttccctggttccagtgctgcaatgccagcacatgctctcagaccactagctatagtcgatttactggggatgataccttccttgtccatcctggcatacaatgtcagggcttcctcgtgctccccattctgcacatgcccagaaaccatcgctgtccaaaggacaatgtcaacctcgtacaactgatcaaacccttcttttgcgtcagcaatacaaccacattttgcatacatgtccaccagtgcactcttcacatatatctgaacctcaaacccaagcttcaccatcaaaccgtgggcttgcttccctactgccaatgctcccaaatcactacttgcattgagaaccccaacaaaagtgaactctgttggtgtgaacccagcagcatgcatctgtgagaacatactaactgcactgtctgcctcaccattttgtgcatacccagtaatcatcgccgaccaagtgatcgaattcctctccctcgatgactcaaacacatgaaacgcagcacccatacacccagccttcgcatacatcgtgacaagcgagttttccacagatacaaaatccagcaacccatccttcacaatcagtccatgcatctgctcccccatcagcaaacccaatggcacactaactgcgctgagaactgctgtggcaacaaactcgcttttctcagaagggcactcttcgagcattagtcggaagagatcgaatgcctcctcggagcatttctctgcagcataacctgccaccatggtggaccaggaaaatgagttgcgctgaggcattccgtcgaacactctgcgagcatcagaaacaatgcccagcttacagtacatgttgagcaggctggtgcacacgtacacattggatacggcagaggggatcttgcaagcgagagcgtgggccgcggtgccggcgggcgcggaggccgcacgggcggcggcggtgaaggcggcagcgaaggaatggggcgacggaaggacggtggaggaggagagcatggagcggaagcgggagagcgcgtcgagcgggcggtggccggagagcgggttgaggagggagttccaggaggtgacgtcgcgggcggcgggagggatatcgtcgaacaccgcgaaggcggcggcgaggaggggccgggggagcgaggagtagaagttgatgagggagttggcgacgggcgcgtgggaggcggcgccggacttgagcgcccaggcgtggagggcctcgccgtggcgagggcaggaggcgcgccggcggaggagctcgatgaactgcgtgtgcgacattcgccgcgccgacgagggcgccgcggctgccatgctggacgcggcggaagaaaattacgcagttttttgttttttatcgactcgcaacagacaatgctacatattgacagagcattaaaaaaattacaatattacaaccttgtaagctcgtaatcagaaaaaaaaaataatctccacctacacactgacagctccaatacatagacccaggagaaagctagtatcagaccgaccgccgctagaccaacaaaagactatagtcgggatcgtccaaaactaacacagaactgtactctatttacaactttaggattaagggaaagagtgtaaaaaagaagataaaaccgttctccctctagaccattcgacatggtcaacttataagttagggcgtcatatacttggccaaacgggcggcacggcccgttaaggcacggctcctgtaacaggccgtgccgtgctcgtgccggcccacatgctaaggcctcggcctaagcacggctcaggaagaccacgggcacggcacgagcccaaatataacacacgggccggtgtaggcccattagcacgtttggcccacaaaatttgaatatgagaccgaaaactaaataaaaaatgtgaaaaaaaaatatgaaaaaggaaaattaaagggaaaaaaggaaaatatgtgaaaatattagaaaaatgacgaaaagtagtgggaaatagaaaataatatatggaaaaattgggagaaaatgagaaaaaatcggagaaaatagacaaaatatatgaaaaaaatagggaaaattttggtgggccaacgggtcgtgctcgtacttgagctgtgccggcccatgggcttagacatcagccaagcacggcacggcccacgagcgggtgtgccgtgtcgtgcctgggctggctacagtggtgtcgtgcctagatcggctgcagtggtgccgtgctcgggtcggcacgccttggcccggcccatttggccagcactatagcaccgacacaagaggaccggaatttacagctagcttgctccagttgtctaggaagtttcggcgaggggttacctagacgacgtctccagagagtggatcaacagaagcatcgccgccgccgtccatcgcggtctcaaatgagaaccgagactgggtttcacctggcagacgtcatagggatgttgggacgacacgacaactccctcaagagggaatccgacgctcgaaaacgcctccgttgccagcccagccaagatcgggctaagttttcacccatagtagtaaagaaaatttatctatttgaactttcaaattttaatatgaaatattatgggaaatgtaaatcgaaagtgcagtttcgtcttacggcacgacgcccgctaaaatcgtccgatgaaagtatcacatacgcgggtacgtagtactaaatttatctccacgtttttgatcttagagtcaaatgtgagttttcgtaactatgtagtactagtatatttaaaatttttggtgacttatatatttcaaaccatatattattttttaaggtctgttctactcaaaatatatgataaaatgagtaaactattgaaatatttaaaaataatttagtcaaatggtagaaataactaagctctatagtggaagtaactttttataacattagaagtaattacatatatgtgttaaaagaaatatcttcataggtaaagtgtagattcacaagttgtcgacgtttgagatcgtgactacggtatttgcatagtatggggattgttgataccaaggtatatgtgagattgaggtaaaagagatggagacatggattttatacaggttcaggccccttatttgacaggtaatagccctactcttattggccgaaaccggtgttgctccttactcatatggatcacacaagtacataattcgggataacctatctagttgtcgtcgacttggcggcatggataaccaactcgtagtcaacgacagggtaattttcctcctcgaatatgaactcatcgagatcagagatggtgctagatcctttttggcggcctccgtaggcaccagatgaggtatgtctaggctaatctctgatgttgagatctggcgatgtgtgttggcttgtgtatatattgtgtcttgttgatcttgtggcttgtcccctatccttctagggggtcttgtatttatactcatagatgtccctttgtccaagtagaattagggagaccaatatggatacaatccacgtagtccttgtcatttctatatagaactctatttgtctttccttatccggaactccttctatatacgaggtatgattccgtataagacatggtatgtgatgggccatgccgagtttagtcaactattattaggtatgtagcatccataaccatgacacaagtaaatacatgacttttttatccaaggtaaaccatatgtgtatacatatatatagattattgttttcgataaaagtaatttattttatataggaagtaactctttagaaaatagaagtaactattcatagtattaaaagtaattcttcataatattaaaagttggtacactcctagaggaaattaactggaaaacagaactaaccttttatggtgttagaaataactaaactgctagatagaagcaactcttcgtggtattaaaagtaactatataacaatgttatagggaagtaagtcttcataacagcactgctacaaaagtaaataacctaaatatattcaatattgaacactttttcatatattttcagtagagtatgatggtttgattggatattgaaaacaataaacgatttaaaacaggggcgacggagccaactgaaccgccgcatcgacggcgacagcagtggcagggtcacgtgtgaggaaggagattgcggtggcagggtgaggcacgctgcggtgggatgatggcaaggatggcctgcgccacaacgtgtcaacgtgttgagaaaggagacggcaatgaggcagccgccaccagcagtgccacaaactcaccggagtcgctgactcggggctatggaggggtgtggatgaaaacggagggaggaagatgtttcacggaatatgggacccactattattattattactcccttcattccaaaatatggtgcacaaccacccttaatccaaaaactcagaaataattaatatcacatcattgttatgaatcattccaactaatacaatgcatgcaaccaatagaattaaagatattgtgagtgtaggatttaaaataataataatttaggggagagaatgtgataattaattacatgcatgcatgcacacctcatattatgaaacaactttataaagtaattgtgccttatattttgaaacggggggagtattatttctatctagaatgccacctaagcgccacgtagaataaaaccatctagaaaaactccttaggaatcaatttgcattggttttgtaagatggaggaggcattatacccggtttacggttgagggatgcaattcaatcgagagcaagagattaaggaggcaaaatagatttattctgaataggagagctgataaccatcctaccctcattgattttcttcgttttttgaatttttttttttgcattctcgaggagatttgcacgtgtttggctgtttcgcaaaaagctccgcacgtttgcacgtaatatctcatatgtcacgcttgacgccccgttgtaatttatctggaaactccttgtcttttagagaaatacaatgcgaagaagataaaattccgcttatagggatagcactgtaaacatgaaaaacaaaggggcttttccgaaaaaaaaccaccatctccaatctccccccgtgcactgccgcctcccccgcgcgtcatcaccgtctcctcgcacttgtgcacactcacacgggcgccgcgcgcgtggcacccgtcagagtcgtcatcggtgccctctcccttctttttctccctccccttgtggtagtggtggcgccacggcgggggtagtgcggatgtggcgcccgttagagctgaagccgtgtcctccttgtggcaacgacggcggcgaggggacctgcggtagtggggaagcgcggactcctactaacagtttgtagtaggtgggtcagcgcctctgttggtcttagagtgataatccaattaccggccatataacttcctaagcatcttgccaaacactggagaagtatttcttcaagtatttcccattaattgctctctaaaatcattctccttgcaatgtacatgtggacttggaaataagctttacagtctgcccatttttattataccaaaagcggtagctcccctattcataataggctgacattaatgtggtcagacggtcagacctatcaactatcatgccaaacttcaaaattcttgtacaccgttgtaggctaagcaactcaggctgtgtttaattccacgctaaaattggaagtttgactaaaactggaagtttgaagaaaaaacttctatgtgtgtaggaaagttttgatgtgatgaaaaagttaaaaatttaaagaaaaatttgagaactaaactcggcctcagcatcactagtaagctttacagtctacccatttttattataccaaaagctagcttcctggtagctcccccattcataactaggtgataccccacgctttgctgcgggattcacggatgagtatatgttaaatattgtcgaaatgatgaaagttgaaatattgagaaaataatgtgaggaagatgatttgacacatactggttgatctctataatataatattgtagatgatatgccatgtttgcatgggatttaaaataggttagaaaagcaattgctagtgagtgaagatgtggcatgcttgtataggattttaaatgggctagaatagcaattgctagtgggtgatgatgtggcatgcttgtatgttgagctttagctttagtgggtaccaactatgtagaaagtatagacagataggctgacatgtcgcactccatctcaatgacagagtattcttctgagtcaacatctaacccaactatagaacctctcttgtactcctttgtaacatcaagtaaggtcacatatcatgtgactttaatctctatcttacgtaaggtgttctgatccaacctgagaattttgagacaagacatgcaatgattggctggacagagacgactgccaccgatggtggcgacggggacgtccggcggaggagggagaggagatgggcacggcgaggccacactactacagaaagcgtttttgcatacgggcggaatcgatcttcacatgcggttggccggcccgcatgcgcgaaatggtctgcaaagatcaccatttgtgcatgcagccggcccagccgcatgcgaagatcgatcttcgcatgcggtcacttaagacggccgcatgcgaaaatagatctttatggtccatttaagaagccgcatgcgaagatatattttcccatgcggtcgacttaacaagaccgcatgcgaagatctattttcgcatgcggccgtcttaagtagaccgtatgcgaaattcaatttccgaatagctcaaataatatttattctagccttttagtgaggtgtgtctcgtaattaatattaaattattgagggatttattatcatatttcggaatagtaagacaagtgccgcagtaacaaacatgtaatacataaccataaattcaatcgtaatttacatacgaaatatataatacaggtgccacagttttttcatcatatgtataagtagtgtacatgtcattgcatatgttctttctcccactctctgagaggtttaaatttgttgtccattgcgagttcactctggttgtcatagaagagacctcttgtattgcagacatcgcgcggatgaatcggtagaggtcagcggccacgttcaagatcgtagtgtcgttgaatcgttgtgcaatatatgggatttcggggatctacgcacagaaaggaaaataaaatggtactcaatgagaagtgtgtgctagatgggtttctgtgtagagaagagttcgtttacttactcggttaccgattgttttgtacctcccatttactctgagcatctcacacacgtaataaccgcacaagttggttcctggtggttgtttgtagcactgcgatataattatgggggaccgatctcagtagatataatttagtatatatgtattgttcgataattagttgtattggtatagatttgatagtaccggctagctagtcctgacggataacttcttctgggatggaatatgtactggtccacctcttttgcagtagtacttgtgtgctctgtttgaagaaaacaattgttttatcagtagttagaagactggcgatcgacctaaacaatttatattaatgaaatgtttatcacttacaaattcaaaatagtgaggaattccataaatgtctccttgtcatagtgtgcggggtccaatgatatgatcaattggtctttctgatatacaaggaataatatgtagttgtctctgcatataagataggcttattggagacagaaaattccgaagaagataaattaattaaacaaaaagaagagaaagcttacgtgaacgcgtagggggccattaagaaatctttgtcggtgtgcgccaacattgctattgccaagtatgttgctacttctagcttcttcctcttgtgcaatgtcttcacatattcttccttttcttcaggggtcttgccaaccaattgctcgcagtcctctctcagctctacggtgtgttgtgttttgcatattcttgttggatcgacgtatccaacctttgctccagttctatcagcttcgtggaattgcatactgtacaatgaacaaagaagaaatgggatttggtttatttgtttggaatgatacgtgtaacatgtaataaagagttcagacttacagacagaacgccgcaacgagattaacgtccattttatctagcttgtagagggcgtaaaggtctcggaaagagataaaaaatatcccattaggaccactcatgaaagcgccttccgggatggcgacgcttatgaaactgagacctttcctagatgccttcatataccattcgtgcattaccctcatttcccatggtagcttgttcataagataagttggcaagaatggctttgccatactcataagtgtcaagcacatcagcagataaccaggattgcacttcatcttgggctgctaatactgacttctaggagtctgacaagatgtgagcaagttcttttctcttctcagaattcctgaaagctgaaaacatgaacttctccttatccttttcaatctcctttgggtcgtatgtggatatcaactttggaattatacgacgaggttccaaaggattagacttcggttcggatgtggtaccttctggtatgtgcacttgttctaccagagcagattggggtgtaggtggagaggcttgaactgagggcggagccgggggagcatgctgtttagctagggaggtgggagaggcttgaactggttgcggggccgggagagcaggctattgataaggggagggtagtggtttaggttggtgaggcggtgacctaagcagtggtggtgacgccggatgtcgaggtgacggtggttcaggaggcgacggtggtgcaggagcggcagctgtccttgcctgcgatgaggatggagttgaagatcctgctgctggaacggccgcggttaggattatgtctctgcggtgccacaagataaactgattcactgcatcaccgagaagttcaatcccctcaggtgcaggtatgtctagttccaaggaaacgtggtcgctatggaccttggcgacctatacccttgcgtaatcctcagggaatgccgtgttgtggaattgacgtccgggtatcgctaaacccattgcaacctccttagtctttccagcgcggccgattggtacgacgagactgcagggagttggtccagttatactatccacagggaagggagttgtctgcactgagcctacactgctgggtacattagttgtttgctgtgcagattgtgtgggttgttggccattagggaataaccttggaaaggctgtcgggttttcagctgccaacgagtagaagtgttccttcacttgcgcatagattttgtctgatagttgttctttgtatttgtctctcttcttataacttggtgcgtcttatggaaaccctatcttccaactcatctttgaggacaaaccacttacacgtccagagtgttcggcggtccccaacgccgcagtaaagctggtctcgctccctccgtgggacgaactgtcctgatctttctttctcgactatctgctgcaaattagtagtcacttcttctatgtctggagtctcgaatagtatgtctccctcatccgagactttacctgtgctgcgcacccaaacccagttcttgctacgttccaccatggggtctaccagcaggggtttgccggccgcggaaaatctttgctcgatctcccaccattgatcgacgtgaccagcgtatccgctcgaccccaatctatggggatatctgttcttcttcgcgagctcagacatttttttcctcaaagccaatgcttcagctattatatgatccgcaacaaacgtatcccagtcagcctgtgatatatgtccataatccgtgaacggtgggagattcttctgaacataatcccgatttagatcggacttccactgtcgccatcgatctcccatctttttaagtgtgtaatctctccccctgacctgtgatccaggagggaacacaaaatacttctgcaactcattccagagaagtgtcttgatgttgtcgtccaccgtttcccacaacttgacattaatgggacaacgcgtcctgactagagtaccacaggcgttgctaaacttggaccgcactatcggtggctcaacgggcttcccatcctgatcgagagcaatcacgttgtatgtttccttgggtaatttattcttgcttctctcaccacgtctttttttcccactcccgcctgcacttgtagatgtctccgtatgttcaggtgcagacgtagcggtgtccatctcaacttcttcctctctcctgttccgagcggctttacgtttcgagcggcgtcggactaccatctgcagaaaataggtaactctctacaccattagattcatgtcacatcatagttaggaaataatacatggctaacgattttcagcacttacggcctgttccataggtatgtagtccggatcatcatcgcgaggggcgacttgtgttatttccattggaaacgggtcacttggtgtgcaccacgtttcttcactagaagcgtcaggctgcttgttgctaccggatttttgaggagcgttaccttcttgaggcgctattggtgcgttcgatggaaccttatcgttcgacatcttccaacttgacgtaaaaaaatttgacataagtcccaatttaacataattttacataagtcccaattacgtaagtcccaatttaacataagtcccaatttaacataagtcccaattaaacataaatctcaatttaacataagtcccaatttgacataaattccaatttaacataagtctcaatttaacataagtcccaatttaacatcagtcccaattgaacataaatctctatttaacataagtctcaatttaacataagtcacaatttaacataggtcccaatttaacatcagtcccaattaaacataaatctcaatttaacataagtcccaatttaataatccacaattaaacattctcaaaattaaacaatccacaatccacaattgcacatttcacaatccacgatcaacaattaaacaatccacaatccacaattgcacatttcacatttctttttttaagggaaatgttaccgggggactttggaccggaggagccggcgcggcggcggcggggaggtattgccggcggtggcggggaggacttggcggcgacgacacgcgaggggggagagatcctggcggcggcgacgacggcgacggcgagaggggcgacttcggggaggagccggcggtggcggggacgacttggcggcggcgacgcggcgaggggggagaggtcctggcggcggcgacggtgacggcgagggggaccacttcggggaggagccggcggtgacggggaggacttggcggcggcgacgacgagggggctggggacttagaaaattttggcagcctagcggctagggttcgcgggcgccgggacttagaaaattttggctccccgcgctccctatatataggggcagatcatcgcatgcggtcggcttaagcggccgcatggaaaaatgatctttccatgcgggcgacttaagccggccgcatgcgaaactgatctttccatgcgggccattaagccagccgtatggaaagatcatttttccgtgcgggccgttaagccggctacatgcgaaaaagatatttccatgcggctggcttaactcgcccgcatggaaagatctttttaccaaataaactcatattttttctttcgtctaaataaactgtacatatatatttttttccaatatttcggtacaacaaaaattccaaatatttttggcagtaagaaaactcatgaaaatcactcaaaactcgtaaccaaatgttacatgctaatgagtacaacataagggggacttaaattcatgcacgtacatttggaacacaatgacaactaaaggttacaaaataactatgactaaataaccttggcaacaccatctgctcgaacgtacgacatattcgctttatcgattgtactctcaaccttcttaattcgcataggaagatcagtaaacaatgttacatcgtcgaactggttgtaatcattggggtcttcgatgttgtcgatgccgacgatctgttgctttccagatatgacaatagtttttctttcatccgaagggtccttcacataaaacacttgagccacacgctctgctaaaacccatggatcatccttgtggcctgttttactgtgatcgactatggttaccccgtagtcatcaacggaaacccctgttgtgtctttaacccattcacaacggagcactgggatttggatattcaggccatagtccagttcccatatttcctgtatggtcccataatacgacttattttcaccactcgtgtcaatcgtttcgacacagattccactgttttgtgcggtgcttttcatgtccttcgtagtcgtactcaaggtaaatccattgatgtcgtaaccttaccatgaattgacaatacttgaaggcccacatgccagtctttgtaaagtaagttcctccacagaatcaccaactggcaggtttagatctttgaaccacagaggaaagtgatgcttgtgctctcttgatacccaatcattggaccgccctaggaagcaggctttgatttcttctaggtgtcgctcaatgaatggctcaacgatagcgagctgttaaagaacattgttgtgtgccgcggacacctttttgtaatcattatcgaagaactgcttcctaccaacaataccccttccagacaatctcccttcatgtcgatgaacaggaatcccaatggcattagcatcctttatgtagtccatacaacactcgactgcctcttcagttgtgtatccctctatcattgatccttcggggtgagcacgattgcgtacatagcctttgaggatcgacatgtaacgctcataggcccacatctgatgtaagtataaggaaccaagttcaataatatgagggacgatgtgaacgatcaaatgctccatcatatctaaatatgatggtcggaaatacatctcaagctggcatacggtctcgacggcaaatgtctgaaggggacctaattctagaggatcaaataccttctgcgaaattcgattgaaaaagtagcacaactttgttataaccaccttggtatggactggtttgactgcccttatagcaattggtaggaataccgttaacaacctatggcagtcatgtgcattgtatcccagaaatggtcaaatccttcactgatactagcttcctgatgttcgatgcgaaaccagtaggcactctaaccccttgtaaacatttacagaaggtttttttctcttcaagtgtcaacgagtaacaagcaggaggaatctcggtcttcccatttggcagcactactgggtgaaggtcatgccgtatggccaaatctacaaggtcgttacgtgacttcaatccatccttcgtcttactcgggatgtccagcaatgtgccaatggtgctatcaaacacgttcttctcgaggtgcatagcatgaattgcatgtcgaatctctaggtccttccagtaatctaagtatttgaagaaaattgagtgcttcttgaaaggcgacgcagtatctttgtcaccatcagctttcttcctctttactgtcttcttctttccctttccatatacaaccttaatcttctttgttatctcatacacgtatgtaccacctcgtgctgctggggcagtgtcattctccactgtattatcgaacaatctagccatcttacgatacatgtgtctttgtggtaggaattgtcgatgccgcatgtacactatcttcaaagacgacatcaggtatttgtacgaagttttctccaaacatatcagacatctagtcttccctttaatctgcccagataatgaaaagtttgcatgtaggtcattaatggtaacgaatatgatcgcacgtagattgaagtgctcccgcttaaactcatcccatagtcgtaacccctctttccaaagctcctccatgtcctccatcaaaggctcaaggaaaacatctatgttgattccaggttggtttgaaccttgtatgaggatagtgagaagaatgtactttcgtttctgacatatccatgttgaaagattatacattgtgagaaggactggccatgtgttttgcgagctgcttaagtcaccaaacgggttcattccgtcagtgctcaacgcaaaccttacattcctgggatccttagcaaattctgggtgttttgcatcaaatgtcttccactggcgagcgtcggcgggatatcgaatcataccatctatcttccggctctcttgatgccatctcatcaactcagcatcagtcgggtttgagtacagacgcttcaggcggtccttaattggtaggtaccacatcaccattgagggaatctttccgcgcttactcttatcagaatctggatcggtacactctgaatctatgggcccattccctgttttataccgacttgtgccacacgttgggcaactttccaagtccgcatattctttacggtataatatgcagtgatttttacaagcatgaatcttttctacaccaagagataaaggacatatgagtttcttcgcttgatacgtgtttgatggtacaaagttaggcttaggaagcaacacacgcaacaaactcatcagatcattaaaacttgtgtccgaccatccatgtttagccttcaatcttagaagttcaagcactgaacgcaagattgtgaaatccttatcacatcctttcgtttcgtcgtaaagaagatccttcgatgccttctctaatgcctgccaattctccaatcctcgtgacctacccgctagcacctctggttcaacatggcttagcatatcctctaaatcaaaaccaccctcaaaatcatcactatcggtggaaacatcgacatccattctttcactggacatgtcttcgattataaaattctctgcctcattcatctcgaaacataactcttcatcgtcatcttcgggatcggcgaattccccgtgaaaggtctaaaccttgtagttggcggtgaatccgtactccattatgtgacccaatatttcactaggatctaccaacaatttctaattcttgcaatgacggcacggacaaaagatctttgtcatattctccctcaaagcatgtgccttagcctgatcaataaatttagatgcttcctcaataaatatcggctatgttctccgcatctcatacatccatgacgaccgatccatctatttatataaagacaaaaaagttacagataaaaaaatagaccacaggtatttcatataaaagtttaaatgcatttgtccctccaaaaaaattacaacaatacatgtaactagtatgtacaagtgattacatgcaaaatttgcccatcaaaacatatattttgaagctagattttgcaaaaactagctagaacaaaccttgtcaaaatattaaaaaaactccactttccaccaacgaaatataacagaaatggagccaaatgaaggagagagagttattcacctttcgtatagagttcaagcaaaaatttcgagttgaaaacctcccccctaattggtgcttgctttaggagagagagagagcttcgttttcaaatggtcgagcttgggcctggaggagcatatatggccgatcatcgcatgcggtcccttaagccagccgcatgcgaagatccattaccgcatgcgataatgggcctattttcacatgcggccgtcttaagcagccgcatgccctaatacatgcggccccttaagacggccgcatgcgaaaatagacctattatcgcatgcggctgtcttaagcagccgcatgcgataatggatcttcgcatgcggctcatcgacctgcccctaggggggccgtttttgcaggcgccgccacaagcggcccacatggaacctaccaacccatggtacagaaaaacgattttttagtagtgccagccgccaccgccacgcgcgacagggatggcaagaacaatcagggcgagggaggtcatcgccaccaaggacggacgacaagatgatttttggttcgatcattttgtcaggagatcaaaacaaatcccgtaatcagagatgggcaagatggtccattcgctcagccattgcacactccatcacagtgaaagaaaacggaaaacgggagagagcgacggaaacctctaaacaggaacagaggaaagatttgggtgccatctatctattattatatactaaaattccactaaactttttacaaacgctcttaagatgtcacgtggcgctctaataaattagagaaaatcctagaaattctaagaaaaaagcaaaacatctacccctttattttcacttaaattggtgggtccaatattatacaccgttagataaaaatgatcttaaaataaaccaaatactataggcccaacctctcctcttttttttctttgaccagggtcccacctctcctctttatgcgtgcataggtaggtcacgtacatacatgggtatgtagtacgtacgcctccctcccttttgtttccttttttttcttattttttctatttatacaattgatatatattttttaataatcataattttacaaacaaagaatataccatcatataactctttataaacacacgtaaataaattagctctataatctttgaaaataaaatttacaacatattatatgtttacctagtaaatcaataagatagtttccacttaaatcggtgtactcattactttgtactattattttcaaataatgcactattttaaaataaaatttacataattatattgtgtacctattaaataaactatttaagatctatattaactaatatatagatgcacttaaacagataaatccattatttaaatcattggatctatttttttaattactttggactattattctcaaataataaattgttttaaaataaaatctacaccattatattgtgtacccattaaattaacaatttaaaatatatattaactaatttacatttacactagaaccagtggacccattatttaaatcatcggatctattgttaataactaaagtgtctaaagttctctttttggcccgctgcataatgcacgtctacacctttgcctttcggacgtgtgacagaatgtcatgtctgaggcatctcaggtgatcacgaccattgtagtgctaccgattttgttaataacatgaaaagaaaattaaaggtgtgatgccgtgagagaagaattaagcaccgtgggaacacttagctctgtttaagccaaaatcgagagttgattgcataataattataatgtattgtgttttgatgtattcagattttgtattatttgttcgtacaattgaatgaaatcattatattataaatgtgagcacaatattaacgaatatcaatagaactcttactaggataaaagtgttataagggagtttaaggccctatattttccttgattccatcttttgggttttcgtttgcatgctccacgctttccaagttcctaaatggtgcttttcttaaataactttttaactttttagaagttaatttatttgtttataatctcaaatagctatcacataaatcagataattcatcaatttcagttgtcctaaactctaaaccctaagtagtacatatttttttcatgcgagtcatggtgatcagtaaattggttatcaacgcataatcaaagtcgtaagatgaacatataagagctaatgtaaacaattgtaaataggtgtcaaaattaattgctattaattagacatctaatggcttgctagcaacatatttaatttctctctacatgtatataaacatggacaaagctaaatgaatattaacatatatcccatacatatatattatatggttaatattctaattacatgtggtaagtccattaaaatttcttaaaataccataagctgtcacgtggtgctcaaataaattagagaaaatattagaaattctaagaaaaaaaacaaagtatgattttcacttaaatcgatcggtccaatattataaaccattggattaaattgatcttagaacaaactaaatactacgaggtcccacatctccaccttcggtacacacctacatacgtaggtacctactcttccccctccctttttccatttttccctttcttctttttctccatgaatacgcttccctctctttcttactgtatcatgcaccttttttagatgatttaatcacaaaaattttaagtatcttgctctcacatttttcatttgttatttactcaagaactacaagcaatagtttattatttactcgagaaaaaaatatgattcaaaagtcgtaagtacttaatccatctcctactcaaaagtttgtgaatggatttttaagataccttaagaaaaatagaacccttaaattattacaaaataacaatatccgaactttagtttgcccttaatctataagataaaacttttgaacaaacagtaaaaatcttacttttcaataatacaagtgcccgtgcatacgcgcgggccaccttcctagttaaagtaaacggtgaactttcggtgctataaatctaaaaacgtaaacttttgatgctatataatcaattttgccttaaataagatgtctccatataataaacgttcataataaaaaaaataaaacaacattaaataacatactcacgcatatacgcgggctaccttctttgttaactaaacagcggctacaaagtctgagatcgctaggcatcagcaagagcacagagagagtgagaagaacataattgttcatactggcagttgagcttgagagacaataagaaacagtacattcgagagtcacccctgctttgctactttgccttatagccccatttattcgtcgtattccagcaaaatagttgtcctttgttcctacaaatccaagaagtaaatagatggtcaaggaacacgtagcaatcatgcaggaactaggcatggaagaacagcatagccaggagacttaccaaaagtcataagacagcaagcaaaaagatggtggatgaggctgtacggagccagtctgtagccttcctcgattctaccctcagcagctgtcgacagggtgccacttctaacatggtattgtgcaaggaatttcccgtggtgcctgtagatgagagagccatctgcaatgccaggaacagccttcgaggagacacacaggctcctttcatccatgaaaatggtgtagtccccaaatcttgttaacgggatgaaccttcccaagataatgtcagcaagtctgtaaaccacggcctgcgagtacgagcgatcagtgtgaccgatcagcaagacctctgattcacagttcaccagataagcgaacccaaacagcttttctactggacatgtagcaaacaattttggttctggtagggaaaaagacgaagcagagccattcgcctccacccggggtgggtctatcacgaaaattctgtttggagagaagtttacccatattgatgctgcataaatcttgccctggaatgccatgtatttccatgagaggttggtctgccaatttgacaaggtccattgctgatccgcagaggtggcaaaggcaacgcgctgtactctggtaacaacgaacatgatagtgatgactccgtcagggccgaagctaagagcagcgcaaatacgattgaaatatgagaatatgcccatctcttttcgctccatggctctcatataagccaactcagtgctggtgaagaagggctcaacctgcggccgtagggtctccagggatgataactcaacaatgtcaccggtgaaagggtggaggatacggatagcactgtcccgatcccgctgcaagaggaggaggccatcgaccgagtcgatgacgaagtgatccgggaagaacgggaggaggagacgcgcgaaggcgcccgtggagacgttgaagaagcgaaccctcccgtggagcttgcggtggccagggaagaggccatggctctcggggaacaagatccaccggcgcggatggaagcgcgggtccacgacgctgcggccgcgcgggctgacggtgctggaccgccaatggcggcaaacagcgcggagccggaggtaatccgccacgtcgccagccagcgcgtgctcggcgacaaggcggatgatatctccatccagtgacgcccagggagactccatccagggcgcggcaccatttggggcaacggcgccgaccgtgcggccgcgcttgcacttgcgagggattttgcgccgcggcggcgacagagcgcgcttctcgcatcgcgccggcgacatccgtgattcccaaaatacagatatggacagtcaaccacacacgatgatactagcaaatactccaaatctcgcgtaaattaaagaagagaattttctgctgcagaatcggaaaacgaggccgaagcgtaagctgatttgacttaggctgtgatcgagcaacacggaggacgctgccgattagagcacgccaacgtactgtcattccggaagattagtattgtcatttgccagcatttagtgacggtcacagtcacgcaatagcaattgcagcgttttgagctttgagagttttatgaccacacatgaagattaacagttagtaaattggagcaaaattcacctacaagcagtagctatctagcttgcatataccttggcttcacagtgtattacactccagcctttgatggttgcacgcttttgctgttcttcaattctttctcagcgatggttgattcataaaccttgtccaagttggagtctttaaccaagaaaggccttataaatttggccacgaagtcttcctctactatggtggcgacgttgatgaaatccctgccgcgccacagccgccaagcctgcaccctgcagcacgctgaccacccggaaccgcgcgcggcacgagcctcccgtccaggtattaactgagcatcaccgggaagttggcgacgcgctcggcgtccatcccgacctccttggtcaggaactcccagttcttcctcagccgctccacggacagcatcagcaccgtcggtatcttggctgccgccgtcttcacctgcgcctccgtccacccgagctctgctcgtccctgaagaaggccgccttccaggcgagatgctccggtttcaagaggaacgctgcgacaatgacgtccttgaatggtcgcatcctgcgcggcaccccgaactcgtcggcgatcactaggacagccttggctacatctggtgctgccacgagcagcttggaggcgtaggagacgcagaaccagccgatgtcgtcgttggtgaggcctcccagtcgacgcagccgcggaggtacccgagccagaactggacattaacgaggagcgtcggtgagcggaagaaggcggcgctacagcgcgccacgatgaggtccatctgtaatgtggtgaagccgagcacggctgcgcagggcttgagtatcttggggacgctcggggtttgcattttttatttcagccaaaatttcggtgatttcggtaggatgaaatttacaaaaatttcatgattttcggcactttttagatcagaaattattaaaattataacatattttgactggatttgaataaactttgaccgaattcaacaaacatttgataaagtccgaaaattttaattgatatattgattttgctggaggggtccgaaattagagaaatttcgaactgaaactgcaatcactggcgacactgcaggtgagaatcttggggtcgcgagccacggtgatggcgatgaggggcggagagagcccgagctcttcggcgaggaatgcaagcacggcgtcgggcctggaaggtgacctgatggtggagagctccggtgtgacacgacacattgaggtagaggttgcacctgttcacgaggtagtcttccacggagaatgaggacgaggctgtggtgttgtccgaggatgtggatgcggcgacggtggcgtaagaagatgccgatgaggtgtgggggaggacgagggttgagagggacggcgggaccacagggccagggaggaggagcatagcggcggcggcggacgccagtgaatgggatagatggctggcaagcgatctgaggctgacactacttaaaaaatgattttcctggatatggacccatttagatttcagacggaccataacggtgttcccgtctgggaaaataagctcatttacacgtgcagtccatttaagagaaccgcacggaaaaatcgattttttccatgtggtcctcttaatggactgcacgcgtgatgagcttataaacccggg

SEQ ID NO: 4716 - DNA, 8903 bp, Oryza sativa
gtactacccccatcccatatatttgaaatttttcagaaatatccacccaaagtgctccagcaaacacagccagggaaaaaaaaaagagagaactttgttccgcaaatcaataggcacattatgaactcctaacagggtaaccaagttctcttaagtagactttgaacggatgaaatcaagaatcgtatcatgaactcagcaggatttcacctcaccaaacttgacgttatacctttggttcgatcgaaaatgtattgatcacccataaaggagcaggaaagatgatgtgagcgaattgaagagggagattgatcacccatagaggagcaggaaagatgatgtgagtgaattgcaacgcacgggtgtggagattatgggtaccccatacccacacggcatggttatccgactagttataggaaataacttttatctatgtaatatgtaacagatcatgacttgggtattacgtttccttgtatattacggaacggcctaaagttctggtttgataatattgtaaagtagatttaggaaaccgataccgtattggttaaggtttctatcttgtaatcctgccccccatcctatataaggtgggcaggaggccctctagggggcatataagacaactagatcgtcagatctatatacactcggcggattcaaatccccaaacaggtgtagggtattacctctcattgagagggcctgaatctgtctaaatcctttgtctcggcatccatccacttttaggtctcgtgcgctaccccttttattattgccgaatttatgtttcaacagttggcgcgccaggtagttgtacgccgagtttcctattgaggagtgcgatggaatcaattttatgagtcgccagcttcgcctttgcctcaggagctttgacttcctcgccatcgacaacttcaacaagcctcgctctttgactttgattcaaatcagtcggggaagatctaatctagctaaggaggataacaaccactctaccacggcgagtttaagattcgatctactatggccgccgccagcgtcaccttcgtcagcacgctttttcgcttcagagagaaactttatcgtcaggagaataaccggatactactgttaacaggatcgtcgatagcatgggccgcgtgccttggacgatacacggcatgctacaaagtttgcagtcctgatcttgcaacatatgtggtgtacggttggctacgcacgcgcatcatggtctggctgactacttcgatcgccaaacagtccggccagcatctttcctcgatctcacagcgacataatcaggggcttcgtagcagctctcttattacatgcatctactcatcatcaccatgtattgcatggctgcctgctacaagccaaccaatcaagattccttaatctacaggctgctaccaacaatcgtaggcttgatctactggagcaaatacagatgcatgcttgcacgttcttttatctcctaatcagatatgatttgtatttacatgtccgactatgcgacagccatataacaggcacgttgtttccgatatcactgacacgatcttcatggacatggacttcatcgctgactggtttgttcgtcctcatggccagcctactacgctgctactgatagcaacatcatcttcaccgactggctcgcctccgtcgccgctgccgactggtttctccgcctacacggctggcctattatgccgccgttgttgggcgtttacgacttcaccaccggcctgccttcgtcgccgccgactggtgtcctcgtctatacggttggttggtcacaccaccgttcatgcgtgtccacgtcttcaccgaccggcctgcctccgtcgccgccgactggtgttctcgcctatacggttggttggtcacaccaccgttcatagctgtccacgtcttcaccgaccggcttgcctttgccgtcgccgactggtgtctctgcctacacggctagcctattatgccgccgttagtgggcatcttcgctttcaccgtcgaccgccttcgtcgccgccgactagtgtcttcattgttattgatggacgactttgttcccacattggccacctctgccatcaccaggggaatattacaaagctaagtcatcattaattttttttatatgatatttttttcctctgcctcactacatcaactggttcgccgttgactaatgagtcgggggctacagatgttatatcgtattttttaaacaattttcataatatttatcttgattgcttgcgacataatctgagtacaaaagtacctatcgagttatggagttctatcttcctatgctttccgtttggtttgtcgatggatagttgcctttgggccgattcctagcacccgggggctcgttggatggactgagtaacgcaaggttctaagtattattcagaataaatcaaaagcatagagataagataaatttattttctgctctttacaattgcaaaagtacccgagtagtaaattatgattcgtgaaactttattccattaatgacaaactcatgtcactcatatgcatgtttgggaagtgcctaggctgactcccgatgcttgggggctatgactagtcggacagagtgtttaaacgtacggagtcatctgctcggggaaatcaaaattgacaagaggagaaatacatatttataaatattttaaaatacttaaatttttctcgagtattatatttacatcagatactactcatcctatatgtttgttctgcaggatccagatccagatatgcataatagggattcatggctttcaaagcttatctcctacgcttcagaaatggatcagtcagaacatcaccgaccggcttgccttcgtcgccgccgactggtgtctccgcctacacggctggcctattatgccaccgttgttgggcgtctacgtcttcaccgaccggcttgccttcgccgctgccgactggtgtttctgcctgcacggctggcctattatgccgccgttgttgggcgtctacgtcttcaccgaccggctgccttcatctgctgccgactggtgtctccgcctgcacggctggcctattatgccgccgttgttgggcatctacgtcttcaccgaccggctgccttcgtctgccaccgactggtgtctccgcctgcacggctggcctattatgctgccgttgttgagcgtctacgtcttcaacgaccggcttgccttcgtcgctgccgactggtgtctccgcctgcacggccggcctattatgccgccgttgttgggcatctacgtcttcaccgaccggccgcctcgtctgctgtcgactggtgtctccgcctgcacggctagcctattatgccgccgttgttgggcgtctacgtcttcaccgaccggccgcctcgtccaccgtcgactgatgtttccgcctgcacagctggcttgttatgacgccaactgatgctatcttctttacggctggctacgtcgccgtcaccgctaataggcgtcatcatcttcaacgcaagctgtctacgtctactgccgactagtttcttcacttccatggctgcatgattctgccagtgttgattggccttatcgtcttcatcgccggtcgtctcgtctgctgctgactagtgccctcgcctctacgtctggtttataccgctaccattattgttggtcgccttcatcttcattgctggctgacctgactactgccgattggtttcttcgcctctacggctgtgcaactttgtcaccggcaccgacaaactctattgccgctacttcgctagttttgctacttcaccagccacgacgtctacaagagcttcgttatatcggcatgcgtcaccaaatatgatgccatgttattttactacaacaagtggtattccaatcttcaatatttctactcggatatcttcaacatgcatcttcactcaagcaatgactactcgacgacaagaagctaaagttttcgactctatgttcagttgtttcccaactaactaaagagtcgggggcaacacaaatacacggctcaaaattcgacaggttttatgtcaagatgaagcaatcaactaatcagccaacgagttctatggaatctacttcagcaactcttattatttcaccagtaattttggtttctccacgccgctacaatctactccaaatttctcaattatcaagtttgagatttaatctacatgttcgggagttgtatcagtcttcattatgcacacgctcgcatcaaggaaactacttgagcttcaatatcttctcaatagtttgatggattattgtcactggcatcatcaccagcacctctacttcatcggccctgacgtcttcgccgttgctaaggggtgactacgtctcaccctcggtggcttctgtcatcactagcttcatcgccgacttgttatttcgttttcagggttggcctactacgcaccgccgaggggagacctcatcattatcattaactgctacattgctatcaatgggcaccttcatcatcacatttgatcatctctattgctgccaatcgtcattaccatcggttgcatttgtcgtcgtcgactatttcctgcattttcatgattggaggatttcgccattgtatttgatgcacgtctacgtcttcatcgttggcttgttttcatcgccaccgactgatattctcgccttcacggctggcttattatgtcgccactaatgggcattttcatcttcttcaccagctgtctcgtctgtttctgactgattattttgtcaccatggctacaaaattctgtcgctattgctgggtgccttcatcttcactgctagttgatatgactgcttccgactggtttcttcgcttccatgccgattgcatcagctattaccgatggacaattttgactatgacagaaggacaagctatatgctcaggggcttatcagctcaaacacaagcgcgaggattatatcttcaatttggacttcttccggatacatgcaacatgaattcgtgatcatgggtctattttctatgctcaaagactggactatttattattccccgtaagggttatcaatcgaatacttgcgctagtcgggattcaattattatatctatttaggagtatcccataagggataatcactcagatcagaagctattcatatgagctacacttggtctatatcactcggaagatttattactcgggagcatgttacatgcgtcatccttcaaagggtgtcgaaggcatattttttggcctaggcctaatatgtctgcagcccatattttcaggtgtggcctgtcacgttcttttagggacttaggcatctttttgcttacgcaaaagtgcacgtgattatgtgcccaataccttaaaatccttttataccgcagttactcaactttttaggagttggtacaatgcatcttaaaaggtgtcaaacagtaaagctttatatagctgctccgctgactttttatatagtcatgacactgtttgggttcatcaatccattgattagatacaatatcattgcttttcgccacgtaagtgtgcatttttattgtccaatattatggcttaagctgattatatatcttggccattttccaggcgggtggtaaacacgttatgagttaatttactcggatttcacaccacatatgccatatatttccaggtgtggtgaaaccatgtgtcttttagggacttaagcacatctgttaaagcagtgtgcgcatggcgtatgcccaatacattagaaatttctttattcgcaacatacaagcttctttatagctgttttgctatgtgaattttcaatgatgtagccaactttaggttacattcatcatattttacaaagcagtcggtatatcactcggatcatgttattcagggattcacaccgcatatgctacatattaatatcaagtcgcttggttgactataattatcgaaaccacttggttagttagattatttattccttgactatatgcttagtttgttcagctaaccacatagtcgggggctacacctattaggtgcatctagtcgatgcacctaactttatttttcagccctccacagtcttcatatttggaaaaagtactcgggagatcatggcgaagatgattgaagcactcggctttagagtaatctggttcgagagaagattatcttttcgactgtgaaggtctcaggggctactgtggagattatgggtaccccatacccacacggcatggttatccgactagttataggggataacttatatctatgtaatatgtaacagatcatgatttgggtgttacgtttccttgtatattacggaacggcctaaagtcctggtttgataatattgtaaagtagatttaggaaaccgataccgtattggttaaggtttctatcttgtaatcctgccccccatcctatataaggttggcagaaggccctctaagaggcatatgagacaactagatcgtcagatctatacacactcggcggattcaaatccccaaacaggagtagggtattacctctcattgagagggcctgaacctgtctaaatcctttgtctccgcatccatccacttttaggtctcgtgcgctaccccttttattattgccgaattcatgtttcaacaacgggttagccactagttttttactaatcacaattgcttagagaggtttaatgacatacttgaaaaaacaaatatatgatgtaggttgagtgtgaattcacttttcattggcaagttttaaatgtttttcctccacgatatttgcggtcagattatattgttatatactccctccattaacctttgttatgatgtttgaatattcatcctatttgctagtatgctaccaagtcctatatagaatcaaatgttatatgtatgacaaaattcctaagtagataagtaaggtgtcccatataagaaagagaagtagagtgtaaaatcaaaggtgtttttgattattattctgtgatgaacgattggcattgcagattattggttttgttatttggaatttattcacaaagtggttttggagatgattggattcacaggtgatcgcagatttatcattttatgtgaccggtcagaccgggctatgtatgccggtcagaccggcggtgatcgagcggtcggaccggccagtccgcggtcagaccggccgacgctgtgtcagtttcggttttgggttatttgtttggatatccgtgattatttcatgattatagcttctagatggatactatacgtatgtaatactgttgtttgctactaatgagtcaagttggagatagcttggtcttggaatatggtttctttgtttaattcatatgtaggtgactcgatgtctcggaagagtatttgcggtgatggaccgggagtcggcttggggataagacgacgtccgtggtaatcagagatcatgcgggatactaaggctagagttgatgcatgtggttgatggagattccatatgtcatacgatggaggtattgtgtgcgtatgggatgcggagtcgaatttggaaggagtccaaatttggtacgattggttatgtaaagtttctttcttgtattagagggtttcctaaggtgtttaggactcttagtatgagtttggtttgtggctttaggatgcctacctcgggtataaatagagggggagcgtgaggcttctcggtatcgcttttcacagcaattgagttgagttttgagttagggtttcgagtttagtcgaaatttttgtaaggattgctgttggtgcactttgtaaacacagagagaatcaataaagtcgtcatccactttaagagttcttcgatttgtgtttcaccgggtttcggcggtgtaatcggcggcacaccagcggtcagaccggcggcatcgcggcggtcagaccggtgggtgacctacggtctgaccggcggcgacatcaggcgcgacagggattccagggctgtccaaccggtcagaccggctaatctactttggtcagaccgatctcatcgaaattgagggtaacttttatttgcgctaaaagtttttggtttttgggtataccaaccattcacccccctctgattggcttagttcttgtgattcgatcctacaagtggtatcagagccttggtttcttctttggatttttatcgatctagagtttttgccatggctactcctgctagggtttcaactaagcctcatgttttcgatggaacggatttttctcattggtgtagtaggatgcaatcttacattttggctgaagattatgatatttggagaaaagtttctcatccttatgtaattcctgaagctattaatactgctgctgaaaaaactgcatttgaacaaaattgcaaagctcgcaacattcttttgagtggtatttctcgttcggattatgatcgtgttgcgcactttcgaactgcttatgaaatttggaatgctttgagtaactttcttcaaggaacaaataacattaaagaacttcgtcgtgatattttcaaaaaggagtatattaaatttgagatgaaacctggagaagctttggatgactatctctctaagtttaataaaattttgagtgatcttagatctattgattcttcttatggtgctaattatccacaatatgagatttctcgtcactttttgaacggtcttgatatgtctatttgggagatgaaagttacatctattcaggagtcagttgacatgtctactttgactttggattcgctttatacaaaattgaaaacacatgagatgaatgttctttctcgaaaagttgattctaagtcgagtgttttggtttcttcttcttcttctttggatgttg

SEQ ID NO: 4717 - DNA, 3130 bp, Oryza sativa
ttaaaatatcttattcccaatgatgatgattgttcaaattgtgaggttttaatgaatgagatttcaaaatttagagatgttaatgctgcacatggtttgaaaaatagatcttctcttgcttgtagttttactttgcacacacgcactttggatgagttgtttttaactaaaaagttgttgcaaaaatatcaaattggttttcatgctagtttgatgtttaacatgatttctgctaaaaaagttaaaacaacctcatgatgttttggattgctcaacatgtaatttgaataagttgaaattgaaagattctttaggttgtgttgagtacatggaagatgttgtgaaaaacaatgaagtgctttattgcaccaaatgtcgtaaaagcaaaggtgtcatggtgattgtgaaaattgtgctaatttggaaaaagaggtttcttatttgaaaaattctttgctaagattttctgatggtaaaaagaacctcaacatgattttggatcaatcaaaggttagcacacataaccgtggtttagtttttaatccttatgctcataattctagacatcctcctattgtgttaggtgttggtgctagaagtggtgagattttggttaaacctgattctaacaaaactgtgtttagatctgctggtatcatatctaccttgaatgcatctttttcaaaatccaatgttgtgcattcaaaatctcctgttgttgcttgtgttgctaaatcttctaatgctaccaatctgtctaatcatcgtgaaaaatatacttgttctttttgtggaaaagatgaacatattgttggtttttgtttcagattagctcataaacagaaaaaggagagagagattgcttttgcaaaatcaaagtggcaaaaatcgggttttccctcgaggaaaccggtcagaccgcagtgggtcccgcggtcggaccggtgaccggtcagactggctactgagcgtcggtcagactggcggtacagaggcggtcagaccggccactgtacctcggtcagaccggcctcggaggaaattttccgaaaattctataattgattttgcacgtggatatatgcctattggatcttctagtcatgtgtctcagtactggattcctaaatttttattatcatctaaccccagtactgaggcttcgacttctacttgtgtgtaggctttggtggcaaggaaggagaacgtgtggatcgtggatttcggttgttcgcggcacatgaccggtgataaaaattggttctcctcactcaaaaaggcatccaagactgaatcgattatcattggtgatgcttctacaagtgccgttctcgctataggtttggttaaggtaaatgaaaaatttgaattgaagaatgtaactttggttgaggacttaaagtacaatttgctttcagtttcacaaattgttgatgaaaattttaaggttcactttaagaaaactagaagtaaagtttttgattcttgtggtgattttgtgttgaatatttctcgctatggaagagtgtttaaagctgattttgaaaatcctgtttcacctgtgataacatgtttggttgctaagtttaataaagatgtgatgttttgtcatcgtagacttggacatgttggttttgatcatctcactaggttaagtggtttggatctagttcgtggtttgcctaaacttaagaaagatcttaatttggtttgtacaccgtgtcgtcatgctaaaatggtttctacttcacatgctcctattgtttctgtgatgacggatgcaccgggacagctattacatatggacattgttggtctagctagagtgcaatctgttggaggaaagtagtatgtgttggttattgttgacgattttcctcgatattcttgagttttctttatggcaactaaggacgaaacttttcaaccctttcgtggtttgtttcttcgattggatcttgaatttcctggttctttgaaaagaattcgaagtgataatggtggtgaatttaaaaatacttcatttgaaaaattttgcaatgaaagaggtcttgaacatgaattttcttctcctcgtgtccctcaacaaaacggtgttgttgaaaggaaaaatcgtgttttggttgagatggctagaacgatgttggatgactataaaactcctagaaaattttgggctgaagcttttaacacagcttgttatatttcaactcgggttttcttgagatctaaacttggaaaaacttcttatgaacttcgatttggtcatcaacccaaagtttcacatttgcgtgtttttggttgcaagtgctttgtcttgaaatctggaaatttggataagtttgaggcacgttctaccgatggattgtttcttggttaccccgcacatactcgtggctatcgtgtacttattttggagactaacaaaatcgttgagacttgcgaagtttcttttgatgaggctagtccaggtactagacccgatattgcaggtacactatcacaggttcagggggaggatggttgtatttttgaagacgagagcaacgacaacgacgatgacgaggtcggctcggccggtcagaccgggtgccaggccggtcagaccaccggcacaccttcggtcagaccgacggaagacgtgcggtaagaccggccagggccgtcggctgagggttctgttgacgctgttcgagatggtcctccggagattacaacttcgactagtactgatacggaacgtggatcaacttcagaagtcgctgctcctttgcacattcaacaacgacatccgccggaacaaattattggtaatacaggtgagcggactacaaggtctaaggtaacgactcatgatgtttgtgtaaattctgcatttgttgcttcttttgaacccaaagatgtttcacatgcattaactgatgaatcgtggattaacgccatgcatgaagaacatgaaaattttgagagaaacaaagtttggactttagttgaaccaccttctggacataatattattggaaccaagtgggttttcaaaaataaacaaaatgaggatggtttgattgtgagaaataaagctagacttgttgctcaagattttacccaggttgagggtttggattttgtt

SEQ ID NO: 4718 - DNA, 16592 bp, Oryza sativa
aaccatagagacatggagccttcgataatgtcgaatagaattttcctaaaatcaatactcagaaaagaatattagatagaaatagcccccgagcgaacgctcaaagggtaacatgttataatatgtatggaaaaccgaaaatgcattaaacttacagaccaatgttttgtatatgagcgtctactcttttaccgacttcgatcagtcagtttgttgagttatacactctccctagcccctagccttattgtcggcgaattgttcttggaggataaggctcttggacctttcacctgcctcggttgaacaagcactgatcctagcccccagccgtgaagttggaaaatccattttcgattacacggcttggttaatacgcacggcgagaactcttacacgaccagatcttacatggtctttcgtctctaaaggatccgacaaagccttatccgctctgggcgtccccagccgaagtttccttaggttcctcagaggctttgtcaagacggcgtaaagggacattaggataggtttcaacgctaggtgtcttttgtggtaagggatctctgggtaaaacacttggcgatattgtgcacctgatatcaactttgttgaagtagaggtaatgggagaatcactacacctctggtcagaaccaggtagtagtcgtaactcaaccactagaattaaatgtacgagagatcgctacaattgactggttgaggaccagtgagtaggtgtctctcgatcatttgaagtcgtagtacgaggaccgctgcgttattgctgtagtcgtacctcgactctcgaacacctatggaggcgctggaattggtttattacatgcgcatctcatgtggctagcatgactcacacacccaacttgtagcatatccggatgtccgttcacaatcatgtcaggtaataaagccgacaacgttcacgaggaattatccgttaacaaccttttctcaaatagtccagccacagccggtgctatgagataggttgtcagttttcgttggtaggttgggcgcgacgactctgcatttgtcgagatcgttctcgataatgcggtgtacttgaccacaacctactcgagtgctcaattgttcctgaaaaatattttctagaagacaagatatatagcagataatatcgagtatgtactcaaaaaactgcatgaatcttctagcattatcaggatataacgagcagattaaatatcagggcattatgtaaactgtaaacaagcatgatttatacagaagaagacagagcgagtccccagcgttagatcgtagtcgatttaacatcagggacacccgcgcaacagatattgtataaaaaacatgctctaggtaaacataataaattataaatccgacaatgttgtatgatctgaatattggtatggaaaattttatataaaataatgcgtacctgtgtagatatatgccggatatatctacgaaattagtagatcaattaaattaattaacctactaattacatttctgacatgtgtattcggagtagattagatcgatgcaatcttacttctccaggtgtacagccgcatgaatgcagtaaacacatgcacttgctgttaattgatctgatgcatgcacatatggacgttatccaaattggttggacttgacgccggccgtgatgagttgacgcccgtgtcaactgactaaaaatcgggtcctagtcagaacatggtagcactactctggcagttgatttttggctcctcgacacacttgcttggttggtaggaatcggtgtcgggttcggcttggactcggccggccgatgccttgcaccagttgatgtcgcacgcgtcgagggttaggctgcttccgacatcatggttctccgcggcggcggtagtcccaatctcgtcggaagatatgctccgatcaggttagattttcccacagccgaagtcgccgagtagcttgttgttggagaatccatctcgtaaacccatctcatcgaaaccttgaagcaccaaaaatcgccctacctggcgcgccactgtcgacgttttatgtcgcgattccggtatttgcatagtatgatgatcgttggtactaggatatacgcgagactaaggtaaaagagatggagacagggatttttatatagtttcgggcccctgaattgtcaagtaatagccctacatcctgttggccgaagccggtattgctcttattcaccataatcacaccagttcacctttagtcctcgcccattcttccttctattcggccggccttatcccttcccaaagtctggtttgcattcctccttctatcgggctgtgcaatagaagcccagccaaaagtctggtttgccttcctgcgccactgttcatcttccagctcaggaagagccgactgtccgccgtgcgcatgcactgccgccgcctcctccttccaaatccgacctccccgttgctcctatttccaaattagttctgggaatggaatcctcttaatctcctcttccttttccccaagaaatccccaaaagtttctacggaaatcctttccaatttcgcggatcaatctttcctttttccggcgaagatccctagaatttcccgtagtttttccgtcgatttgggcctggacccgagctcccgtgcctatataaaggaccccctcgttgtcctctacctctccctcaagtcctgtcttccgccgtcgccggaattgctctccccgggagccccttctctctctaccttcggccgccgctccagccgccgtgcgccgtcgcttcggccgtcgccagtcagcgccgccacctctctcggctccgcaaggtcaatagcaagctcagcagccatctccccaaagccgaagaccccgggaagcacttcgtcgccatgaagaccgagctcgccgccgcgttttgatctccagcgaggccctgctgctccttcctgttagtgatatgccctagaggcaatcatagagatgattgtatcacatactttgtttacatatttatccgacattgttccttgaaatagataactccttattggttaatgaatatgtgattctttcatgagactctttatgttgtttgttactatttctaaaggatccctaatcaaatatcatatgtggaacaaatatgtttatatgatcagcacatgttttaattgatgatcatgtctcatggatcatggtatagagataccaaattaataatgtggacacatgttggtgaacatgttattggatagacccaacatgagacactgcaagagccatatgtgttgtgtcatcagtgatctcatttagtgttggtgttgaatccttagacctgagattatcatggttctcaacatgtgtagtagcttacttaagaactgctaaatgctactccgtaaatgggtagctataaaagtagttttcgggtatgctatgaaatatgtagtgggatatgtataatcaagatgggatttgcccctcctatggagagatatctctaggcccctcgatgttgtagattatggaagtgcatagccatgccaaaggtgattgaggggtcaatcacaagttatataatctatcaacaggttcgagtgaatgattagctattagaggatgccacatatctagccttgagcttaatcgatatcgtgaggcaaaggggtttatacaagtatacactagaggttcaaccgatatgatctttatgtatgcccggtgggtcaatacgttctgctaggggccgctgttgacgcgtggaccgaaaaggagttttcagattacagccgagtatatatgaacatacagggtcgcatgcttaatgggccggaataaggggatttgatagggatccaatataagcttaattcggatagggatccgaataggagtcctatgggccttggaggcccgagtgatggatcctatatattcgtgaggggtgtgaccggcggaggtattgcaatacgtgagaaaccctagccatcacttccctccccgagcaaaaccctagccacgcgcgggtgcaagcacatctgcgcgtggcgttccgtccctgtacgtgtggataccggtagagacgccgctggtttgcggtgctgatcggcgtgggaatacggcgaggagaaagcacgaggaggagaaggtcgagccggtgcgatcgactacttcctctacatcgacgcgcgctacttcgcgagagttccttcgacttctcagcgtcttcttccgctgtgcagcgcgtcgagtggtaacgatctatgatctaatacttgcatggttcctggtttacgcgatagaaaattttgatttatgctatcgtagcctacgcgtatcccaacacttccatcatcaccaagcttcaccgccgcctcctttgggttcggtgttcgcctccgctttgctgacctctaggcgaagagcctaaatcttcggctcgatgagattgtagtaatcggttagagcggtagaatgtgcttgctcctttttgagctcagccttgaggcgctctatctcagccttcgcctcgctccccttctccaattcagcttggagccgcttattctcagccttcgcctccttgagggtattggcgaggccctccatctccaagctcttgcggcccagttcgtcgtccttggctcgaagacggttcttgaacccgtcaaggcaagcccgcatagtccgttcggttgaacaatgggccgcgagaatctagatcaaaagacaaagagagggcgaagaggacaagcgttaacataagccgtcgaagacggacaactgaaagtaaacaaaaaggagaacaacatacccgaaccgccaaacgcttgatggcagaatagccttcgtcgaactcgttcagctcggtgaataggctcgggctgccagccagagacacgagattacttaccccctcgacgaaggggataaggtccgcgccagtctcgaagtcagcaggggcgcagtggggggccaccaaagaatactctgaagcagacgtctcgacgaccgtcttcttccccttctcaatgacaagcggcgaaaaccacagtcctccgcacaggactgccaaagaccctagcaacgaccctgacaatccggtcagcaaaggccaaagcccagcggccacactccccccgagctccacctgcatcaaccatggcgctgagagcggtcgaaagacccaagctccgaccagtgggcgaagtaggggtctcgtccgaagactcgtcgtcgctaaaaatgcgagcgacatcaacgagccctttctttttgggggccttcttgatcgaaccccccttcgtcaccttggttgcggcgatcgcaaccagcgccttcaccccctccatatccatttggcggaggagggagaagttcgactccaccccggtcccaacgtgctcggggctcggagtcggagtgtagctgggcgtcttggcgcggttgccggcggcctcgtccgtggccttttcggccacaacctccgtttcccccacatcctccccttcctctttgtcgtcgtgatctatgacagtgtctttgtcatcagcatcagagtcggtggaggcaggggccctgcacttccggggggccaacttcacctgccccgcagccacttcctagatggcccctcatcgccatcggccttgaaggacttcgtccggggaggcagttcaccgacatatacccggttcgcccgaccggccgccagccgcgtaagcagctggctgaactcagtaatcgacacgtcgccgatcatcttccgggcttcagtgtcaacctgagcaagggtcaacactgcagaaagtcgaaaaatcgccacatcaagcgttgaacaaaaagagcgagtcacaagtacgtaagggaaatgcagaggctcactgttcgccccctcgggcatgacgagctttgacaagccgtgaacttcctcgtcttcattcaccacaacatgccacgattgggagagggggaaaatccgaagcatgcaaaattcctccaccagatcgcggcagctaagccgagagcagaccttgcgaagcagggtgaaccgagcctccatggtgccatcgatggcgaccttgggcttcctgttcggcgaaattgccctgcgccgccaacggagggccttcgccgcgtcggaaccggcctcgaaggggatggagtggtagaaccacttcgccatctaatggcgatcccacttcgacatggcggcgttcaccggccatagatcggagcgctcggggcgaacattaaagttcacgctcccgaacgccgttttctttgtcccggctggggtgaccactgtcttcgagttcacggtgccatagaacacggcgccgaaaagctcggcgctcggttcgaacctggcggtccggcacgcccagtcgaagatggtgactcggacaagtgccgatgggctcagctggggaagctccacctggaaaagacgaaggatctccggcaacaaaacgttgcatggaaactgaagccccacctcaaaaaacacggcaaataccatcgtccggttgtcgccgtgtttcggcaccacggcctttcccggagcgaaggccttcccctccaccagcaggctggcgctgacaagctttgccagctcgtcgtcgtccacaagcgaagcccctagaaaggcggtggtgtcgtcgtcgattcggcctggattagggcttgtcgcggaagctgggttcggcttgcgaggagccatggtgaaaggtgtgcgcggtggcgaaaagggagaacaagcgaaagatctaggaaatcaaagggcgtcgtgaaaggaaagaatggagaaagagagagcgctcgcggtgaaaatgacgagagtgcggcggtgaaaaaggggaagggggaatatatagcccacccaggcgacggttcgtctccccacccaatcgtaagagggaaagcccatcactgttcattttggcctagagaaaattaaaaacggtttcgccgttcgcaagacgcgaaacctagaaaacgttactaaccataaaagtacacgtacacataatgcacactttctctgcaggactccagaataggtttcggcaggagcgtcggtccaaagggggcgccccataccataccacatggtttgcacggtctcagccgaagctcctatctcactcttgcccgtgaggggcttgttggcggtatgtcatgagacccttcgaccggacctgccgaaaccatgcaaccaggggtgggttcaagcccaagacgtcgagtctgttgaggtgaagcccccatggcgaagactatgaagcaaagatggcgaagggtgaagaatcgcaccggtatcccacaaggttgaaggcatgttgggcgaagactatatggcgaagagtgtatggcgaaggcggatgactttgccgtagcaagtccaacttcaaggaggcccaagaggccatctcagccgatcaagcccggaggccactgggccagcgttcgccagtcggcccattaggggcccatataccttaattacactatatacccatgtaaatgtccctttcataagggcaaccatgtaaattcccctgttaaacctaaaccccaataggggaactagtaatagggttataaataggctcctagggccatgtaacggggatccagaaaaaataaaagaaagataatacacttcaccgtttccagtgactattgagtatccacgtccttcgacgtacgcagttgtcacttcgacaaccatacttaatattctctaaaacatcatttacaattatatcggaaattgcttcttgctgctactacacgaacaacagagattaggaattgtgaatttatgattagtgaagatggagtgctggtctctcgagttgagaagtattgacgctttttttttcaacaaaagattacctaacggcttacggtataattaatagagtcgttaaaattaagatcaaaaccggttaatgaaagcaatcaattcactttcatggaatcaaaaactaatttacatttgtaaagaatatttttagataaaagaagataactatcgtacttacatgacgacgaaagattactttctgagcaaaaaagcaaagaaatagaaggtataaatagaacaaagtaaacagcagataattcaattgttggatgttgggtgccttcccaatcgaccatatcttaactaatataaagattcataaatttccgttcgtcacacttattttcgtccatcaatcgtgcgattccctcttccccctctcgcgcgtgtgtgcgttgcccgtctccaatagttagcgcggaaaaataacatgggttgcatcgtaatacagtaggaaaaatagggtttggatagggctttattctcagctagatatgaagcagatttgatttgatttttgggaaaacggaaagaggagaatataaggattgaaacccctcaactaatttcatattatcttaaaggatgcggccgagttttatgaaggcggtgacatcgggaggcgtcgggaagatgaggaacttgacggaggtaggggatgacactgtagtgatgggcccacacgacagtgagatagggagggtaattagtttttcgttgcttgctgggtcggacgcgtgtccgcgggccgaggaggaggggagaataaggaatgaaagcgggccggctcggctgtggactgagggtggccatgggctgaaaatggcccaggtgtaatgaggattttatttagattactatttaaataaatgctgaaatgatatttgtattattaaaaatagcaattaagctctgaaaattccaagaaaattccagaaagtgtaattaactatagagaatttaattaaaattaaatctagccatatcaattttatttcctacactaactttacttttcaattaatttaaacacctacctacttaaaaaatacttaaaaaatacaagtattccagaaatttgtattttagttaattaagtaaatctttcttaactcctcctcaattttctcatcttttcttcccgttgcaacgcgcgggcactttttcttgaaaaaaatcaaagatgatacaaaatcctaatcgtgaacggagtacaaatcacaacataaaaaccgaacgataatcccaaaaaaaagaaaaaaaaagcggcgtcacctatcatttgagacttttcctatcaagcaaaagtaccaaacagtgtgaaaataactttggctaaaaataaatatttttagttttaatacactgtagcgaagcacgggtattttgctagtatacctatagatacatatacgctatgccctggtcttttgacgtacatattctacatgatacgtttgcaatatctcagtctattaaaagacgatctgataaaaaaaacctcctcaagtttctcattttgaaaacgaagctttaacgcaacaatttaatgagaaagagattaaggaggctattttccaaatggaacataataaagcaccgggtcctgatggatttcctgctgagttctatcaagttttttggaatgttattaaacatgatttaatggatctctttaatgattttcataacggtactttacctctattctcttttaactttggtacaattattctactacccaagtgtgttgaggccatgaaaattcagctatataggcctatatgtctacttaatgttagtttcaagatttttaccaaagttgctacgaatagaattatgagtgttgcctagaaggtcattagtcctactcaaactgcttttataccggggaggaacattatgtaaggtgtggttattttgcatgagactatacatgaattacatcgcaagaataaaagcggtgtaatctttaagattgattttgaaaaagcttatgacaaattcaaatggtcatttgttcaaaagacgctaagaatgaaaggtttctcccctaaatggtgtcagtggatagcttcctttattcaagggggtcatgttggtattaaagttaatgatcaaattagtaataattttcaaacccataaaggtcttaggcaaggggatcctttatctccaattctttttaatatagtggctgatacgcttgctttacttattaagagggctaaagatgttggttctataaatggtgtaatttcttatttggtagatgatggtttatctatattgcagtatgcagatgatactatcatttttctagagcatgatttacagcaagcaaagaatctaaaattgattttatccgtatttgaaaagctctctggtcttaaaattaattttcacaaaagtgaattattttgcttcggtcaaacgaaggatcattacgatcaatattctaatatctttggttgtaagttaggctctcttcctgtcgaatatcttggtattccaatgcattttagaaagctgggtaacaaagactggaaggttattgaacaaagaattgaaaaaaaacttagtagttggaaaggtaagtatatgtctgtgggtggtagattggtgttgattaattctgtactttcaagtttagctatgtttatgatttccttttttgagataccgaaaggggtacttcaaaaaattgattattatagatctcgttttttttcaaggagatgatcataagaaaaagtacaaacttactagatgggatatcatttgccagcccaaagatcagggtggtttaggggttcataatttggaaatacaaaataaatgccttttgagcaaatggttgtttaagttaattaatgaacaaggggtttggcaagacttattgaggaggaaatatcttcataataagtctattactgaagttgataagaagcaaggtgactctcatttttggtcagttttagtcaggtctcatgaaagtttaggatactttcttaaacatgggttcctggattgtgaatagtggggaacaactagattttgggaagataaatggttagataacttagcctttaaagataagtatccctctttatatgccattgtccgaaggaaaggttcttcaattgctagtgttatgagatctgttccacttaatgtttcttttaggagagctttagttggtcagaatcttatttttttgtatgagttgtgtgcctctattgtacatatccagttgaatcattcttctgattgttttagatggaactttaatcagaatggaaggttctcggttaggtcaatgtatcttgctttaattaataatggctatattgagagaaataaaatgatttggaaacttaaaatgccgcttaagattaagatcttcatgtggtacttacttaaaggggttgtgttaaccaaagacaatttagcaagacgaaattggaaaggtagtttaagatgttgttttttaatgaaaaatgagaatattcaatatcttttcatgaattgccattatacaaactttatatggagagcaatacaatattcttttggtctatgccctcctagtagtatatcacatattttttatggttggcttttgggggtggacaagaaaaggagtaagcttatacttgtgggagcctctgcaatatgttgggctctgtggttaagcaggaatgatttggtttttgacaaatcaccatctattacatatatgcaggtaattttcagggcaacatattggctccggtgttgggctcagctacaaaggtgtgatgaagatggcgagtttatgaaggttgcatgccgtaggctgaaacgacagtttatgcacctttttgcccattatggttggagattcacaagtagacttcaataacgtgttctccttatcttagatgggttattttttattttaagtgcgtgttctcaatgttttgttggactacactcttttttaagtgtaacttgtaataattgtttgtagctcgttttgagcaaaggccgggatattctattccattgtcaaaaaaaaaaaatctgcttcgacgacgttcgcatatcacacagcctaaatttgtcctcttgcgccagcccgcaattaacactactacaaaaatcgtttttctgtacgagggggtcggtaggttccatgcgggccgcttgtggcggcgcctgcaaaaaccgcccccccgggggcgggttgattagccgcatgcgaaaatagacccattatcgcatgcggctgtcctaagcagccgcatgcgataatggatcttcgcatgcggctggcttaagggaccgcatgcgatgatcggccatatatgctcctccaggcccgagcttgaccatttgaaaacgaagctttctctctcgtaaagcaagcaccaattagggggggaggttttcaactcgaaatttttacttgaactctatacgaaaggtgaagaactctctatcctgcttcatttggctccatttttgttatatttcgttggtggaaagtggagtttttttaatattttgacaaggtttgttctaactattttttgcaaaatctagcttcaaaatatatgttttgatgggcaaattttgcatgtaaacaattgtacatactagttacatgtattgttgtatttttttgggagacaaatgcatttaaacttttgtatgaaatacctgcggtctatttttttatctgtaaattttttgcctttatataattagatggatcggtcgtcatggatgtatgagatgcggagaacgcagccgatatttattaaggaagcatctaaatttattgatcaggctaaggagcatgctttgagggagaatatgacaaagatcttttgtccgtgccgtcattgcaagaatcagaaattgttggtagatcctggtgaaatattgggtcacataatggagtacggattcaccgccaactacaaggtttggacctatcacggggaattcgccaatccggaagatgacgatgaagagttaagtttcgagatgaatgaggcagagaattttataatcgaagacatttcgcgtgaaagaatggttgtcgatgtttccaccgatagtgatgatttcgatggtggttttgatttagaggatatgctacgccatgttgaaccagaggtgctagcgggtaggtcacgaggattggagaattggcaggcattagagaaggcatcgaaggatcttctttacgatgaaacgaagggatgtgataaggatttcacagtcttgcgttcagtgcttgaacttctgagattgaaggctaaacatggatggtcggacacaagttttaatgatctgatgagtttgttccgtgtgttgcttcctaagcctaactttgtatcatcgaacacgtatcaagcgaagaaactcatatgtcctttatctcttggtgtagaaaagattcatgcttgtaagaatcactgcatattataccgtaaagaatatgcggaattggaatgttgcccaacgtgtggcacaagtcggtataaaacggggaatgggcccgtagattcagagtgtaccgatccagattctgataagggtaagcgcgggaagattccttcaatggtgatgtggtacctaccaattaaggaccgcctgaagcatctgtactcaaacccgactgatgctgagttgatgagatggcatcaagagagccgaaaaatagatggtatgattcgacatcccgccgacgctcgccagtggaagacatttgatgcaaaacacctagaatttgctaaggatcctaggaatgtaaggtttgcattgagcactgatggaatgaacccgtttggtgacttaagcagctcgcacagcacatggccagtccttctcacaatgtataatcttccaacatggatatgtcagaaacgaaagtacattctactcactatcctcatacaaggtccaaaccaacctggaatcgacatagatgttttccttgagcctttgatggaggacatggaggagctttggaaagaggggttacgactatgggatgagtttaagcgggagacttcaatctacgtgcgatcatatttgttaccatcaatgacctacctgcaaacttttcattatctgggcagattaaagggaagactggatgtctaatatgtctggagaaaacttcatacaaatacctgacgtcgtctttgaagacagtgtacatgcgacatcgacggttcctaccacaaagacataggtaccgtaagatggctagattgttcgataatacagtggagaatgacactgccccagtagcaagaggtggtacatacgtgtatgagataacaaagaagattaaggttgtatatggaaagggaaagaagaagacagtaaagaggaagaaagctgatggtgacaacggtactgcgtcgcctttcaagaagcattcaattttctttaaatacttagattactggaaggacctagagattcgacatgcaattgatgttatgcacctcgagaagaacgtgtttgatagcaccgttggcacattgctggacatcccgagtaaaacgaagaatggattgaagtcacgtaacgaccttgtagatttgtccatacggcatgaccttcacccagtagtgctgccaaatgggaagaccgagattcctcctgcttgttacttgttgacacttgaagagaaaaaagccttctgtaaatgtttacaaggggttagagtgcctactggtttcgcatcgaacatcaggaagctagtatcaatgaaggatttgtccatttcgggatacaatacgcatgactgtcataggttgctaacggtgttcctaccaattgctataagggcagtcaaaccagtccatacaaaggtggttataacaaagttgtgctactttttcaatcgaatttcgcagaaggtatttgatcctttggaattaggtccgcttcagacatttgccgtcgagactgtatgccagcttgagatgtatttcccaccatcatttttagatatgatggagcatttgatcgttcacatcgtccctcagattattgaacttggtccattatacttacatcagatgtgggcctataagcgttacatgtcgatcctcaaaggctatgtacgcaatcgcgctcacccggaaggatcaatgatagagggatacacaactgaagaggcagtcgagtgttgtatggactacataaaggatgctaatgccattggcattcctgttcatcgacatgaaggtagattgtctggaaggggtactgttggtaggaagcagttcttcgataatgattacaaaaaggtgtccgcggcacacaacagcgttcttcaacagctcgctatcgttgagccattcattgagcgacacctagaagaaatcaaagcctgcttcccagggcggtccaatgattggatatcaagagagcacaagcgtcgctttcctctgtggttgaaagatctaaacctgccagttggtgattctgtggaggaacttactttacaaagactggcatgtgggccttcaagtattgtcaattcatggcaaggttacgacatcaatggatttaccttgagtacgactacgaaggacatgaaaagcaccgcacaaaatagtgggatccgtgtcgaagcgattgacacgagtggagaaaagaggtcgtattatgggaccattcaagaaatatgggaactggactatggcctaaacatccagatccctgtgctccgttgtgaatgggttaaagacacaataggggtttccgttgatgactacgggctaacgatagtcgatcacagtaaaacaggccacaaggatgatccatgggttttagcagagcgtatggctcaagtgttttatgtgaaggacccttcagatgaaagaaaaactattgtcatatccggaaagcaacagatcgtcggcatcgacaacatcgaagaccccaatgattacaaccagttcgacgatgtaccattgtttactgatcttcctatgcgaattaagaaggttgagagaacaatcgatgaagcaaatatgtcgtacgttcgagcagatggtgttgccaaggttattaagtcatagttattttgtaacctttagttctcattgtattccaaatgtacgtgcatgaatttaggtcccccttatgttgtaatcattagcatgtaacatttgattacgagttttgagcaattttcatgagttttcttagtgccaaaaacatttggaatgtataattgtggcgaaatattgggaaaaaaatatatatggacagtttacttagagaaaaaaaaatatgagtttttttggtaaaaagatctttctatgcggctggctcgcatgccggcttaatagcccgcatggaaagatctttttcgcatgcggccggcttaacagcccgcatggaaagatctttttcgcatgcggccggcttaacagcccgcatggaaagatctttttcgcatgcggccggcttatgtcgaccgcatggaaagatatttttccatgcggtcccttaagccgcccgcatacgatgatctgcgcctatatatagggagcgcggggagccaaaattttctaagtcccggctcccgcgaaaccctagccgccaggctgccaaaatttcccaagtcgtcgtcgccgtcgtccccgccaccgccggctcctccccaaagtcgccccgccccacgccgt

SEQ ID NO: 4719 - DNA, 23468 bp, Oryza sativa
  unsure (1)..(23468): unsure at all n locations
taatattggtcaataaaaatgcacacttacgtggcgaaaagcaatgatattgtatctaatcaattgcttgataaacccaaacagtgtcatgactatataaaaaagtcagcggagcagctatataaagctttactgtttgacaccttttaagatgcattgtaccaactcctaaaaagttgagtaactgcggtataaaaggattttaaggtattgggcacataatcacgtgcacttttgcctaagcaaaaagatgcctaagtccctaaaagaacgtgacaggccacacctgaaaatatgggctgcagacatattaggcctaggccaaaaaatatgccttcgacaccctttgaaggatgacgcatgtaacatgctcccgagtaataaatcttccgagtgatatagaccaagtgtagctcatatgaatagcttctgatctgagtgattatcccttatgggatactcctaaatagatataataattgaatcccgactagcgcaagtattcgattgataacccttacggggaataataaatagtccagtctttgagcatagaaaatagacccatgatcacgaattcatgttgcatgtatccggaagaagtccaaattgaagatataatcctcgcgcttgtgtttgagctgataagcccctgagcatatagcttgtccttctgtcatagtcaaaattgtccatcggtaatagctgatgcaatcggcatggaagcgaagaaaccagtcggaagcagtcatatcaactagcagtgaagatgaaggcacccagcaatagcgacagaattttgtagccatggtgacaaaataatcagtcagaaacagacgagacagctggtgaagaagatgaaaatgcccattagtggcgacataataagccagccgtgaaggcgagaatatcagtcggtggcgatgaaaacaagccaacgatgaagacgtagacgtgcatcaaatacaatggcgaaatcctccaatcatgaaaatgcaggaaatagtcgacgacgacaaatgcaaccgatggtaatgacgattggcagcaatagagatgatcaaatgtgatgatgaagttgcccattgatagcaatgtagcagttaatgataatgatgaggtctcccctcggcggttgcgtagtaggccaaccgtgaaaacgaaataacaagtcggcgatgaaagctagtgatgacagaagcaaccgaaggtgaacacggagtcaccccttagcacggccgaagacgtcaggctcaatgaagtagaggtgctggtgatgatgccagtgacaataatccatcaaactattgagaagatattgaagctcaagtagtttccttgatgcgagcgtgtgcataatgaagactgatacaactcccgaacatgtagattaaatctcaaacttgataattgagaaatttggagtagattgtagcggcgtggagaaaccaaaattactggtgaaataataagagttgctgaagtagattccatagaactcgttggctgattagttgattgcttcatcttgacataaaacctgtcgaattttgagccgtgtatttgtgttgcccccgactctttagttagttgggaaacaactgaacatagagtcgaaaactttagcttcttgtcgtcgagtagtcattgcttgagtgaagatgcatgttgaagatatccgagtagaaatattgaagattggaataccacttgttgtagtaaaataacatggcatcatatttggtgacgcatgccgatataacgaagctcttgtagacgtcgtggctggtgaagtagcaaaactagcgaagtagcggcaatagagtttgtcggtgccggtgacaaagttgcacagccgtagaggcgaagaaaccaatcggcagtagtcaggtcagccagcaatgaagatgaaggcgaccaacaataatggtagcggtataaaccagacgtagaggcgagggcactagagtcagcagcagacgagacgaccggcgatgaagacgataaggccaatcaacactggcagaatcatgcagccatggaagtgaagaaactagtcggcagtagacgtagacagcttgcgttgaagatgatgacgcctattagcggtgacggcgacgtagccagccgtaaagaagatagcatcagttggcgtcataacaagccagctgtgcaggcggaaacaccagtcgacggtggacgaggcagccggtcggtgaagacgtagatgcccaacaacggcggcataataggccaaccgtgcaggcggagacaccagtcggcagcagatgaaggcagccggtcggtgaagacgtagacgcccaacaacggcggcataataggccagccgtgcaggcagaaacaccagtcggcagcggcgaaagcaagccggtcggtgaagacgtagacgcccaacaacggtggcataataggccagccgtgtaggcggagacaccagtcggcggcgacgaaggcaagccggtcggtgatgttctgactgatccatttctgaagcgtaggagataagctttgaaagccatgaatccctattatgcatatctggatctggatcctgcagaacaaacatataggatgagtagtatctgatgtaaatataatactcgagaaaaatttaagtattttaaaatatttataaatatgtatttctcctcttgtcaattttgatttccccgagcagatgactccgtacgtttaaacactctgtccgactagtcatagcccccaagcatcgggagtcagcctaggcacttcccaaacatgcatatgagtgacatgagtttgtcattaatggaataaagtttcacgaatcataatttactactcgggtacttttgcaattgtaaagagcagaaaataaatttatcttatctctatgcttttgatttattctgaataatacttagaaccttgcgttactcagtccatccaacgagcccccgggtgctaggaatcggcccaaaggcaactatccatcgacaaaccaaacggaaagcataggaagatagaactccataactcgataggtacttttgtactcagattatgtcgcaagcaatcaagataaatattatgaaaattgtttaaaaaatacgatataacatctgtagcccccgactcattagtcaacggcgaaccagttgatgtagtgaggcagaggaaaaaaatatcatataaaaaaaattaatgatgacttagctttgtaatattcccctggtgatggcagaggtggccaatgtgggaacaaagtcgtccatcaataacaatgaagacactagtcggcggcgacgaaggcggtcgacggtgaaagcgaagatgcccactaacggcggcataataggctagccgtgtaggcagagacaccagtcggcgacggcaaaggcaagccggtcggtgaagacgtggacagctatgaacggtggtgtgaccaaccaaccgtataggcgagaacaccagtcggcggcgacggaggcaggccggtcggtgaagacgtggacacgcatgaacggtggtgtgaccaaccaaccgtatagacgaggacaccagtcggcggcgacgaaggcaggccggtggtgaagtcgtaaacgcccaacaacggcggcataataggccagccgtgtaggcggagaaaccagtcggcagcggcgacggaggcgagccagtcggtgaagatgatgttgctatcagtagcagcgtagtaggctggccatgaggacgaacaaaccagtcagcgatgaagtccatgtccatgaagatcgtgtcagtgatatcggaaacaacgtgcctgttatatggctgtcgcatagtcggacatgtaaatacaaatcatatctgattaggagataaaagaacgtgcaagcatgcatctgtatttgctccagtagatcaagcctacgattgttggtagcagcctgtagattaaggaatcttgattggttggcttgtagcaggcagccatgcaatacatggtgatgatgagtagatgcatgtaataagagagctgctacgaagcccctgattatgtcgctgtgagatcgaggaaagatgctggccggactgtttggcgatcgaagtagtcagccagaccatgatgcgcgtgcgtagccaaccgtacaccacatatgttgcaagatcaggactgcaaactttgtagcatgccgtgtatcgtccaaggcacgcggcccatgctatcgacgatcctgttaacagtagtatccggttattctcctgacgataaagtttctctctgaagcgaaaaagcgtgctgacgaaggtgacgctggcggcggccatagtagatcgaatcttaaactcgccgtggtagagtggttgttatcctccttagctagattagatcttccccgactgatttgaatcaaagtcaaagagcgaggcttgttgaagttgtcgatggcgaggaagtcaaagctcctgaggcaaaggcgaagctggcgactcataaaattgattccatcgcactcctcaataggaaactcggcgtacaactacctggcgcgccaactgttgaaacataaattcggcaataataaaaggggtagcgcacgagacctaaaagtggatggatgccgagacaaaggatttagacagattcaggccctctcaatgagaggtaataccctacacctgtttggggatttgaatccgccgagtgtatatagatctgacgatctagttgtcttatatgccccctagagggcctcctgcccaccttatataggatggggggcaggattacaagatagaaaccttaaccaatacggtatcggtttcctaaatctactttacaatattatcaaaccagaactttaggccgttccgtaatatacaaggaaacgtaatacccaagtcatgatctgttacatattacatagataaaagttatctcctataactagtcggataaccatgccgtgtgggtatggggtacccataatctccacacccgtgcgttgcaattcactcacatcatctttcctgctcctctatgggtgatcaatctccctcttcaattcgctcacatcatctttcctgctcctttatgggtgatcaatacattttcgatcgaaccaaaggtataacgtcaagtttggtgaggtgaaatcctgctgagttcatgatacgattcttgatttcatccgttcaaagtctacttaagagaacttggttaccctgttaggagttcataatgtgcctattgatttgcggaacaaagttctctctttgttttttccctggttgtgtttgctgaagcactttgggtggatatttctgaaaaatttcaaatatatgggatgggggtagtacttagtcaagactttctcttagtttcaatgagaagtttggtgctctggacaatgttggtaattgcagtgtgtttgaaatatgctagtacgatttatcattgaagtttttacggcctttcctaagtgaggcagtaacagaattcaatggcgcttgttgaggcaagcaacaaaattgcagcaaatggatctccacactggagctttgaagcagccactttgaccttctcttttgggttattacacgaatcagggcaaaaacgatggacgtccatcatcagtgctgtcagatgcagcgctttttttatgatacataaaaccaggcaagaactgctgtcgaagcctttcattgctgtattattccgtgttcgatgaagttcatggcaaaatcagtgtgattctgtctgcgacatgcattcgatgcattccttgccgttcatgcattacatttttgtgtttgttatcacactaaaatgtcatcttcctgctctctagcgttcttcgaacaccatgccattatcgccaggtcatgcttttgcatccgcctgtgcttggaactcctgaagcaaaagcactgaaaaaacccggctgattcgtgaagaatgcatatagatcgatgctgtcatcgtttcctcgggcggccatggctgcaatggccatattctttttactaccaccaagcaagatccacttacaaacttacaatggtagctgaggggagcgaagggagctagccatgcatcatctctcgctagcagcgatatggacttcccctggactggaatggtgagcaatgcgacatcattgcccgttgggttagtgcaggctgccgctttggcccgcatcagtcaaggcaggcatggttagtgatgcgggccagcccgttgggttaggggcataacccgccccacttttagcccactcatcacagagccaacttttcatattaaaagtcgaccaagtcaccttcactgcgattaatgcaaaatcagtctctatctcctcgacggaacagcaaatgttcagcagggatgcatgagtctgtggctaccttgaacttcaaatccatttgagcacccatcactacagcaaccacaggccacttcaagccacgtacggaactcacctatagtgccatcaaagagccggatttcttcatgtaacccactggtaaaacaaccgatcaggcgcatagcaaaactgctttgcacttgtgatattgcaacctctatggtcgactcacttgtgatattgcagctatgtcaatcgcgccacaataaccatggatgcggcatgtaaacgagctataattccatgttgtctatgtcatctatgattgatacaccatcgatcagctgtagatcttcattttcatatatatattcaccagtcttgatcttcatgtcatattcgattagattagtgccgatcaattggatccctcgcttagggccagccatgtggatgagagaaccctacagaatcaaataagagtaagaaatatctaaagctgaatgcttcccttatgatgtttcacttgtagcaatatttttataccctacagaatcaaatgaaagtaaggaatatctaagacatgttttattattgatggccaagaactttgtcctgtatcaaacagaatgtacaaaatacataacggtgttagagagggaaattgattttgttctgaatcacaggtactaaatcaaataagcatgtaatatattcatgtgcctataagacttagtattcatgctatgcatgttcatatgcctataaacaaatgattcagttttgtgaggtttacttgctagcaaccaagagtccagaattattctatttgattttgtttggaatacatgatacttagtttcatagtatagatctgtttttgttgtaaatcatcatttcacaatatatataagactttgtaaggtagtggcttattgtcatgggccagattttgtaatggcatgataagcatggggccaaatattcggcccagtactaactatccaactactgtcagaagactaggttaaaccagagcctgctccgatgataacatgttaacagacttattaactataaaataattgcatacatgtataaatgtgcacgcctgctccacgacaatgggatcatccctgctaaaattgacaaaataattaagaaatgtatccagcctatcccgcactgctatgtatccatacaactccaccaaaccatggtccgcaggtactttagccaaccttaatgagaaaaattgcaacatacaacaagttccgtgtgacatgcaaattccattgctgtcgatgttgcaatccgtgggctttgaaaacatcattgcctcccaccgagcttcacagaaaaatacaagttctgttaaaattaaaataacacaataaacaaatgctggcgatacaaaatgtaaacatgcttcttgaggattccatagtcccattggaaagttcccctctcatctaaatgaaaaactatccgctcccttgaaaaatttttcttctaggaaatcccaaggataaagagagccatatcaggagtccgggattgatcatgtttttttttttctgtacaggcaaggaacctatccaacatctgttcttccagtgtgttgtctccactagaaaagtagaaagaacgcagatatagctaacctgacaagatcggagtccatgtaggcattagttttaaatcagtgaagaacctttcagtgagttcctgctcactggagagcaacgaaagcctgaagaatcagagcagtgcgaggatgatgagctggaaggggggttttgctgtgctgagctgcactgcacggttgtatctagcttttcttctgcaaatgatgcagagggaatgtgctctggaaaacctggcatatatgatgttattttcatcttgatgccatgcaaatgtactggaactctaaaacgagagtaatctctaaccaccccagaagggaaaaggttcatttattttataaccccctaaactattcctcagttcactatactcccagaactagcaagacaggtcatttcaccccgtaatgaaatatattttcttttttcgttttctagaaatcctcttttatgttgatcttttcccgatggtagacaacacattctatattataattattttcgtgatttccatgactatctgcatagtagggtgtagctagacctgttcaacacttagtatgcacatgtgtgcaccaaaaagaatgaaaagccatagcacagggcatgattacatctatcacttcacaaattttcaaaataaaacatgcttttataagaaacaagaagatcaataacattctggagttaactgaacaaatttccaggcaaaaaaatggcttagggagttatctggacaatcagaaaactttggatagataggagatacaatgtctagtgagatcacaaccttgagtatgatgtcctacacccagggcgatgtcagcacaggctgcaatctgctaaaggtatgatcgttagatgcctcgtgcttttgcacacaccaagcaatgaaaccatgagttgttaatttcagaagatttccatttatatatgccaatgcaccgcaatcaaaaattataagtaaacagaggaaagaaaaattaagtcgagatttacggagagaatatatcagttgaccctatagcttggaaaacgccctaataatgaataaaaataagaaaaagagatcgaccacttactttcattacggtcagcaatatgatactcttttttccagcaatctgtgcccctgtatatagaaccgtcacaatggctgctatatgggagtatctccatagggggtacaccatcctcaattgggtaaacaattagctgaggtacccctgcagccaagctctcttttgtctccactggtcagttcacaaccagtaacatccacaatttctcctgttgcatcagcttgtgtgtctatgactccaaaggttgtcccacaaacaccttcgtaaccagaaatgacattcccgcttgatgtcctcctatcttctgctccattcccgtacaatgagtaatgaacttgttcattgtgtcagtattgcttttctctatatccttcgtgccttgggaaatggcagagtgcttgcccaaggaaataatgaaacccttggcagaagggttgagaggtcttctttctggttcacccaactcctcgccatttactatattgctgctagccatatttcgatatccatgaagaaatctatcacaaagagcatcaaagtcataaataagatggtaagtattatcagtcaggaatgaagtcatatagaatactagtatatccaagcctgaaattggtttctggtttctatctgtgagcctcttttctctgtgtttggaaatcatcatggattaattgcgtggttttcccccatttgcctttttttataaaagaaatcaacaacacaagaagtgtaaataaaaacccagacttggtcccaatccagatcctttataaaggcttgtttggtttactatcataccaaaaaaaataatcaaaatctaggtaattttttacaatagcaatgttttggtaaggtaacattgaaaatgaatgtgtttggattgatgtcaattaggagccaaaatttatattatggtgaagaaagttctagaattgtgtcaaattgagcatgggcattaccaacctttggcttgaaaccaagccaccacattactaactatttaaactaaaaaatactatatattttggcattgatccaaacatgccctaaaatctatatagtagcaacaaaaggcacaaacattaccgtgagaagagaagggctcaccgggaaacactacaggtaggtcgattggctgcggaatcaaagcaatgaactcgtcgcgcaagcgctgatggccaccaccatggagatgccacgaaagacaggagataaggagaggacgaggcggcaaagaggcggcgcattgaggcaggaaaagttgtccagccgctctccaccgtcgctggtcccgcttcgctctccgccgtcagccggccggtcacgaggcggcggcgccggtgcttcgattgttggctgggatcgatggggttagggattttagtggggagacgaacagtttagttggtgaaaagaaatttatttttgtcattgaccggatattaaaagatattttcaaatacgaataaaagaactaatttcataactcgcctagaaaccgcgatacgaatttattaagcctaattaatccatcattagcacatgtgggtttatgtagcacttatggctaatcatggactaattaggcttaaaagattcgtcttgtgatttccatgcaaactgtacaactagttttttattttatttatatttaatgctccatgtatgtgttaaagattcgatgtgtctgcattgtactgtgtaattttaaaaaaaaattctcctccactctgtgtgtgtttggtttctggaatagttagaaaagaatggaagtttgaggggtggggttgttaaatacgttgtttggatggtatctacggattgaaggagttctactcggacaagactgggtctttaccatatcgtgaggggtccgatatctccgagtcctacttggagatcaagtgacccgcggtatataagataccccctgggtaggacctaaggcatcgaatatcaccaccaacacatccaccacagcctacggagccggagcacgcaggagccaagccaccgggagatctagtgggaccaactcgactacggtctcgtcggtatcatcgagttctgctattccctttataatctgtggttttcatcatataatcccataccaactggattatggctattacttaccaaggagcctgaaccagtataatccttgtcttttgtttgcttgttgtcgtactatgtagatcctcgtaccaatggaccccaataccctctatatctggtctacgggtacccaccgtcgacagcgctgccttcctgtggcgaccctgctgccgcctcccctcccgctggatctggcagaggagagggcgccaccgcttgccgccacctccccgtgggaagcacgccgcccctgcaacactccccgacctccatcaccagagagatagagtggatagagagagaggggtaagaggaggagaagaagaagaagagatagggggagagagaggggatcgcggagaggatgaggagaaaaagaatctcgatgacctattgcatcgtgcactttgtagtccaccacttgactcggctcggttttggaaggtatcggttttaaattaaccatctgttaacaacggaattttgcatcagaattggaaaagaaggaacaagattgaagtggattttgtgcggaattgagttggatttggagtcggactgcgcatcgtctaggcatcgtatcagctagaaacagagtcggagtttgactaagccgatatggcaagtggccgatacggcctgacttgggttcgatatgggcccagattggaatatccgtcattgccaattagagataaaactcgattaaggcaatttggaattatctatttatgttatcctaagttgcaatgatgcatatcttggttgaccacgagtaccaataattgtgtactgaaactggtattggcaatgcggttccatggaattcagttcacgccaatttcctatggcgcaccctctttggtgtcactattaggtggtgccagggcgggttgtgatagccagccattccgaagttcttgccttgccatcccgccatccgccctattgacttgtggaacaaagcttgatggtctattttctgcagtcttccaatggacaatggtagaccgaggtatttcattgggaacaaaggtctggtcactaggatgttttctaggatctcatcgaggccgatgtcactgcatctaatagggcaacctgtgacttttgtatgttggcgcacaacccagttgcctgcccaaagttttgcaatgcctggacatcttcttgtttttaggtcgatgaagaccgccagtcatatgcatatattaagattcggaaacgcaccgaccttcctcaaggattactaatcagcccaaggtccgttgctttggatatatagcagtcgttgctataggtctattgctgtgatgatagaaagtgggtctccttgaaataggtccatggcatgatgtatcacatttgcggggatgctattttgcgggatcttaaaaccgaaagttgtcaacaaccccacaacccagtcatcatatctttgtggaaaactatgttgatgtagttccactttatagagtcaaaagctttttgaaatgtccacttaaagaggagcatgaagttgttatgtatgctcgcccacaaataaagacattttgattgccgaaatcaacaagtgtattagagcaggtgcaataaggctgattttggcacttagctttcctaactcatactctttgtttttagctttcctagatagactgtagttttgtatttatgtttaacgtttgaccgtccgttttattttgaaaaaaaaattacgattagtatttttgttgttattagatgatactttatgtgtgactaattgtttttataattttttcacataagataaacgatcaaacgttggacataaaaactataactatacttaaaatgagacagaaatagtatttgaaaaacgtgctaacagaaaatcgtaaactcaattagcccttatagggctctactcacagtatattcatttcatctcaaacccatggtctgcactgctagaaaataaaaataaaaaataaaaaacgatgagtaaaatttggaaatggagagagcaaagcaaccaactcgctggctcgctgtgggcccggcctatcgacttctccacctgctccgtctgctgcgagtcaaacatgttctcgtcctcttcgtctatgaccagttgaccaccactccactgaccactgatcagtctctgctgctgctgcgtggaactcttccagctcgccgccgagcttccccaggatcacggcggtgagctccggccatcaatcaacattcgcccccgccgtcttttgcggttcgtgttgattccccacctgctgatctagatctgcttctgcttctgtttcgcaggatctttctttgcgtacggtcgaggagcatatggaggggtttctggtgaccgcggccaccggggcactcaagtccgtcctggtgaagctcgccgccatggccggcgaattcgaaggggtgcgcggccagatcagtttcctcgccgacgagttcgccgccatgcacgcgttcctcctcaggatgtcggattcggaggaggggaacgctgaccctcaggacaaggcctggacgagggaggtgcgggagctctcctacgacatcgaggacagcctcgacgagttcatgctccatgtcgtcgacggatccgctaatccggatgggttcatcgtcaaatgcaggaatttgctgaccaagaccatggcccggcgtcggattgccaagatgattgctgagttcaaggcacaaatcaaagaagtgggggagaggaatgcgcgatatatgaatggtgggatcagtttgatgaggacagctaatgcgaccgtagaccaaagagctcttaccatctttcaggatgtgtcatctctagttggggttgatcagccgaagaaggagctcatcgatctgttgatgaaagatgatgggcatgtggcatccgagcatctaaggaccatctccattgttggaattgggggattagggaagacaacgatcgcaaacctcatctttgaggagctgagggagcaattcgattgttctgcttttgtgtctgtgtcaagaaaccctgtgtggatattatgggtaccccatacccatacggcatggttatccgactagtcataggggataacttatatctatgggatatgtaatagatcatgactcgggtattacgtttccttatatattacggaacagcctaaagtcctggtttgataatattgtaaagtagatttaggaaaccgataccgtattggttaaggtttctatcttgtaatcctgccccccaccctatataaggtgggcaggaggccctctagggggcatgagacaacctgatcgtcagatcaatacacactcggcggattcaaatccccaaacaggagtagggtattacctctcattgagagggcctgaacctgtctaaatcctttgtcttcgcatccatccacttttaggtctcgtgcgctacccccttttattattgccgaattcatgtttcgacagttggcgcgccaggtaggggtgcgtcgagattcccgtcggtaaagtgcgttggaatcaatcaccaacatgaccggatcgtacacgcgcgtcattcaccgccgcaagaagcacggagggcgcgtctcatcagagcgttgagcgcctgccagatcgagagatcgcgccgatcggtcgtgtgctgtttggacttccggatcggcgagcagctacgcgtgaccggcagcaaccagccgccggcgcatgatctccgtcgacgtcgcttggtctaattcaatccggccgaccacctcgatcaatctacatccatgcggctgtatagtccacgcgtcagatcgatccgcatgtgcatcacatgacgagggtcaagcagggagcaagactatggcatatgcatctaatcttcttccctgctaatagattgaatattaaatcagattgattgatggtctttttcctctttgctctttcttctggtgtatgcatgttgccggcgaccaaggtgttcaattaggcacggtatgattaagccgtcgctacgcaaggcgaagccgtccactctctgagcgaatccaactcgtgggctggacaggcatgcacgaaagttcacataacgagatcgctggagatgtacaggatgtgtcgattcaaccgccatgcatggattaattaatccagccatacatgcattcaatcgctgagatttatacatttaatttgctgatattaatcagatttattttatttgtttccatgagaatctcggagcatcaccgatggacgtcctgcgggctatggccaccacgggccacacatgggaacagccagcctatggctaatcaggagagaacacgtgcagaaagttgatcttaccgatcaacaagcaccattaatttacttaatcatgcctatatatttttatcattaaccaagttggtttgttgtcttgttctgtaagcacgccgagccatggatcgcttgattagtcctagcgacagagtgcaacaccagcaaccaattttctccgtctcggagtcagtccggtcgagaaaatcaatctcggcgagttcaacaatttaaatctccgactccgccgggttttttccttttcaacttattgttgtttattagattgatctctaaatatcagattaatctcttggtatttcctgttgtttacatgtaatgctgtggcactgctgttgccgattggtgtttccgcctgcacggctggcctattatgccgtcgttgttgggcatctacgacttcactgtcggcctacctccgtcgccgccaactggtgtcctcgcctaaacggttggttggtcacaccaccgttcatgggcgtccacgtcttcaccgatcggctagccttcgttgccgccgactggtgttctcgcctatacggttggatggtcgcaccaccgttcataggcatccacgacttcaccgccggcctgcctccgtcgccgccgagtggtgcctccgcctacacggctggcctattatgccgccgctgttgggcgtctgcgacttcaccgccggcctgcctccgtcgccgccgagtggtgcctccgcctacacggctggcctattatgccgccgctgttgggcgtctacgacttcaccgccggcctgcctccgtcgccgccgagtggtgcctccgcctacacggctggcctattatgccgccgctgttgggcgtctacgacttcaccgccggcctgcctccgtcgccgccgagcggtgcctccgcctacacggctggcctattatgccgccgctgttgggcgtctacgacttcaccgccggcgtgcctccgtcgccgccgagtggtgcctccgcctacacggctggcctattatgccgccgctgttgggcgtctacgacttcaccgccggcctgcctccgtcgccgccgagtggtgcctccgcctacacggctgacctattatgccgccgctgttgggcgtcttcgctttcacaatcgaccgccatcgtcgccgccgactggtgtcttcattgttattgatggacgactttgttcccacattggccacttctaccatcaccaaggggaatattacaaagctaagtcatcatttattttattctttatatgatatttttcctttttctctgcctcactacaccaattggtcttccattgagtagtgagtcgggggctacagatgttatatcatattttttataatatttatcttcattgcttgcgacataatctgagtacaaaagtacctatcgagttatggagttctatcttcctctgctttccgtttggtttgccaatggatggttgcctttgggccgattcctagcacccgggggctcgttggatggaccgagtaacgcaaggtgctaaatattattcggaataaatcaaaagcatagagatgagataaatttattttctgctcttaataattgcaaaagtacccgagtagtaaattctgatccgtgaaactttattccattaatgacgaactcatgtcactcatatgcatgtttgggaagtgcctaggccgactcccggtgcttgatggttatgactagtcggacagagtgtttaaacgtacagagtcatctgctcggggaaatcaaaattgacaagaggagaaatacatatttataaatattttaaaatacttgattttttctcgagtattatatttatatcagatactactcatcctatatgtttgttctgcaggatccagatccagatatgcataaaagggattcatggttttaagcttatctcttacgctccaggaatggatcagtcagaacatcaccaaccggccgcctcgtctgccgccgactggtgcttccgcctgcacggctgacttattatgccgccgttgttgggcgtctacgacttcaccgaccggcttgccttcgccgccgccgactggtgcttccgcctgcacggctgacttattatgccgccgttgttgggcgtctacgacttcaccgaccggcttgccttcgccgccgccgactggtgtttccgcctgcacggctggcctttaatgccgccgttgttgggcgtctacgtcttcaccgaccggcttgccttcgccgccgccgactggtgcttccgcctgcacggctggcctattatgccgccgttgttgggcgtctacgtcttcaccgaccggcttgccttcgccgccgccgactggtgtttccgcctgcacggctgacttattatgccgccgttgttgggcgtctacgtcttcaccgaccggcttgccttcgccgccgccgactggtgtttccgcctgcacggctggcctttatgccgccgttgttgggcgtctacgtcttcaccgaccggccgcctcgaccgccgccgactggtgtttccgcctgcacggctggcctattatgctgccgttgttaggcgtctacgtcttcaccgaccggccgccgcatccgccgctgactggtgtcaccgcttgcacggctggcctgttataacgccaactgatgctatcttcttcacggctggctacatagctgtcactactaataggcatcagtatcttcaacacaagctgcctacatttgccatggctgccgactgttttcttcacttccatggctgcatgattctgccagtgttgattggccttaccatcttcatcgccggtcgtctcgtctgctgctgactagtgccctcgcttctacatctggtttatacaactatcactactgatgaacatcacgtcttccgtcgccgactggatatgttgtcgccgactagtgcttttattttcacaactgcgcgtcttcactaccagtttgctactgttgccgacgactcgtgttcacttcatcacggcaatgcaactttgtcatcatggtagagcgacttcatctttattatcttcggcactggcaaactctattgatgctacttcgcaagttttgctacttcaccaaccacgacgtctttgtgagcctcgacatctcggcatgcgatgccatgttattttactacaacaagaggctctccaatattcaggatttctacttgaacatcttcaacacatatcttcaatcaagcaataactattcgacgacaagaggctacagttctcgactctatgttcagttgtttcccaactaatcaaagagtcgggggctacacaaatacaaggctcaaaatttgacaaattttatgtcaagctgaagaaatcaattcatcaacccacgagtcaactccaggagtcattatcttcatctttgcttcggagcagacattctacttcaacaacttcaaatatttcggtttagacgagttggacaacaacatcaactctcctccaagtgaagcatctacaacagctataacattaatttgatggattattgtcactgacatcatcaccagcacctctgcttcatcgaccctgacatctctgctgttgctaatggatgattatgttttcgccgacttattatttcaccttcacggttgacctactatgcaaatgctgatgagcgtctttgtcattttcattggttgctacactgctattggctggatcaccgacatcgtcatcttcatcatgtcggttgcgtttgttgtcgtcaactacacaactttatcgctgagcgccttcatattcattgctggctgacctgactgccgccgactggtttcttcgcctccatggctatgcgacttcagtacttttgattggtatcactatcttcactaccaccaatatttttgccacctctggtgggcaatattctctctatattggttgtcttgtctctatgccaactgcgtcagctaccatcaatgaacaattgtgactacgtgctcaggggcttactagctcaaatacaagtattatatcttcaatttggacttgctccggatacatgcaacatgaattcatgatcatgggtctattttatatgctcaaagactggactatttattattccccgtaagggttatcaactgaatacttgcgccagtcgggattcaattgttacatctattttggagtatcccataagggataaccactcagatcagaagctattcatatgagctacgcttggtctatattacccggaagatttattactcgggagcatgttatatgcgtcatcctttaaagggtgtcgaaggcatatgttttggcctaggcctaatatgtctgcagcccatattttcaggtgtggcctgtcacgttcttttagggacttaggcactttttgcttaggccaaagtgcgcgtgatcaagtgcccaataccttaaaatccttttataccgcagttacttaactttttaggagttggtacaatgcatcttaaaaggtgtcaaatagtaaagctttatatagctgtcccgctgacttttttatatataagtcaaggtgctgtttgggtttttaagcaattgattggatacaatatcattgcttttcgccacgtaagtgtgcatttttattgaccaatattatggcttaggctgattatatattgtggtcattttctaggcggttggtaaatcctttatgagtttatttactcggattttacaccacatatgccatatatttctaggtgtggtgaaaccatgtgtcttctagggacttaagcacatctgttaaagcagtgtgcgcatggcgtatgcccaatactttggaaattcctttattcacaatatacaagcttctttatagctattttgctatatcactcatcatattttacaaagcagttggtatatcactcggatcatgttatttggaggattcacaccgcatatgctatatattgatatcaagtcacttggttgattacgattatcaaaaccactcggttggttggattatttattccttgactatatgcttggtttgttcacttaaccacatngtcgggggctacacctattaggtgcatctagtcggtgcacctgacttattttcaagccctccacaatcttcagatttggtaaaagtactcgggagaccatgacaaagatgattgaagcactccgctttggagtaatatggttcgagagaagattatcttttcgactgcgaaggtctcaggggctactgtggatattatgggtaccccatacccatacggcatggttatccgactagtcataggggataacttatatctatgggatatgtaatagatcatgactcgggtattacgtttcccttatatattacggaacagcctaaagtcctggtttgataatattgtaaagtagatttaggaaaccgataccgtattggttaaggtttctatcttgtaatcctgccccccaccctatataaggtgggcaggaggccctctagggggcatgagacaacctgatcgtcagatcaatacacactcggcggattcaaatccccaaacaggagtagggtattacctctcattgagagggcctgaacctgtctaaatcctttgtcttcgcatccatccacttttaggtctcgtgcgctacccccttttattattgccgaattcatgtttcgacaccctgacatctctggaatcttgagaattattctcagtgaagttagcgccgaaccttatggcaacactgaatcaggggacatacaacaactcattagaaaaatcactacttcccttaagaacaaaaggtatgcaaaattctaaccttcaatcatatattcttatctccaaaatatatggtgtgtgtattataaggccagaccttcaagattttaagcctttagttcattctttgccggtccaacttgctaagtagtccgtgttttcttttacttgcattcagctctcttatgtgcataccattctgcttttcagattttatttacaaatataggtttgaaccatagcaaaaggttgagcaaaaatcattcgaggacatagtcttgccaaacatgaaaactgctcactttcattatgattttttaataaagtatccataagggacacatttcacctaacaaaaatattgtttttgacaagagggaccagattcttggctgttgaatgaattatggtttagctgattcattagtggatggagtctgagaactacccgccttgttacatttctttaatcaaatatccatgtgctataagtgttacaaccatagctacaatcatgcaaaatcagtaacaatggggacacatttcacctaactgagacatgatttagagaagcgagaccagatttgtgttaatttaacaagtcagctttagttgaattattctaggacgacatgagaccgaaatgggaaaaatatcccctttctaacatttatttgatcaaatatttctactgatgcttataataaaaaaattggcaggtatcttattgtgattgatgacttatggaatatagaaagttggaaaattattagatgtgctttttcaagaagtattactggcagccgaatcatcacaaccacacgtataaatgaagtagctgaatcttgctgcttcccacatgtgcatcgggtatataaattaaggcctcttcattttgttgattcaaaaaggttgtttctgaagagaatttttggtctggaggaatgtccatcacacctgactgaagtttgttgtaacatattggcaaaatgtgatggtttacccttggcaactattgcaatatccagtttattggctacaaaagcaccgacagaagatcaatggaatcaagtggaaaagtcaattggttatgcattggaaagaaacgaggatgtcaatggaatgataaggatactgtcgcttagttactttgatcttcctcataacttgcgtacatgtctattatatctatgtacatttccagaagattatattattcataaaaaacggttggttagaagatggattgcagagggatttattcacgaggaacatggacatacattatatgaattggggcagaggtgtttcaatgagctgatcaatagaagtttgattgagccaaggtatattggcaagttcggtgaggtgaaatcctgtcgagttcatgatacgattcttgatttcatccggtcaaagtctattgaagagaacttcgtaaccttgttaggaattcctaacgttcctattgatcggcagaagaaggtccggcggctatccctccttgttaatactgaagagtattatagcagtttggagngagaatcagtcataaaatatgtcctggataaaaaagaagatgatagcaatgagcaggaagataacagtaacggttttcatatcctaaaaaagttgaatttgggggccccccaaaaaaattgggggtccctttaacccggggaaaattttcgggcccctttaaaaaaaccatattttcttccaacattctgtgaaagtcccatctttgttgcagtttaggcggttgcgtgtgctcgactttgaaggctgtgagcagttagaaaatcatcaccttgcaaatatagagaatttattgcacctgaagtacctcagcatcaaagatacaattgttaatgtgcttccgactcagataacaagactacgatgtttacagacattgaatgtagatgtaagaggggcaattaacattccaacacatatttatcgacttcgacaactgacttatctacttgttgatatgagatgtcaactgccggataaaattgggaacatgcaagcattgcaagagctcaaagttgtgaatgtgcttgcgcagtcactgaacacgctgcaaggacttggtaaattaacaaacctgaggaagcttagtatatttatg

SEQ ID NO: 4720 - DNA, 7110 bp, Oryza sativa
tcaacggcgtcaaacatttcgaaacggagggagtatatgacaagcgaaccatagcttgtcctatcaagttatccaatcaaataagaaattacatcaccacttttatataaaccaaacaaaaaattgaataatcccatccaacaaaagcatctatctcccatcgtatcttggcctccaatcaaatgaaaacaatcttgcccctccaaaggctccaaccaaatgagaaaagttattgactggaccatgaccagggttcatcgctttatgacataacaacatgtaaacactgaaaactaaagacaagtgtacttatttttcatctgatcattctgttttttaagatggtctcaggggcggatctatagtattagcatcggtgtcaggcaacaacgatgactttcgacaaaacttacggttaaactgcttatccatgtattattacattatagtctaggtataaatagcatgctatgacaccgatatacacattataacaccaacgaatcaattttctagattcgccactggatgatctcattatcttgtttgtacgccactcaagacagagatcggcaagtctgttattttggcgagcatgtcagttgaaactaggtccttataaattgccaccgctttacatcgaattgttagtgtcaaacaataatcttaaggcaattttaattttgaaacaatattgtttgaaaattctattgccaacgcacacccccacccacccccacacacaccatgtcgatgattgataatggcactgtcacccctctgcaacacgaatgtccagatgcaaggaggttgaagctgactttggtgcatatcgagtttttttttttgaaaacaaggaaattattataagaaacatagaacatgggttattttacaattgataggagagagtagacttctggcatgacagagtctagtagggtaagcaatatgagaaatatttggacagttaataacaggatttgaaaacagactggttctagcttctttagctaacttgtcagccaccttgttgattttccatggaatccatgccacctggaacaaattttcagctatgtctctttgaatttggctccataaaggtctgaggctccaatggcctggttcattgttgaagtctcttttcttgatcgtgtccgctattactgaattatcagttaaaaaactagtgcctgcaaagttgaagaatttggcaatctccatagctagttgcagtgccaccagttctgcctgcaaagaatattgagctacctcgcttttggctttaataaaagagatttgctgaagtatgtcaaacggtactaaatcattttcgatcgttggatctagctaggcagggtattagaccagagcaaatctcttaataaaaagagcattgtgtgtcatcggcatgtggaagaaaataccaatccctatgaaagtgttctcccaagctgcatctatataacatctattgccctccgaaatggtttccattcttcttttgttttcctcctcctgagattccacctgcaaattatgatttgtagagtatatgtatttatcatagcttctgccgcaaaacacaaaacacacttgggtcggctcctttaagatgccctgaaatttcagatcatttctggccttccaaagctaccacaagataatgaaaagatttatggatatcaattttattagtactattttttttagataaaggattataaattaacccggcctctacaccttttaggaggtgaccatttgaggaaatgtaagcaatgatgtgagccagagaaacattatcagggaaaatgtcagtagaaagatttgcttcagaaattctccacgttattctgctaaaggaacaacgaaagaaaagatggaaatatgtttcaggttgattgcacctacagcaattagctgaaatatcagaaattctgtgatttaacttttgcgctgaatgcagaactttctccgagcagtctccaagcaaaaactttaaccgtgggaggagtaagcttgtccttccagatgattttgatgatagaagtcaccaggggatttacctgttgaaagttatgaatctgatcacttttcataatctccttatatgcactcttagtattacaaattccattcttagaatgcttccaagttccaacaaagcaattcattatcattatgaatgatctggacctgcaaaattttgttcacagcttgattttcaaagattaaattaagtttctcaccatcccaggttttattatcagtccacaggtcagcaaccatggttgtgaatagggtcaagtttaatgaaatcatgaatatcagaatctagctcacaccatggttggctccaatgaatgcttctccgtggctggccagctgtatgggtgttagggtgtatggcacgaacaatacaaatcataaaaaaaaaaaagaggaaacaatattaagtcccagtggatgcccttccagtgcgtctgaattcatccgatgaaaccggtttgcagtgtgatcctcttctctttgctcattcatcgctgccttccggcttaaacttagtgtttttagtttgatttgacccaacaataaaccatgctgatgtgtcgatttttctaatatatagttaaatggacggaaacagtcaaaatcgacatctctccggaaatgattctcctttggttgagaaaattaatcatatttttcacttttattattcagtgctgacagcaataagatgctacaagaacatagaaaaatcaaattatatatatatatagaataataataataataataataaagaaaaatagtagctcttatacgaaaatgtcggttggtcattgaggaattttcatgattacctgcattcgtttggagaacaaagggagtttgtttatttcgttttccgcgtgcgtacttcccaaactactaaacggtgcgttttttgcaaacattttctatatgaaatttactttaaaaaatcatattaatccatttttaaagtttaaaatagttaatacttaattaatcatgcactaatggcttatctcgttttgcgtatcttcccaattttcttaatcccctctccctcaaacacagacaaaattttatgtagatcgtgcattctacaacttttatgtagttaagtagttagtacacactagagctcaacatgtaagaatgtcaaatcatcattccatactattttcatgatatttcaacatatatttatccatcatgtgtataatgtctaacgtaagttcatctatatatttcacacttgcatctagtttacatgaggtcaacaaccagaaccttgcgatgattgacatatatagtaataattgtataatgcttcttctgagaataacacttagtctctgcaattttcgctaaactatttgtggcagctggctttattggatatgcctatgccagtagttggttccagtattaaattgctataaaaatagtatattagcaaataattacatatatactacccggtagtcaacccttgtattcttcactactaaaaaaacattttttcatgcgatcaaaataggtttttccatgcggaggaattgcctgtctgcactagaagtatgggaaaatcaatattttcacgtgcgggcagctcaaccgcaggggaaaatcatcttccagtgcagtcaggttaagtggactgcatgggataccgcccacacgtaaaagaaaaacaaaataaaaaaaataaaaaatcctaaccctagaatcgcctgccgccgctcccggctgccatcatcgcgccgtcgccgcaccctgttgctgtcgtcgtgacgccgcagcgaccgtcgtctacgcccgagaccaccaccgtcgcgccggctgccaccgccattggatccgcacgcatccgggtgggggacggccgccgccgctggatacgggcaggggccagttgccgccgccgtctgtgcccacggtagagccacacggtgcctcgctgccatccgcgcccgcgcctgctggccgccactgccgctcgtcgtcgccgtgatcgcgccaccgccgctcccgattgagcccgccgctgctggcaacgccgcgaccaaccacctttgccgctagctcctgcgggctgcctcctactcctccttgtgcgatcggtggggaggagagggaaggagaggagaggaaagggaaaagtaggagaggaaagtggaaaagtaggtgcgtagacagagagagaggggtgagagtaattgagggatttaatataagggaaaaggaggagagaagttgaaaattttgaagtgagtaggagggaaaaggaggagaggtattttcgcgggcggttcagttaagaggcccgcacgtgaaaatcgattttcgcctgtgggccttttaagggtctgcatgtgaaaatacccttatattttcgtgatggttaagaggcccgcatgcgaaaatcgattttcgtgtgcgggcctcttaagggtccacatgcgaaaatgggacgccaatttatccgtgcgaacgcaaaaacagtccgtctacaatctaaatagctcctcgtacaggaaaaatccttttttagtagtgcttatgaatggcttgaatattagggttttatgaacttaaactgtatatttaggttgtagataaatacattttaaaatttactagaaggagcataaactgtaattcaagaaatggatggcttactgaatcgtttttccttctttattattagccctctatggctctatagtatagacttccaagattgtttaggtagtacgatggatcagtttctcagcgaaatctgtctatctcaggtactctcgagatcttctgcacaagctaaaaatttcacgtctacttgaattcttcaaatttgtataaattttgtttgaactactttcaaatcagttaacatgtgtctgaccaacgagatgagtctgtttagtcctttttcttttctagattatgatataaacgtaggattgaaacgcaagaactaagccaaccgaaggaggggggggtttgaatggttggcatacccaaaaacccaaactttatgcggaattaaaagttaccctcaaattcgacggatcgcggtctgaccgaagtagttgcgtcggtctggccgcctggaagctgtcggtctaaccaagattggaactctggtcggaccgccgagatcacctgccgcgcctgaagttgccgccggtctgacagccgctgaccccccagtatgaccgccgcgattccgccggtctgaccgctggtgtctcgccggttagaccgctgaacccgagaaaacacaaatcgaagaactcttaaagtagataacaactttattgtttctctctgtgtttacaagttgcaacaacagcacccctcacgaaaatctcgactaaacttgaaacactaactcaactctcaactcaatgctctcaaaaccgataccgggaagcctcacgctccctctctatttatacatgaggtaggcagcctaaaggcacgaacaaaactcctactagaagtcctaatccacctaggaaaccttctcgtacaagaaacaaactttacaaactccaatcataccaaatttggactccttccaaattcgactccgcatcccatacgcacacaataagtccatcgtatgccttatggaatattcaccaaccacgtgcattgaactctagcctaatgtagcgcccgttctgtcgtggcgcctagcgggaaaactatctcttaaaaatcctaattgcgaaatctgtttctttgcttgttgtctagtgtccgtgccatctcagatctcgaatccccgatctatcgtcaagttcaatcccgaatccaaatccttcccaaatcaaatccctccgcaaaagtctactttgcctccctcgggttcgatgggccgaattcctctcggcccatctctccctccctccccatctctctctctctctccccgctctgcccgtgagccgcgccaagccctcctccctctccgctctcgctgccgttcccgccgatgccgcccaaatcgccgcgccacccgggcgcgcgcgccgtggtggccgaccggccagtcgccgccgccgtcagcgcctgccgcgcctgccgcccgtgtcgttgctccgctccaaaccgcccccgccgtcatcgccgtcgtcatcgacccggcccccgccactccgcgcgttagcctccaagggacggaggcagagctcctcccccctctgtcgcgtcgcccccatcccctcctccttttccgaaagtggcaaggggcaagccccctttcttccttccttttcctttttcttcctccgccggcgtcattcccctcctccctgtcgccgatttggccgctagccggagcgccagctcactggcttgaccgtccaaagtcggttcccctctcccaaaccgacattgtcgcccatataaacccaagcttcaccccctttcctttcctctcccattcgcctccactccagtgtcgccgcctcccgtgctctattcgctattgccgttcgccgtcgtgcgtgccggaggagccggcacgagcgaggacacggaaggggactctgggcgctcgccttcttcctcttccccggcccgaggctggagagatcactcccgtgccgtcggcctctcgtcacagcgccccgcctcatctcggtagtgcattcccccgttctccctcctcgatccatctcttccccttagttttcggtagtagcatgtgtagccttcctgtagctagctggcgccgccccgaccgttgccgccgctagctgtgtgctcgccgccgtcgccgcccgtgctccatagcgcccgctcgtcgctggcctcgctcggcgtagctccgcccaatccgacgctagcaacggattcccatagccgcgtagatgctctcaccgccgggaatcggccccacgtgacctcgtcgccgtttccccttccctcgccgccggttgccgccgccgcaatccgccgccgttgagttccctccggcgaatccgagccgttggctcgtctcccctcgtcccatgcaaccccccggtgtgctcgctttcacctgtatcgccgtggttcgct

SEQ ID NO: 4721 - DNA, 7702 bp, Oryza sativa
cgcaagttatgaggaagatcaaagtaactaagcgacagtatccttatcattccattgacatcctcgtttctttccaatgcataaccaattgacttttccacttgattccattgatcttctgtcggtgcttttgtagccaataaactggatattgcaatagttgccaagggtaaaccatcacattttgccaatatgttacaacaaacttcagtcaggtgtgatggacattcctccagaccaaaaattctcttcagaaacaacctttttgaatcaacaaaatgaagaggccttaatttatatacccgatgcacatgtgggaagcagcaagattcagctacttcatttatacgtgtggttgtgatgattcggctgccagtaatacttcttgaaaaagcacatctaataattttccaactttctatattccataagtcatcaatcacaataagatacctgccaatttttttattataagcatcagtagaaatatttgatcaaataaatgttagaaaggggatatttttcccatttcggtctcatgtcgtcctagaataattcaactaaagctgacttgttaaattaacacaaatctggtctcgcttctctaaatcatgtctcagttaggtgaaatgtgtccccattgttactgattttgcatgattgtagctatggttgtaacacttatagcacatggatatttgattaaagaaatgtaacaaggcgggtagttctcagactccatccactaatgaatcagctaaaccataattcattcaacagccaagaatctggtccctcttgtcaaaaacaatatttttgttaggtgaaatgtgtcccttatggatactttattaaaaaatcataatgaaagtgagcagttttcatgtttggcaagactatgtcctcgaatgatttttgctcaaccttttgctatggttcaaacctatatttgtaaataaaatctgaaaagcagaatggtatgcacataagagagctgaatgcaagtaaaagaaaacacggactacttagcaagttggaccggcaaagaatgaactaaaggcttaaaatcttgaaggtctggccttataatacacacaccatatattttggagataagaatatatgattgaaggttagaattttgcataccttttgttcttaagggaagtagtgatttttctaatgagttgttgtatgtcccctgattcagtgttgccataaggttcggcgctaacttcactgagaataattctcaagattccagagatgtcagggtgtcgaaacatgaattcggcaataataaaagggggtagcgcacgagacctaaaagtggatggatgcgaagacaaaggatttagacaggttcaggccctctcaatgagaggtaataccctactcctgtttggggatttgaatccgccgagtgtgtattgatctgacgatcaggttgtctcatgccccctagagggcctcctgcccaccttatatagggtggggggcaggattacaagatagaaaccttaaccaatacggtatcggtttcctaaatctactttacaatattatcaaaccaggactttaggctgttccgtaatatataaggaaacgtaatacccgagtcatgatctattacatatcccatagatataagttatcccctatgactagtcggataaccatgccgtatgggtatggggtacccataatatccacagtagcccctgagaccttcgcagtcgaaaagataatcttctctcgaaccatattactccaaagccgagtgcttcaatcatctttgtcatggtctcccgagtacttttaccaaatctgaagactgtggagggctggaaaataaagtcaggtgcaccgactagatgcacctaataggtgtagcccccgacaatgtggttaattgaacaaaccaagcatatagtcaaggaataaataatccaaccaaccgagtggttttgataatcgtaatcaaccaagtgacttgatatcaatatatagcatatgcggtgtgaatcctccaaataacatgatccgagtgatataccaactgctttgtaaaatatgatgagtgatatagcaaaatagctataaagaagcttgtatattgtgaataaaggaatttccaaagtattgggcatacgccatgcgcacactgctttaacagatgtgcttaagtccctagaagacacatggtttcaccacacctagaaatatatggcatatgtggtgtaaaatccgagtaaataaactcataaaggatttaccaaccgcctagaaaatgaccacaatatataatcagcctaagccataatattggtcaataaaaatgcacacttacgtggcgaaaagcaatgatattgtatccaatcaattgcttaaaaacccaaacagcaccttgacttatatataaaaaagtcagcgggacagctatataaagctttactatttgacaccttttaagatgcattgtaccaactcctaaaaagttaagtaactgcggtataaaaggattttaaggtattgggcacttgatcacgcgcactttggcctaagcaaaaagtgcctaagtccctaaaagaacgtgacaggccacacctgaaaatatgggctgcagacatattaggcctaggccaaaacatatgccttcgacaccctttaaaggatgacgcatataacatgctcccgagtaataaatcttccgggtaatatagaccaagcgtagctcatatgaatagcttctgatctgagtggttatcccttatgggatactccaaaatagatgtaacaattgaatcccgactggcgcaagtattcagttgataacccttacggggaataataaatagtccagtctttgagcatataaaatagacccatgatcatgaattcatgttgcatgtatccggagcaagtccaaattgaagatataatacttgtatttgagctagtaagcccctgagcacgtagtcacaattgttcattgatggtagctgacgcagttggcatagagacaagacaaccaatatagagagaatattgcccaccagaggtggcaaaaatattggtggtagtgaagatagtgataccaatcaaaagtactgaagtcgcatagccatggaggcgaagaaaccagtcggcggcagtcaggtcagccagcaatgaatatgaaggcgctcagcgataaagttgtgtagttgacgacaacaaacgcaaccgacatgatgaagatgacgatgtcggtgatccagccaatagcagtgtagcaaccaatgaaaatgacaaagacgctcatcagcatttgcatagtaggtcaaccgtgaaggtgaaataataagtcggcgaaaacataatcatccattagcaacagcagagatgtcagggtcgatgaagcagaggtgctggtgatgatgtcagtgacaataatccatcaaattaatgttatagctgttgtagatgcttcacttggaggagagttgatgttgttgtccaactcgtctaaaccgaaatatttgaagttgttgaagtagaatgtctgctccgaagcaaagatgaagataatgactcctggagttgactcgtgggttgatgaattgatttcttcagcttgacataaaatttgtcaaattttgagccttgtatttgtgtagcccccgactctttgattagttgggaaacaactgaacatagagtcgagaactgtagcctcttgtcgtcgaatagttattgcttgattgaagatatgtgttgaagatgttcaagtagaaatcctgaatattggagagcctcttgttgtagtaaaataacatggcatcgcatgccgagatgtcgaggctcacaaagacgtcgtggttggtgaagtagcaaaacttgcgaagtagcatcaatagagtttgccagtgccgaagataataaagatgaagtcgctctaccatgatgacaaagttgcattgccgtgatgaagtgaacacgagtcgtcggcaacagaagcaaactggtagtgaagacgcgcagttgtgaaaataaaagcactagtcggcgacaacataaccagtcggcgacggaagacgatgatgttcatcagtagtgatagttgtataaaccagatgtagaagcgagggcactagtcagcagcagacgagacgaccggcgatgaagatggtaaggccaatcaacactggcagaatcatgcagccatggaagtgaagaaaacagtcggcagccatggcaaatgtaggcagcttgtgttgaagatactgatgcctattagtagtgacagcgatgtagccagccgtgaagaagatagcatcagttggcgttataacaggccagccgtgcaagcggtgacaccagtcagcggcggatgcggcggccggtcggtgaagacgtagacgcctaacaacggcagcataataggccagccgtgcaggcggaaacaccagtcggcggcggtcgaggcggccggtcggtgaagacgtagacgcccaacaacggcggcataaaggccagccgtgcaggcggaaacaccagtcggcggcggcgaaggcaagccggtcggtgaagacgtagacgcccaacaacggcggcataataagtcagccgtgcaggcggaagcaccagtcggcggcggcgaaggcaagccggtcggtgaagtcgtagacgcccaacaacggcggcataataagtcagccgtgcaggcggaagcaccagtcggcggcagacgaggcggccggttggtgatgttctgactgatccattcctggagcgtaagagataagcttaaaaccatgaatcccttttatgcatatctggatctggatcctgcagaacaaacatataggatgagtagtatctgatataaatataatactcgagaaaaaatcaagtattttaaaatatttataaatatgtatttctcctcttgtcaattttgatttccccgagcagatgactctgtacgtttaaacactctgtccgactagtcataaccatcaagcaccgggagtcggcctaggcacttcccaaacatgcatatgagtgacatgagttcgtcattaatggaataaagtttcacggatcagaatttactactcgggtacttttgcaattattaagagcagaaaataaatttatctcatctctatgcttttgatttattccgaataatatttagcaccttgcgttactcggtccatccaacgagcccccgggtgctaggaatcggcccaaaggcaaccatccattggcaaaccaaacggaaagcagaggaagatagaactccataactcgataggtacttttgtactcagattatgtcgcaagcaatgaagataaatattataaaaaatatgatataacatctgtagcccccgactcactactcaatggaagaccaattggtgtagtgaggcagagaaaaaggaaaaatatcatataaagaataaaataaatgatgacttagctttgtaatattccccttggtgatggtagaagtggccaatgtgggaacaaagtcgtccatcaataacaatgaagacaccagtcggcggcgacgatggcggtcgattgtgaaagcgaagacgcccaacagcggcggcataataggtcagccgtgtaggcggaggcaccactcggcggcgacggaggcaggccggcggtgaagtcgtagacgcccaacagcggcggcataataggccagccgtgtaggcggaggcaccactcggcggcgacggaggcacgccggcggtgaagtcgtagacgcccaacagcggcggcataataggccagccgtgtaggcggaggcaccactcggcggcgacggaggcaggccgacggtgaagtcgtagacgcctaacagcggcggcataataggccagccgtgtaggcggaggcaccactcggcggcgacggaggcaggccggcggtgaagtcgcagacgcccaacagcggcggcataataggccagccgtgtaggcggaggcaccactcggcggcgacggaggcaggccggcggtgaagtcgtggatgcctatgaacggtggtgcgaccatccaaccgtataggcgagaacaccagtcggcggcaacgaaggctagccgatcggtgaagacgtggacgcccatgaacggtggtgtgaccaaccaaccgtttaggcgaggacaccagttggcggcgacggaggtaggccgacagtgaagtcgtagatgcccaacaacgacggcataataggccagccgtgcaggcggaaacaccaatcggcaacagcagtgccacagcattacatgtaaacaacaggaaataccaagagattaatctgatatttagagatcaatctaataaacaacaataagttgaaaaggaaaaaacccggcggagtcggagatttaaattgttgaactcgccgagattgattttctcgaccggactgactccgagacggagaaaattggttgctggtgttgcactctgtcgctaggactaatcaagcgatccatggctcggcgtgcttacagaacaagacaacaaaccaacttggttaatgataaaaatatataggcatgattaagtaaattaatggtgcttgttgatcggtaagatcaactttctgcacgtgttctctcctgattagccataggctggctgttcccatgtgtggcccgtggtggccatagcccgcaggacgtccatcggtgatgctccgagattctcatggaaacaaataaaataaatctgattaatatcagcaaattaaatgtataaatctcagcgattgaatgcatgtatggctggattaattaatccatgcatggcggttgaatcgacacatcctgtacatctccagcgatctcgttatgtgaactttcgtgcatgcctgtccagcccacgagttggattcgctcagagagtggacggcttcgccttgcgtagcgacggcttaatcataccgtgcctaattgaacaccttggtcgccggcaacatgcatacaccagaagaaagagcaaagaggaaaaagaccatcaatcaatctgatttaataatcaatctaattagcaggaagaagattagatgcatatgccatagtcttgctccctgcttgaccctcgtcatgtgatgcacatgcggatcgatctgacgcgtggactatacagccgcatggatgtagattgatcgaggtggtcggccggattgaattagaccaagcgacgtcgacggagatcatgcgccggcggctggttgctgccggtcacgcgtagctgctcgccgatccggaagtccaaacagcacacgaccgatcggcgcgatctctcgatctggcaggcgctcaacgctctgatgagacgcgccctccgtgcttcttgcggcggtgaatgacgcgcgtgtacgatccggtcatgttggtgattgattccaacgcactttaccgacgggaatctcgacgcacccctacctggcgcgccaactgtcgaaacatgaattcggcaataataaaagggggtagcgcacgagacctaaaagtggatggatgcgaagacaaaggatttagacaggttcaggccctctcaatgagaggtaataccctactcctgtttggggatttgaatccgccgagtgtgtattgatctgacgatcaggttgtctcatgccccctagagggcctcctgcccaccttatataggggggggggcaggatta

SEQ ID NO: 4722 - DNA, 6161 bp, Oryza sativa
cggtgtcaaacattttgaaacggagggagtatatatttctctcatcaaattataagcctctgagattttgttttatgtatgaggttttattccatctttaaagaggtatatacctattcataatttgagaggtaaaaattaaaccgattaaactgattagaaaacaagtttatgattatgcacctgcaacattattatgattgttgtgaggtatagagaggtatatataactcatattgttagtccggaggtgtatactcatttccaatcatccaacatgtaaaaataattttggtacctccttttatgtagggtaaaagtaaaggtatatcttaagtatgaagaggcatatacctcttcaagaatgggagaaaatctctttatgtatttaattgtaagatacaacctctattttttaatagatcatgtcaccgatttttaaataatgtttgaccattcatcttattagaaaaataatgtaaatatgctaaagtataagacatacttaaagtttatttttaataataaaacatgtcataacaaaataactgatatttgtataaatttcttgaatagtgtactgatactaaggtatatgcgagactacggtaaaagcaacggagacaaggtttttatataggctaagacaccctgctgataggtaatagcctactcttattgatcgaagccggtattaccattatatgtcaatatcttacaagtgcaatgacgtataggagaccataatctagtctatgtcagaatagtggcgtaaagctcgagcaggtgatcaacggttagctattgtcggctttcttgaacaggaacttggccagattggagtcgacttgtattgtcttgttggcttttgtggctcatgttggttttgtgatcgccttggtcaagatttgtaccctctattcctaggggtgttctatttatactcttagatgaccccttgtctaagcagaaccacataaacaagtgcagatactatctaagtaaatcttgtggtgtccgagtaggactctgtgtaggatcgaatcacaagaactaagccaaccaaaggaggggtgaatggttggtatacccaaaaactgaaaacttctagcagaaataaaagttaccctcaatttcgatgagatcggtctgaccggagtagattagccgatctgaccgaagcgtagtcgccggtctgaccggtgtagatcttccggttggacagccctggaatccctgccgcgcctgatgccgccaccggtctgaccgcaggtcacccgccggtctgaccaccgcgatgccgccggtctgaccactggtgtgccgccggttagaccgccgaaacccagtgaaacacaaatcgaagaattcttaaagtggatgacgactttattgattctctctgtgtttacaaagtgcaccaacagcactccttacaaaaatttcgactaaactcgaaaccctaactcaaaactcaactcaattgctctgaaaagcgatatcgggaagcctcacgctccccctctatttatacccgaggtaggcagcctaaagccacgaaccaaactcatactaagagtcctaaacaccttaggaaaccctctagtacaagaaagaaactttacataaccaatcgtaccaaatttggactccttccaaatttgactccacatcccatacgcacacaatacctccatcctatgccatatggaatctccatcaaccacgtgcatcaactctagccttagtatcccacatgatctctgaccaccacggacgtcgtcttatccccaagccgactcccggtccatcaccgcaaatactctcccgagacatcgagtcacctacacatgaaataaacaaagaaaccatattccgagaccaagctatctccaacttgactcattagtagcaaacaacagtattgcatacgtatagtatccatctagaagccataatcatgaaacaatcacggatatccaaacaaacaactcgaaaccgaaaccgacacagcgtcggccaatcagaccgtgggctggccggtccgaccgctcgatcaccgccggtctgaccggcatacacagcccggtctgaccggtcacataaaatgataaacctgcgatcacctatgaatccaatcatctccaaaaccacttcgtgaataaattctaaataacaaaaccaataatctccaatgccaattgttcatcatagaataataatcaaaaacacatttggttttacaatctcccctttgatgaacacattggcaaacctatcaaaaatgttttggtgtttggaaaaataaaaacaaaagtggtaaaaagcacacgtcgtacaaacgtacacatcgtgctcaaaaatccaaaagaaaacttctccccctttttaaaagaaagaaattcccaattgaacaaaaacatgctcttctcaacaactccgaaaattcaccttgcttctcccaaaaatccaaaaattttcacaatacttctcccccttttgacaatgatttcatccaacataggaattatgttcattaatgttcaagagcttagcatacatataatatatcaagtcatttgttgcaataaaaagaagataaacctatctataagataacaagcatgtattaaagtataaccataaaccaaagattttacaattaagcttgaatcaacaatcgaaattcatgatttcatacgatttataatgcaacatctgaacaagcacataggttgaagaataaacactaaacacatatacctattacatttatcactctttctcaaataacctttagcacaaaataaccaagagaattttttaactttttcttttcttgagccttttttctcatatttttctcttttattccgggtacgtccctgtcgtcaagactgtttctagggattcggcacccattattttgctcacatcgaatacgtccttgtcgtcaagactgtttccaaggattcggtattcatttttttcatattttttattctctttttcacaatgagcaattaaagctatttgaggaataacaattcaataaagcatatatatatagagcatttataaatcaaaccacatgctagcatcaacattgcatattttcttaattcaagtatagaatttaagtgtcatgcatcatctcccttaaaagcaaaatctaaatctcatgaaaagactagaatacatacaagctatgctagagacaaataaaccttcaaagtattgctagcatgcgcaagaaaataccatatgtataaacaaagttctcttttctcaattttttctcattgtcatattattgcttgataaaaccatgagatacaaactccccctcaaaccatgccaaaaggatgaattattcccaattcacaacgaagaaaagcaaagcgattatgatccaaaggtttatggaaaatatcagcaatttgcaacttggtatccaaaaactgcaattcaacatctctcttctcaacatgatccctcaaaaagtgaaaacgaatatcaatgtgctttgtacgtgagtgttgaacaggattcttagcaatattgatagcactagtattatcacaaaagagaggtactttctcaaaagtaagaccataatctttcaaagtagataaaagccaaagaatctgtgaacaacaactagcagcagcaacatattcagattcagtagttgattgagcaacactagattgtttcctagaagaccatgcaatcaatgatgtaccaagaaaatgacatattccactagtacttttcctatcaattctacaacctccaaaatcagcatctgaatatctacttaagcatatagaagatgaagtagaataccaaattccaaactcaagtgtatgattcaaatacctcattattcgcttgaccacttgacgatgtatgtctggcctagaagcttgaaagcgtgcacacaaacacacaacaaattgtatgtctggcctagaagcagttagaaacaacaaagatccaatcatacttctatactctttttgatcaacagcttcaccatcttcatcaggatccaacacagctgtagaaccaataggtgttgaaattggcttgcaattctccatcttgaaccttctcaaaagatcctttgtatacttcgtttgatgcacaaaagtaccttgagatgtttgcttatttgcaatcccaaaaagtacgatacctcacccatcatgctcatctcaaattccctgcgcatagtctcagtaaaatccacaaccaaagcgtgagttgaacaaccaaagatgatatcatccacataaatctgaacgaacagttgattatcaccatgcttaagaacaaaaagcgttttgtcaaccattcccattgtaaaaccttacgcaagcaaaaagttcttaagcctatcataccatgctctaggtgcttgtttcaaactatacaaagctttagacaatttaaaaacatggttgggaaaatcaggattttcaaaacctgatgattgtttgacataaacttcctcctgtataaaaccatttagaaaagcacttttcacattcatttgatacaatttaaaaccttttgaagcagcaaaagccaacaaaagtctaattgcctcaattctagcaacaggagcaaaagtttcatcaaaatccaaacccttcacctgggtaaaaccttgagcaacaagtctaactttatttctcacaatcaaaccatcctcattttgtttatttttgaaaacccacttgattccaataatattttgaccaggcacttggttccaataatattatgcccagaaggtggttcaactaaagtccaaactttgtttctctcaaaattttcatgttcttcatgcatggcgttaatccacgattcatcagttaatgcatgtgaaacatctttgtgttcaaaagaagcaacaaatgcagaatttgcacaaacatcatgagtcgttattttagaccttgtagtccgctcacctatattactaatgatttgtttcggcggatgtcgtcattgaatatgcaaaggaacagcgacttctgaagttgattcacgttctgtatcagcactggtcgaagttgtaatctctagaggaccatctcgatcagcatcaacagtacccgaacccgacaagcctggccggtctgaccgcaccccctgtggtggtttgaccggtggcatgccggcggtctgaccggcctggcgctcggtctgactggccgagctgacctcgtcgtcgtcgtcgctctcgtcttcaaaaatacgaccatcctccccctgaacctatgacaatatatctgaaatatcgggtctagtacctagactagcctcatcaaaagaaacttcgcaagtttcaacgattttgttagtctccaaaataagtacacaatagcaacgagaatgtgcagggtaaccaagaaacaatcgatcggtagaacgtgcctcaaacttatacaaatttctagatttcaagacaaagcatttgcaaccaaaaacacacaaatgtgaaactttgggttgacatccaaatcgaagctcataagaagtttttccaagttttgaccttaagaaaacccgatttgaaatatagcatgcagtgttaatcgcctcagcccgaaattttctacgagttttatactcatccaacatcattctagccatctcaaccaaaacacggtttttcctttcaacaacaccgttttggtgcggaacacgaggagaagcaaattcatgttcaagacctctttcattgcataaatgttcaaatgaagcatttttaaattcaccaccattatcacttcgaattcttttcaaagagccaggaaattcaagatccaatcgaagaaactaaccacgaaagtgttgaaaagactcgtccttagttgccatgaagaaaacccaagaatatcgagaaaaatcgtcaacaataaccaacacataccactttcctccaacatattgcactctagctggaccaacagtgtccatatgtaatagctgtcccggtgcatccgtcatcacagaaacaataggagcatgtgaagaagcaaccatcttagcatgacgacacggtgtacaaaccaaatcaagatctttcttaagtttaggcaaaccacaaacaagatccaaaccacttaactaggggctgcaggaat

SEQ ID NO: 4723 - DNA, 28696 bp, Oryza sativa
atgacgcatataacatgctcccgagtaataaatcttccgggtaatatagaccaagcgtagctcatatgaatagcttctgatctgagtggttatcccttatgggatactccaaaatagatgtaacaattgaatcccgactggcgcaagtattcagttgataacccttacggggaataataaatagtccagtctttgagcatataaaatagacccatgatcatgaattcatgttgcatgtatccggagcaagtccaaattgaagatataatacttgtatttgagctagtaagcccctgagcacgtagtcacaattgttcattgatggtagctgacgcagttggcatagagacaagacaaccaatatagagagaatattgcccaccagaggtggcaaaaatattggtggtagtgaagatagtgataccaatcaaaagtactgaagtcgcatagccatggaggcgaagaaaccagtcggcggcagtcaggtcagccagcaatgaatatgaaggcgctcagcgataaagttgtgtagttgacgacaacaaacgcaaccgacatgatgaagatgacgatgtcggtgatccagccaatagcagtgtagcaaccaatgaaaatgacaaagacgctcatcagcatttgcatagtaggtcaaccgtgaaggtgaaataataagtcggcgaaaacataatcatccattagcaacagcagagatgtcagggtcgatgaagcagaggtgctggtgatgatgtcagtgacaataatccatcaaattaatgttatagctgttgtagatgcttcacttggaggagagttgatgttgttgtccaactcgtctaaaccgaaatatttgaagttgttgaagtagaatgtctgctccgaagcaaagatgaagataatgactcctggagttgactcgtgggttgatgaattgatttcttcagcttgacataaaatttgtcaaattttgagccttgtatttgtgtagcccccgactctttgattagttgggaaacaactgaacatagagtcgagaactgtagcctcttgtcgtcgaatagttattgcttgattgaagatatgtgttgaagatgttcaagtagaaatcctgaatattggagagcctcttgttgtagtaaaataacatggcatcgcatgccgagatgtcgaggctcacaaagacgtcgtggttggtgaagtagcaaaacttgcgaagtagcatcaatagagtttgccagtgccgaagataataaagatgaagtcgctctaccatgatgacaaagttgcattgccgtgatgaagtgaacacgagtcgtcggcaacagaagcaaactggtagtgaagacgcgcagttgtgaaaataaaagcactagtcggcgacaacataaccagtcggcgacggaagacgatgatgttcatcagtagtgatagttgtataaaccagatgtagaagcgagggcactagtcagcagcagacgagacgaccggcgatgaagatggtaaggccaatcaacactggcagaatcatgcagccatggaagtgaagaaaacagtcggcagccatggcaaatgtaggcagcttgtgttgaagatactgatgcctattagtagtgacagcgatgtagccagccgtgaagaagatagcatcagttggcgttataacaggccagccgtgcaagcggtgacaccagtcagcggcggatgcggcggccggtcggtgaagacgtagacgcctaacaacggcagcataataggccagccgtgcaggcggaaacaccagtcggcggcggtcgaggcggccggtcggtgaagacgtagacgcccaacaacggcggcattaaaggccagccgtgcaggcggaaacaccagtcggcggcggcgaaggcaagccggtcggtgaagtcgtagacgcccaacaacggcggcataataagtcagccgtgcaggcggaagcaccagtcggcggcggcgaaggcaagccggtcggtgaagtcgtagacgcccaacaacggcggcataataagtcagccgtgcaggcggaagcaccagtcggcggcagacgaggcggccggttggtgatgttctgactgatccattcctggagcgtaagagataagcttaaaaccatgaatcccttttatgcatatctggatctggatcctgcagaacaaacatataggatgagtagtatctgatataaatataatactcgagaaaaaatcaagtattttaaaatatttataaatatgtatttctcctcttgtcaattttgatttccccgagcagatgactctgtacgtttaaacactctgtccgactagtcataaccatcaagcaccgggagtcggcctaggcacttcccaaacatgcatatgagtgacatgagttcgtcattaatggaataaagtttcacggatcagaatttactactcgggtacttttgcaattattaagagcagaaaataaatttatctcatctctatgcttttgatttattccgaataatatttagcaccttgcgttactcggtccatccaacgagcccccgggtgctaggaatcggcccaaaggcaaccatccattggcaaaccaaacggaaagcagaggaagatagaactccataactcgataggtacttttgtactcagattatgtcgcaagcaatgaagataaatattataaaaaatatgatataacatctgtagcccccgactcactactcaatggaagaccaattggtgtagtgaggcagagaaaaaggaaaaatatcatataaagaataaaataaatgatgacttagctttgtaatattccccttggtgatggtagaagtggccaatgtgggaacaaagtcgtccatcaataacaatgaagacaccagtcggcggcgacgatggcggtcgattgtgaaagcgaagacgcccaacagcggcggcataataggtcagccgtgtaggcggaggcaccactcggcggcgacggaggcaggccggcggtgaagtcgtagacgcccaacagcggcggcataataggccagccgtgtaggcggaggcaccactcggcggcgacggaggcacgccggcggtgaagtcgtagacgcccaacagcggcggcataataggccagccgtgtaggcggaggcaccactcggcggcgacggaggcaggccggcggtgaagtcgtagacgcccaacagcggcggcataataggccagccgtgtaggcggaggcaccactcggcggcgacggaggcaggccgacggtgaagtcgtagacgcctaacagcggcggcataataggccagccgtgtaggcggaggcaccactcggcggcgacggaggcaggccggcggtgaagtcgcagacgcccaacagcggcggcataataggccagccgtgtaggcggaggcaccactcggcggcgacggaggcaggccggcggtgaagtcgtggatgcctatgaacggtggtgcgaccatccaaccgtataggcgagaacaccagtcggcggcaacgaaggctagccgatcggtgaagacgtggacgcccatgaacggtggtgtgaccaaccaaccgtttaggcgaggacaccagttggcggcgacggaggtaggccgacagtgaagtcgtagatgcccaacaacgacggcataataggccagccgtgcaggcggaaacaccaatcggcaacagcagtgccacagcattacatgtaaacaacaggaaataccaagagattaatctgatatttagagatcaatctaataaacaacaataagttgaaaaggaaaaaacccggcggagtcggagatttaaattgttgaactcgccgagattgattttctcgaccggactgactccgagacggagaaaattggttgctggtgttgcactctgtcgctaggactaatcaagcgatccatggctcggcgtgcttacagaacaagacaacaaaccaacttggttaatgataaaaatatataggcatgattaagtaaattaatggtgcttgttgatcggtaagatcaactttctgcacgtgttctctcctgattagccataggctggctgttcccatgtgtggcccgtggtggccatagcccgcaggacgtccatcggtgatgctccgagattctcatggaaacaaataaaataaatctgattaatatcagcaaattaaatgtataaatctcagcgattgaatgcatgtatggctggattaattaatccatgcatggcggttgaatcgacacatcctgtacatctccagcgatctcgttatgtgaactttcgtgcatgcctgtccagcccacgagttggattcgctcagagagtggacggcttcgccttgcgtagcgacggcttaatcataccgtgcctaattgaacaccttggtcgccggcaacatgcatacaccagaagaaagagcaaagaggaaaaagaccatcaatcaatctgatttaataatcaatctaattagcaggaagaagattagatgcatatgccatagtcttgctccctgcttgaccctcgtcatgtgatgcacatgcggatcgatctgacgcgtggactatacagccgcatggatgtagattgatcgaggtggtcggccggattgaattagaccaagcgacgtcgacggagatcatgcgccggcggctggttgctgccggtcacgcgtagctgctcgccgatccggaagtccaaacagcacacgaccgatcggcgcgatctctcgatctggcaggcgctcaacgctctgatgagacgcgccctccgtgcttcttgcggcggtgaatgacgcgcgtgtacgatccggtcatgttggtgattgattccaacgcactttaccgacgggaatctcgacgcacccctacctggcgcgccaactgtcgaaacatgaattcggcaataataaaagggggtagcgcacgagacctaaaagtggatggatgcgaagacaaaggatttagacaggttcaggccctctcaatgagaggtaataccctactcctgtttggggatttgaatccgccgagtgtgtattgatctgacgatcaggttgtctcatgccccctagagggcctcctgcccaccttatatagggtggggggcaggattacaagatagaaaccttaaccaatacggtatcggtttcctaaatctactttacaatattatcaaaccaggactttaggctgttccgtaatatataaggaaacgtaatacccgagtcatgatctattacatatcccatagatataagttatcccctatgactagtcggataaccatgccgtatgggtatggggtacccataatatccacacagggtttcttgacacagacacaaaagcagaacaatcgaattgctccctcagctcctcaaagatgaggtttgcgatcgttgtcttccctaatcccccaattccaacaatggagatggtccttagatgctcggatgccacatgcccatcatctttcatcaacagatcgatgagctccttcttcggctgatcaaccccaactagagatgacacatcctgaaagatggtaagagctctttggtctacggtcgcattagctgtcctcatcaaactgatcccaccattcatatatcgcgcattcctctcccccacttctttgatttgtgccttgaactcagcaatcatcttggcaatccgacgccgggccatggtcttggtcagcaaattcctgcatttgacgatgaacccatccggattagcggatccgtcgacgacatggagcatgaactcgtcgaggctgtcctcgatgtcgtaggagagctcccgcacctccctcgtccaggccttgtcctgagggtcagcgttcccctcctccgaatccgacatcctgaggaggaacgcgtgcatggcggcgaactcgtcggcgaggaaactgatctggccgcgcaccccttcgaattcgccggccatggcggcgagcttcaccaggacggacttgagtgccccggtggccgcggtcaccagaaacccctccatatgctcctcgaccgtacgcaaagaaagatcctgcgaaacagaagcagaagcagatctagatcagcaggtggggaatcaacacgaaccgcaaaagacggcgggggcgaatgttgattgatggccggagctcaccgccgtgatcctggggaagctcggcggcgagctggaagagttccacgcagcagcagcagagactgatcagtggtcagtggagtggtggtcaactggtcatagacgaagaggacgagaacatgtttgactcgcagcagacggagcaggtggagaagtcgataggccgggcccacagcgagccagcgagttggttgctttgctctctccatttccaaattttactcatcgttttttattttttatttttattttctagcagtgcagaccatgggtttgagatgaaatgaatatactgtgagtagagccctataagggctaattgagtttacgattttctgttagcacgtttttcaaatactatttctgtctcattttaagtatagttatagtttttatgtccaacgtttgatcgtttatcttatgtgaaaaaattataaaaacaattagtcacacataaagtatcatctaataacaacaaaaatactaatcgtaatttttttttcaaaataaaacggacggtcaaacgttaaacataaatacaaaactacagtctatctaggaaagctaaaaacaaagagtatgagttaggaaagctaagtgccaaaatcagccttattgcacctgctctaatacacttgttgatttcggcaatcaaaatgtctttatttgtgggcgagcatacataacaacttcatgctcctctttaagtggacatttcaaaaagcttttgactctataaagtggaactacatcaacatagttttccacaaagatatgatgactgggttgtggggttgttgacaactttcggttttaagatcccgcaaaatagcatccccgcaaatgtgatacatcatgccatggacctatttcaaggagacccactttctatcatcacagcaatagacctatagcaacgactgctatatatccaaagcaacggaccttgggctgattagtaatccttgaggaaggtcggtgcgtttccgaatcttaatatatgcatatgactggcggtcttcatcgacctaaaaacaagaagatgtccaggcattgcaaaactttgggcaggcaactgggttgtgcgccaacatacaaaagtcacaggttgccctattagatgcagtgacatcggcctcgatgagatcctagaaaacatcctagtgaccagacctttgttcccaatgaaatacctcggtctaccattgtccattggaagactgcagaaaatagaccatcaagctttgttccacaagtcaatagggcggatggcgggatggcaaggcaagaacttcggaatggctggctatcacaacccgccctggcaccacctaatagtgacaccaaagagggtgcgccataggaaattggcgtgaactgaattccatggaaccgcattgccaataccagtttcagtacacaattattggtactcgtggtcaaccaagatatgcatcattgcaacttaggataacataaatagataattccaaattgccttaatcgagttttatctctaattggcaatgacggatattccaatctgggcccatatcgaacccaagtcaggccgtatcggccacttgccatatcggcttagtcaaactccgactctgtttctagctgatacgatgcctagacgatgcgcagtccgactccaaatccaactcaattccgcacaaaatccacttcaatcttgttccttcttttccaattctgatgcaaaattccgttgttaacagatggttaatttaaaaccgataccttccaaaaccgagccgagtcaagtggtggactacaaagtgcacgatgcaataggtcatcgagattctttttctcctcatcctctccgcgatcccctctctctccccctatctcttcttcttcttctcctcctcttacccctctctctctatccactctatctctctggtgatggaggtcggggagtgttgcaggggcggcgtgcttcccacggggaggtggcggcaagcggtggcgccctctcctctgccagatccagcgggaggggaggcggcagcagggtcgccacaggaaggcagcgctgtcgacggtgggtacccgtagaccagatatagagggtattggggtccattggtacgaggatctacatagtacgacaacaagcaaacaaaagacaaggattatactggttcaggctccttggtaagtaatagccataatccagttggtatgggattatatgatgaaaaccacagattataaagggaatagcagaactcgatgataccgacgagaccgtagtcgagttggtcccactagatctcccggtggcttggctcctgcgtgctccggctccgtaggctgtggtggatgtgttggtggtgatattcgatgccttaggtcctacccagggggtatcttatataccgcgggtcacttgatctccaagtaggactcggagatatcggacccctcacgatatggtaaagacccagtcttgtccgagtagaactccttcaatccgtagataccatccaaacaacgtatttaacaaccccacccctcaaacttccattcttttctaactattccagaaaccaaacacacacagagtggaggagaatttttttttaaaattacacagtacaatgcagacacatcgaatctttaacacatacatggagcattaaatataaataaaataaaaaactagttgtacagtttgcatggaaatcacaagacgaatcttttaagcctaattagtccatgattagccataagtgctacataaacccacatgtgctaatgatggattaattaggcttaataaattcgtatcgcggtttctaggcgagttatgaaattagttcttttattcgtatttgaaaatatcttttaatatccggtcaatgacaaaaataaatttcttttcaccaactaaactgttcgtctccccactaaaatccctaaccccatcgatcccagccaacaatcgaagcaccggcgccgccgcctcgtgaccggccggctgacggcggagagcgaagcgggaccagcgacggtggagagcggctggacaacttttcctgcctcaatgcgccgcctctttgccgcctcgtcctctccttatctcctgtctttcgtggcatctccatggtggtggccatcagcgcttgcgcgacgagttcattgctttgattccgcagccaatcgacctacctgtagtgtttcccggtgagcccttctcttctcacggtaatgtttgtgccttttgttgctactatatagattttagggcatgtttggatcaatgccaaaatatatagtattttttagtttaaatagttagtaatgtggtggcttggtttcaagccaaaggttggtaatgcccatgctcaatttgacacaattctagaactttcttcaccataatataaattttggctcctaattgacatcaatccaaacacattcattttcaatgttaccttaccaaaacattgctattgtaaaaaattacctagattttgattattttttttggtatgatagtaaaccaaacaagcctttataaaggatctggattgggaccaagtctgggtttttatttacacttcttgtgttgttgatttcttttataaaaaaaggcaaatgggggaaaaccacgcaattaatccatgatgatttccaaacacagagaaaagaggctcacagatagaaaccagaaaccaatttcaggcttggatatactagtattctatatgacttcattcctgactgataatacttaccatcttatttatgactttgatgctctttgtgatagatttcttcatggatatcgaaatatggctagcagcaatatagtaaatggcgaggagttgggtgaaccagaaagaagacctctcaacccttctgccaagggtttcattatttccttgggcaagcactctgccatttcccaaggcacgaaggatatagagaaaagcaatactgacacaatgaacaagttcattactcattgtagcgggaatggtgcagaagatgggaggacatcaagcgggaatgtcatttctggttacgaaggtgtttgtgggacaacctttggagtcatagacaacaaagctgatacaacaggagaaattgtggatgttactggttgtgaactgagcagtggagacaaaagagagcttggctgcaggggtaccacagctaattgtttacccaattgaggatggtgtaccccctatggagatactcccatatagcagccattgtgacggttctatatacaggggcacagattgctggaaaaaagagtatcatattgctgaccgtaatgaaagtaagtggtcgatctctttttcttatttttattcattattagggcgttttccaagctatagggtcaactgatatattctctccgtaaatctcgacttaatttttctttcctctgtttacttataatttttgattgcggtgcattggcatatataaatggaaatcttctgaaattaacaactcatggtttcattgcttggtgtgtgcaaaagcacgaggcatctaacgatcatacctttagcagattgcagcctgtgctgacatcgccctgggtgtaggacatcatactcaaggttgtgatctcactagacattgtatctcctatctatccaaagttttctgattgtccagataactccctaagccatttttttgcctggaaatttgttcagttaactccagaatgttattgatcttcttgtttcttataaaagcatgttttattttgaaaatttgtgaagtgatagatgtaatcatgccctgtgctatggcttttcattctttttggtgcacacatgtgcatactaagtgttgaacaggtctagctacaccctactatgcagatagtcatggaaatcacgaaaataattataatatagaatgtgttgtctaccatcgggaaaagatcaacataaaagaggatttctagaaaacgaaaaaagaaaatatatttcattacggggtgaaatgacctgtcttgctagttctgggagtatagtgaactgaggaatagtttagggggttataaaataaatgaaccttttcccttctggggtggttagagattactctcgttttagagttccagtacatttgcatggcatcaagatgaaaataacatcatatatgccaggttttccagagcacattccctctgcatcatttgcagaagaaaagctagatacaaccgtgcagtgcagctcagcacagcaaaaccccccttccagctcatcatcctcgcactgctctgattcttcaggctttcgttgctctccagtgagcaggaactcactgaaaggttcttcactgatttaaaactaatgcctacatggactccgatcttgtcaggttagctatatctgcgttctttctacttttctagtggagacaacacactggaagaacagatgttggataggttccttgcctgtacagaaaaaaaaaaacatgatcaatcccggactcctgatatggctctctttatccttgggatttcctagaagaaaaatttttcaagggagcggatagtttttcatttagatgagaggggaactttccaatgggactatggaatcctcaagaagcatgtttacattttgtatcgccagcatttgtttattgtgttattttaattttaacagaacttgtatttttctgtgaagctcggtgggaggcaatgatgttttcaaagcccacggattgcaacatcgacagcaatggaatttgcatgtcacacggaacttgttgtatgttgcaatttttctcattaaggttggctaaagtacctgcggaccatggtttggtggagttgtatggatacatagcagtgcgggataggctggatacatttcttaattattttgtcaattttagcagggatgatcccattgtcgtggagcaggcgtgcacatttatacatgtatgcaattattttatagttaataagtctgttaacatgttatcatcggagcaggctctggtttaacctagtcttctgacagtagttggatagttagtactgggccgaatatttggccccatgcttatcatgccattacaaaatctggcccatgacaataagccactaccttacaaagtcttatatatattgtgaaatgatgatttacaacaaaaacagatctatactatgaaactaagtatcatgtattccaaacaaaatcaaatagaataattctggactcttggttgctagcaagtaaacctcacaaaactgaatcatttgtttataggcatatgaacatgcatagcatgaatactaagtcttataggcacatgaatatattacatgcttatttgatttagtacctgtgattcagaacaaaatcaatttccctctctaacaccgttatgtattttgtacattctgtttgatacaggacaaagttcttggccatcaataataaaacatgtcttagatattccttactttcatttgattctgtagggtataaaaatattgctacaagtgaaacatcataagggaagcattcagctttagatatttcttactcttatttgattctgtagggttctctcatccacatggctggccctaagcgagggatccaattgatcggcactaatctaatcgaatatgacatgaagatcaagactggtgaatatatatatgaaaatgaagatctacagctgatcgatggtgtatcaatcatagatgacatagacaacatggaattatagctcgtttacatgccgcatccatggttattgtggcgcgattgacatagctgcaatatcacaagtgagtcgaccatagaggttgcaatatcacaagtgcaaagcagttttgctatgcgcctgatcggttgttttaccagtgggttacatgaagaaatccggctctttgatggcactataggtgagttccgtacgtggcttgaagtggcctgtggttgctgtagtgatgggtgctcaaatggatttgaagttcaaggtagccacagactcatgcatccctgctgaacatttgctgttccgtcgaggagatagagactgattttgcattaatcgcagtgaaggtgacttggtcgacttttaatatgaaaagttggctctgtgatgagtgggctaaaagtggggcgggttatgcccctaacccaacgggctggcccgcatcactaaccatgcctgccttgactgatgcgggccaaagcggcagcctgcactaacccaacgggcaatgatgtcgcattgctcaccattccagtccaggggaagtccatatcgctgctagcgagagatgatgcatggctagctcccttcgctcccctcagctaccattgtaagtttgtaagtggatcttgcttggtggtagtaaaaagaatatggccattgcagccatggccgcccgaggaaacgatgacagcatcgatctatatgcattcttcacgaatcagccgggttttttcagtgcttttgcttcaggagttccaagcacaggcggatgcaaaagcatgacctggcgataatggcatggtgttcgaagaacgctagagagcaggaagatgacattttagtgtgataacaaacacaaaaatgtaatgcatgaacggcaaggaatgcatcgaatgcatgtcgcagacagaatcacactgattttgccatgaacttcatcgaacacggaataatacagcaatgaaaggcttcgacagcagttcttgcctggttttatgtatcataaaaaaagcgctgcatctgacagcactgatgatggacgtccatcgtttttgccctgattcgtgtaataacccaaaagagaaggtcaaagtggctgcttcaaagctccagtgtggagatccatttgctgcaattttgttgcttgcctcaacaagcgccattgaattctgttactgcctcacttaggaaaggccgtaaaaacttcaatgataaatcgtactagcatatttcaaacacactgcaattaccaacattgtccagagcaccaaacttctcattgaaactaagagaaagtcttgactaagtactacccccatcccatatatttgaaatttttcagaaatatccacccaaagtgcttcagcaaacacaaccagggaaaaaacaaagagagaactttgttccgcaaatcaataggcacattatgaactcctaacagggtaaccaagttctcttaagtagactttgaacggatgaaatcaagaatcgtatcatgaactcagcaggatttcacctcaccaaacttgacgttatacctttggttcgatcgaaaatgtattgatcacccataaaggagcaggaaagatgatgtgagcgaattgaagagggagattgatcacccatagaggagcaggaaagatgatgtgagtgaattgcaacgcacgggtgtgagattatgggtaccccatacccacacggcatggttatccgactagttataggagataacttttatctatgtaatatgtaacagatcatgacttgggtattacgtttccttgtatattacggaacggcctaaagttctggtttgataatattgtaaagtagatttaggaaaccgataccgtattggttaaggtttctatcttgtaatcctgccccccatcctatataaggtgggcaggaggccctctagggggcatataagacaactagatcgtcagatctatatacactcggcggattcaaatccccaaacaggtgtagggtattacctctcattgagagggcctgaatctgtctaaatcctttgtctcggcatccatccacttttaggtctcgtgcgctaccccttttattattgccgaatttatgtttcaacagttggcgcgccaggtagttgtacgccgagtttcctattgaggagtgcgatggaatcaattttatgagtcgccagcttcgcctttgcctcaggagctttgacttcctcgccatcgacaacttcaacaagcctcgctctttgactttgattcaaatcagtcggggaagatctaatctagctaaggaggataacaaccactctaccacggcgagtttaagattcgatctactatggccgccgccagcgtcaccttcgtcagcacgctttttcgcttcagagagaaactttatcgtcaggagaataaccggatactactgttaacaggatcgtcgatagcatgggccgcgtgccttggacgatacacggcatgctacaaagtttgcagtcctgatcttgcaacatatgtggtgtacggttggctacgcacgcgcatcatggtctggctgactacttcgatcgccaaacagtccggccagcatctttcctcgatctcacagcgacataatcaggggcttcgtagcagctctcttattacatgcatctactcatcatcaccatgtattgcatggctgcctgctacaagccaaccaatcaagattccttaatctacaggctgctaccaacaatcgtaggcttgatctactggagcaaatacagatgcatgcttgcacgttcttttatctcctaatcagatatgatttgtatttacatgtccgactatgcgacagccatataacaggcacgttgtttccgatatcactgacacgatcttcatggacatggacttcatcgctgactggtttgttcgtcctcatggccagcctactacgctgctactgatagcaacatcatcttcaccgactggctcgcctccgtcgccgctgccgactggtttctccgcctacacggctggcctattatgccgccgttgttgggcgtttacgacttcaccaccggcctgccttcgtcgccgccgactggtgtcctcgtctatacggttggttggtcacaccaccgttcatgcgtgtccacgtcttcaccgaccggcctgcctccgtcgccgccgactggtgttctcgcctatacggttggttggtcacaccaccgttcatagctgtccacgtcttcaccgaccggcttgcctttgccgtcgccgactggtgtctctgcctacacggctagcctattatgccgccgttagtgggcatcttcgctttcaccgtcgaccgccttcgtcgccgccgactagtgtcttcattgttattgatggacgactttgttcccacattggccacctctgccatcaccaggggaatattacaaagctaagtcatcattaattttttttatatgatatttttttcctctgcctcactacatcaactggttcgccgttgactaatgagtcgggggctacagatgttatatcgtattttttaaacaattttcataatatttatcttgattgcttgcgacataatctgagtacaaaagtacctatcgagttatggagttctatcttcctatgctttccgtttggtttgtcgatggatagttgcctttgggccgattcctagcacccgggggctcgttggatggactgagtaacgcaaggttctaagtattattcagaataaatcaaaagcatagagataagataaatttattttctgctctttacaattgcaaaagtacccgagtagtaaattatgattcgtgaaactttattccattaatgacaaactcatgtcactcatatgcatgtttgggaagtgcctaggctgactcccgatgcttgggggctatgactagtcggacagagtgtttaaacgtacggagtcatctgctcggggaaatcaaaattgacaagaggagaaatacatatttataaatattttaaaatacttaaatttttctcgagtattatatttacatcagatactactcatcctatatgtttgttctgcaggatccagatccagatatgcataatagggattcatggctttcaaagcttatctcctacgcttcagaaatggatcagtcagaacatcaccgaccggcttgccttcgtcgccgccgactggtgtctccgcctacacggctggcctattatgccaccgttgttgggcgtctacgtcttcaccgaccggcttgccttcgccgctgccgactggtgtttctgcctgcacggctggcctattatgccgccgttgttgggcgtctacgtcttcaccgaccggctgccttcatctgctgccgactggtgtctccgcctgcacggctggcctattatgccgccgttgttgggcatctacgtcttcaccgaccggctgccttcgtctgccaccgactggtgtctccgcctgcacggctggcctattatgctgccgttgttgagcgtctacgtcttcaacgaccggcttgccttcgtcgctgccgactggtgtctccgcctgcacggccggcctattatgccgccgttgttgggcatctacgtcttcaccgaccggccgcctcgtctgctgtcgactggtgtctccgcctgcacggctagcctattatgccgccgttgttgggcgtctacgtcttcaccgaccggccgcctcgtccgccgccgactggtgtttacgcctgcacggcgggcctattatgctgccgttgttgggtgtctacgtcttcaccgaccggccgcctcgtccgccgccgactggtgtttccgcctgcacggttggcctattatgccgccgttgttgggcgtatacgtcttcaccgaccggccgcctcgtccaccgtcgactgatgtttccgcctgcacagctggcttgttatgacgccaactgatgctatcttctttacggctggctacgtcgccgtcaccgctaataggcgtcatcatcttcaacgcaagctgtctacgtctactgccgactagtttcttcacttccatggctgcatgattctgccagtgttgattggccttatcgtcttcatcgccggtcgtctcgtctgctgctgactagtgccctcgcctctacgtctggtttataccgctaccattattgttggtcgccttcatcttcattgctggctgacctgactactgccgattggtttcttcgcctctacggctgtgcaactttgtcaccggcaccgacaaactctattgccgctacttcgctagttttgctacttcaccagccacgacgtctacaagagcttcgttatatcggcatgcgtcaccaaatatgatgccatgttattttactacaacaagtggtattccaatcttcaatatttctactcggatatcttcaacatgcatcttcactcaagcaatgactactcgacgacaagaagctaaagttttcgactctatgttcagttgtttcccaactaactaaagagtcgggggcaacacaaatacacggctcaaaattcgacaggttttatgtcaagatgaagcaatcaactaatcagccaacgagttctatggaatctacttcagcaactcttattatttcaccagtaattttggtttctccacgccgctacaatctactccaaatttctcaattatcaagtttgagatttaatctacatgttcgggagttgtatcagtcttcattatgcacacgctcgcatcaaggaaactacttgagcttcaatatcttctcaatagtttgatggattattgtcactggcatcatcaccagcacctctacttcatcggccctgacgtcttcgccgttgctaaggggtgactacgtcttcaccttcggttgcttctgtcatcactagctttcatcgccgacttgttatttcgttttcacggttggcctactacgcaaccgccgaggggagacctcatcattatcattaactgctacattgctatcaatgggcaacttcatcatcacatttgatcatctctattgctgccaatcgtcattaccatcggttgcatttgtcgtcgtcgactatttcctgcattttcatgattggaggatttcgccattgtatttgatgcacgtctacgtcttcatcgttggcttgttttcatcgccaccgactgatattctcgccttcacggctggcttattatgtcgccactaatgggcattttcatcttcttcaccagctgtctcgtctgtttctgactgattattttgtcaccatggctacaaaattctgtcgctattgctgggtgccttcatcttcactgctagttgatatgactgcttccgactggtttcttcgcttccatgccgattgcatcagctattaccgatggacaattttgactatgacagaaggacaagctatatgctcaggggcttatcagctcaaacacaagcgcgaggattatatcttcaatttggacttcttccggatacatgcaacatgaattcgtgatcatgggtctattttctatgctcaaagactggactatttattattccccgtaagggttatcaatcgaatacttgcgctagtcgggattcaattattatatctatttaggagtatcccataagggataatcactcagatcagaagctattcatatgagctacacttggtctatatcactcggaagatttattactcgggagcatgttacatgcgtcatccttcaaagggtgtcgaaggcatattttttggcctaggcctaatatgtctgcagcccatattttcaggtgtggcctgtcacgttcttttagggacttaggcatctttttgcttaggcaaaagtgcacgtgattatgtgcccaataccttaaaatccttttataccgcagttactcaactttttaggagttggtacaatgcatcttaaaaggtgtcaaacagtaaagctttatatagctgctccgctgacttttttatatagtcatgacactgtttgggtttatcaagcaattgattagatacaatatcattgcttttcgccacgtaagtgtgcatttttattgaccaatattatggcttaagctgattatatatcttggtcattttccaggcggttggtaaatcctttatgagtttatttactcggatttcacaccacatatgccatatatttccaggtgtggtgaaaccatgtgtcttttagggacttaagcacatctgttaaagcagtgtgcgcatggcgtatgcccaatacattagaaatttctttattcgcaacatacaagcttctttatagctgttttgctatgtgaattttcaatgatgtagccaactttaggttacattcatcatattttacaaagcagtcggtatatcactcggatcatgttattcagggattcacaccgcatatgctacatattaatatcaagtcgcttggttgactataattatcgaaaccacttggttagttagattatttattccttgactatatgcttagtttgttcagctaaccacatagtcgggggctacacctattaggtgcatctagtcgatgcacctaactttatttttcagccctccacagtcttcatatttggaaaaagtactcgggagatcatggcgaagatgattgaagcactcggctttagagtaatctggttcgagagaagattatcttttcgactgtgaaggtctcaggggctactgtggagattatgggtaccccatacccacacggcatggttatccgactagttataggggataacttatatctatgtaatatgtaacagatcatgatttgggtgttacgtttccttgtatattacggaacggcctaaagtcctggtttgataatattgtaaagtagatttaggaaaccgataccgtattggttaaggtttctatcttgtaatcctgccccccatcctatataaggttggcagaaggccctctaagaggcatatgagacaactagatcgtcagatctatacacactcggcggattcaaatccccaaacaggagtagggtattacctctcattgagagggcctgaacctgtctaaatcctttgtctccgcatccatccacttttaggtctcgtgcgctaccccttttattattgccgaattcatgtttcaacaacgggttagccactagttttttactaatcacaattgcttagagaggtttaatgacatacttgaaaaaacaaatatatgatgtaggttgagtgtgaattcacttttcattggcaagttttaaatgtttttcctccacgatatttgcggtcagattatattgttatatactccctccattaacctttgttatgatgtttgaatattcatcctatttgctagtatgctaccaagtcctatatagaatcaaatgttatatgtatgacaaaattcctaagtagataagtaaggtgtcccatataagaaagagaagtagagtgtaaaatcaaaggtgtttttgattattattctgtgatgaacgattggcattgcagattattggttttgttatttggaatttattcacaaagtggttttggagatgattggattcacaggtgatcgcagatttatcattttatgtgaccggtcagaccgggctatgtatgccggtcagaccggcggtgatcgagcggtcggaccggccagtccgcggtcagaccggccgacgctgtgtcagtttcggttttgggttatttgtttggatatccgtgattatttcatgattatagcttctagatggatactatacgtatgtaatactgttgtttgctactaatgagtcaagttggagatagcttggtcttggaatatggtttctttgtttaattcatatgtaggtgactcgatgtctcggaagagtatttgcggtgatggaccgggagtcggcttggggataagacgacgtccgtggtaatcagagatcatgcgggatactaaggctagagttgatgcatgtggttgatggagattccatatgtcatacgatggaggtattgtgtgcgtatgggatgcggagtcgaatttggaaggagtccaaatttggtacgattggttatgtaaagtttctttcttgtattagagggtttcctaaggtgtttaggactcttagtatgagtttggtttgtggctttaggatgcctacctcgggtataaatagagggggagcgtgaggcttctcggtatcgcttttcacagcaattgagttgagttttgagttagggtttcgagtttagtcgaaatttttgtaaggattgctgttggtgcactttgtaaacacagagagaatcaataaagtcgtcatccactttaagagttcttcgatttgtgtttcaccgggtttcggcggtgtaatcggcggcacaccagcggtcagaccggcggcatcgcggcggtcagaccggtgggtgacctacggtctgaccggcggcgacatcaggcgcgacagggattccagggctgtccaaccggtcagaccggctaatctactttggtcagaccgatctcatcgaaattgagggtaacttttatttgcgctaaaagtttttggtttttgggtataccaaccattcacccccctctgattggcttagttcttgtgattcgatcctacaagtggtatcagagccttgttttcttctttggatttttatcgatctagagtttttgccatggctactcctgctaggttttcaactaagcctcatgttttcgatggaacggatttttctcattggtgtagtaggatgcaatcttacattttggctgaagattatgatatttggagaaaagtttctcatccttatgtaattcctgaagctattaatactgctgctgaaaaaactgcatttgaacaaaattgcaaagctcgcaacattcttttgagtggtatttctcgttcggattatgatcgtgttgcgcactttcgaactgcttatgaaatttggaatgctttgagtaactttcttcaaggaacaaataacattaaagaacttcgtcgtgatattttcaaaaaggagtatattaaatttgagatgaaacctggagaagctttggatgactatctctctaagtttaataaaattttgagtgatcttagatctattgattcttcttatggtgctaattatccacaatatgagatttctcgtcactttttgaacggtcttgatatgtctatttgggagatgaaagttacatctattcaggagtcagttgacatgtctactttgactttggattcgctttatacaaaattgaaaacacatgagatgaatgttctttctcgaaaagttgattctaagtcgagtgttttggtttcttcttcttcttctttggatgttgaagcttcttcatctaagtcttcttttgttgctgtttttaatgccacatccgatgatcaactcgaacagatcgaggaggaggatttggctttggttgctgacagaattgctcgagctatagtgccaggaacaggaaaagaggtggtccaaatcgttgctttgaatgtggttcaattcatcatcttcgttcgcattgtcctaaggtagggagaggcaaaagagaagacaaagatggcgagaagaccaacaacaacaagccgaagggttcatcccaagggaggaagctggagaatcttagtaaggcttttcaacaagtttgcgccgccttcgagccactaagtgatgtagatggtgaaagtggagatgatgataagggaaagaacatctccgatgtttgcttcatggcgcgtggtgaatctgacacaaagtatgaagataatgaggtaagtgcttttgaggaagctattaatattttgagtgaaaaaaaataagaagtgtgagaagatgtatagaaaacaggaatttatcattgaatctcttaaacaagaatatcattgaatctcttaaaatctcttattcctaatgatgatgattgttcaaattgtgaggttttaatgaatgagatttcaaaaattagagatgttaatgctgcacatgatttgaaaaatagatcttctcttgcttgtagttttactttgcacacacgcactttggatgagttgtttttaactaaaaagttgttgcaaaaatatcaaattggtttttatgctagtttgatgtttaacatgatttctgctaaaaaagttaaaacaacctcatgatgttttggattgctcaacatgtaatttgaataagttgaaattgaaagattctttaggttgtgttgagtacatggaagatgttgtgaaaaacaatgaagtgctttattgcaccaaatgtcgtaaaagcaaaggtgtcatggtgattgtgaaaattgtgctaatttggaaaaagaggtttcttatttgaaaaattctttgctaagattttctgatggtaaaaagaacctcaacatgattttggatcaatcaaaggttagcacacataaccgtggtttagtttttaatccttatgctcataattctagacatcctcctattgtgttaggtgttggtgctagaagtggtgagattttggttaaacctgattctaacaaaactgtgtttagatctgctggtatcatatctaccttgaatgcatctttttcaaaatccaatgttgtgcattcaaaatctcctgttgttgcttgtgttgctaaatcttctaatgctaccaatctgtctaatcatcgtgaaaaatatacttgttctttttgtggaaaagatgaacatattgttggtttttgtttcagattagctcataaacagaaaaaggagagagagattgcttttgcaaaatcaaagtggcaaaaatcgggttttccctcgaggaaaccggtcagaccgcagtgggtcccgcggtcggaccggtgaccggtcagactggctactgagcgtcggtcagactggcggtacagaggcggtcagaccggccactgtacctcggtcagaccggcctcggaggaaattttccgaaaattctataattgattttgcacgtggatatatgcctattggatcttctagtcatgtgtctcagtactggattcctaaatttttattatcatctaaccccagtactgaggcttcgacttctacttgtgtgtaggctttggtggcaaggaaggagaacgtgtggatcgtggatttcggttgttcgcggcacatgaccggtgataaaaattggttctcctcactcaaaaaggcatccaagactgaatcgattatcattggtgatgcttctacaagtgccgttctcgctataggtttggttaaggtaaatgaaaaatttgaattgaagaatgtaactttggttgaggacttaaagtacaatttgctttcagtttcacaaattgttgatgaaaattttaaggttcactttaagaaaactagaagtaaagtttttgattcttgtggtgattttgtgttgaatatttctcgctatggaagagtgtttaaagctgattttgaaaatcctgtttcacctgtgataacatgtttggttgctaagtttaataaagatgtgatgttttgtcatcgtagacttggacatgttggttttgatcatctcactaggttaagtggtttggatctagttcgtggtttgcctaaacttaagaaagatcttaatttggtttgtacaccgtgtcgtcatgctaaaatggtttctacttcacatgctcctattgtttctgtgatgacggatgcaccgggacagctattacatatggacattgttggtctagctagagtgcaatctgttggaggaaagtagtatgtgttggttattgttgacgattttcctcgatattcttgagttttctttatggcaactaaggacgaaacttttcaaccctttcgtggtttgtttcttcgattggatcttgaatttcctggctctttgaaaagaattcgaagtgataatggtggtgaatttaaaaatgcttcatttgaacatttatgcaatgaaagaggtcttgaacatgaatttgcttctcctcgtgttccgcaccaaaacggtgttgttgaaaggaaaaaccgtgttttggttgagatggctagaatgatgttggatgagtataaaactcgtagaaaatttcgggctgaggcgattaacactgcatgctatatttcaaatcgggttttcttaaggtcaaaacttggaaaaacttcttatgagcttcgatttggatgtcaacccaaagtttcacatttgtgtgtttttggttgcaaatgctttgtcttgaaatctagaaatttgtataagtttgaggcacgttctaccgatcgattgtttcttggttaccctgcacattctcgttgctattgtgtacttattttggagactaacaaaatcgttgaaacttgcgaagtttcttttgatgaggctagtctaggtactagacccgatatttcagatatattgtcataggttcagggggaggatggtcgtatttttgaagacgagagcgacgacgacgacgaggtcagctcggccagtcagaccgagcgccaggccggtcagaccgccggcatgccaccggtcaaaccaccacagggggtgcggtcagaccggccaggcttgtcgggttcgggtactgttgatgctgatcgagatggtcctctagagattacaacttcgaccagtgctgatacagaacgtgaatcaacttcagaagtcgctgctcctttgcatattcaatgacgacatccgccggaacaaattattggtaatataggtgagcggactacaaggtctaaaataacgactcatgatgtttgtgtaaattctgcatttgttgcttcttttgaacccaaagatgtttcacatgcattaactgatgaatcgtggattaacgccatgcatgaagaacatgaaaattttgagagaaacaaagtttggactttagttgaaccaccttctggacataatattattggaaccaagtgggttttcaaaaataaacaaaatgaggatggtttgattgtgagaaataaagctagacttgttgctcaagattttacccaggttgagggtttggattttgttgaaacttttgctcctgttgctagaattgaggcaattagacttttgttggcttttcctgcttcaaaaggttttaaattgtatcaaatggatgtgaaaagtgcttttctaaatggtattatacaggaggaagtttatgtcaaacaaccaccaggttttgaaaatcctgattttcccaaccatgtttttaaattgtctaaagctttgtatggtttgaaacaagctcctagggcatggtatgataggcttaagaactttttgcttgtgaaaagtttttcaatgggaaaggttgacaaaacgctttttgttcttaagcatggtgataatcaactatttattcagatttatgtggatgatatcatctttgtttgttcgactcacgctttggttgtagattttactgagactatgcgcagcgaatttgagatgagcatgatgggtgagttatcgtactttttgggattgcaaattaagcaaacacctcaaggtacttttgtgcatcaaacgaagtatacaaaggatcttttgagaaggttcaagatggagaattgcaagccaatttcaacaccaattggttctacagctgtgttggatcctgatgaagatggtgaagctattgatcaaaaagagtatagaagtatgattgaatctttttgttgtatctaactgcttctaggctagacatacagtttgctgtgtgtttgtctgcacgctttcaagcttctcctcatgcttcacatcgtcaagcggtcaaacgaataatgaggtatttgaatcatacactcgagtttggaatttggtattctacttcatcttctatatgcttaagtggatattccgatgctgattttggcggttgtagaattgataggaaaagtactagtggaacatgtcattttcttggtacatcattgattgcatggtcttctaggaaacaatctagtgttgctcaatcaactgctgaatctgaatgtgttgctgctgctagttgttgttcccatattctttggctttaatctactttgaaagattatggtcttacttttgagaaagtacctctcttttgtgataatactagtactataaatattgctaagaattatgttcaacattcacgcacaaagcacattgatattcgtattcactttttgagggatcatgttgacaagggagatgttgaattctagtttttggacacaaagttgcaacttgctgatattttcactaaacctttggattctaatcgttttgcttttcttcgtggtgaattgggaataattcatccttttggcatgatttgagtgggagttttgtatcacatggttttatcaagcaacaatatgacaatgagaaaaattgagaaaagagagctttgatctatacatatggtattttcttgtgcatgctagcaatactttgaaggtttatttgtctctagcatagcttgtatgtattctagtctttttatgagacttagattttgtttttaagggagatgatgcatgacactttaattctatacttgaattaagctaatatgcaatgttgatgctagcatatggtttgatctataaatgctctacttatatgctttattgaattaattgctcgttgtgcaaagagaataaaaaatatgaaaaaaatgaataccgaatccttggaaacagtcttgacataaggacgtattcgatgtgagcaaaataatgggta

SEQ ID NO: 4724 - DNA, 7550 bp, Oryza sativa
  unsure (1)..(7550): unsure at all n locations
tcgattgatcttcctcataacttgcgtacatgtctattatatctatgtacatttccagaagattatattattcataaaaaacggttggttagaagatggattgcagagggatttattcacgaggaacatggacatacattatatgaattggggcagaggtgtttcaatgagctgatcaatagaagtttgattgagccaaggtatattggcaagttcggtgaggtgaaatcctgtcgagttcatgatacgattcttgatttcatccggtcaaagtctattgaagagaacttcgtaaccttgttaggaattcctaacgttcctattgatcggcagaagaaggtccggcggctatccctccttgttaatactgaagagtattatagcagtttggaggagaataacataaaatatgtcctggataaaaaagaagatgatagcaatgagcaggaagataacagtaacggttttcatatcctaaaaaagttgaatttgtgcaatgctcgattgctaactatttttccacattctgtgaaagtcccatctttgttgcagtttaggcggttgcgtgtgctcgactttgaaggctgtgagcagttagaaaatcatcaccttgcaaatatagagaatttattgcacctgaagtacctcagcatcaaagatacaattgttaatgtgcttccgactcagataacaagactacgatgtttacagacattgaatgtagatgtaagaggggcaattaacattccaacacatatttatcgacttcgacaactgacttatctacttgttgatatgagatgtcaactgccggataaaattgggaacatgcaagcattgcaagagctcaaagttgtgaatgtgcttgcgcagtcactgaacacgctgcaaggacttggtaaattaacaaacctgaggaagcttagtatatttatgcctggccatcacgctgatgcggcagaaagatacaagggtcatatgaaagcaatgatctcttccatatgtaagctaggcagagacaaccttcattgtctaacaattcatatttcatccgtatcagcagatgacttcatccaggaaccatggtgccctcctccattgagtcttcaagaacttgtcatcaatcaggcgccaatgtctagggttccaagatggattggctcacttgtcaacctccaacgattaggtttatatctgaaggaactctcgcaagaagatgtcagtacactgggaggactgccagccctgctctctctcattctctatgtggaagaagtaattacagaggagggaggaaggcttaggatcagcagcagttatggattcccatccttggaacgtatccgaatcggtggggaaagttgcaggcttgagttgacttttgaaattgggtgcttgccgaagctacaacaactgaacctcgaatgcatggtagcagaagaaaaccacaccagcagcagtaatgttgtgtttggcatagagcatctgtcccgcctcacaaccatatattgctgtattcattacaagtatgaaaccagactggccaaggtggctatgctggctgcattggagagatcaatcatcagccatcccaaccaacccacatttacaaaggaggaatatggtgattttgtagatgagtcctgttgaaggcaaaatttttaatgtggatcagttcaaaggcgtagctcttgctaaggataatcatgttacagcaaaatggaaagttggtaggtaatgtgattttttgcaatatggatgaggcaatacattatttgtttcactgcccttctttttctatggcggtccctttacattttttctaatttttctaccttcaatagtcaatactgtcagtaacatatttggaattcgatgcagaagctcaacagaaggctcaatcatgcatgttttaaacaggtacagaatgttctaatttatgttggtcagttaggctttattgtaataatgctgttcttatagaaaaggattgctattttgtcacagttattatacaagtatacaaattggctccatttgtggtctattatgcattgctgtgtaaggaagcccagcatttgtttgcaagtcgtggtctcgagccacatatttgaagtcgatcactgggaaactcttatcctaatctgggttgcacaaaagtccaataaaagattaccattgacgtaggcaacttcccctgtttatagatgttttctagttcttgctgaccaaatggttgctagctagaagctcttttcctgatttggatggctcaatagtccaataaaatattatcatttgcataggtaattcccttgtttacagatgttctagtactctttcttaccaaaggttcacgaggcttgtcgcggcccttggagatgctctctttaggttcactcacatggtatagggtctggaggattagtatctgatttattggtgtagagaactttgttcaggaggaggttatgacgatgatcaacaaagttataagagggctctggaggtatcccatgtgcccatatgcatcatccaagcaagcttcaggaccaattcttattctcaaacaaatcagtttttttttagcttcaaccacacattcttattactgggtagattcagtgagatcacgaatcaccaaaacatttacaaaatctgtgagggggtctacccaaagagtgacctgggtcccaactcacacctagctgggcaagattatgaacaacgctattacgagagcgatggggcaaacgagaccttggagctagcaaagtgaagttgcagaagcagttttatttccgttaagattgttgcaaaagcagtgttgacctgatagttccctcttgcattcactcacatcatctctcttgatgttttttcctcctctttttgtgcatgaatttaagcagggaactggctcctgcaatttcattgtttttatcattggactggtcaatctttctttgtttattcaccctgattgtgtttgctgaagcacttttggtggatatttctgaaaaatttcggataataattagtcaagactatcttttggtttcttgcctctgataaaacaatgggaagtttggtgatctggaaagtgttggtatgcacagtgtgtttaaaactacactaatatgtttttatcatctgtactttttacagctttccctaagaaggcagtaacagaattcaatggcgcctgttgagccaagcaacagaattgcagcaaatggatctccaccctggagctttaaaagcagccaatttgaccttttctttttgggttattataagaaattcagggtgcacacaaacacaatggacgtaaatagtcggtgctttatttatgatttatgtattgtatttaaaccctggcaagaattgctgtcaaagcctttcaatgctctatagtgcacgtgttctctgacctgtgaataaaaaaaactccaacgaataaataaaccaactcgagtattttcacggaaatctattatatccgcnnnnnnnnnnnnnnnnnnnnnnnnnnnnnnnnngttctttgctgaagttaattcgcaaatcaaattttcattgtgtaaaaattaaatcatgagaattatattgtgattgtggttgaaacgctcaagcttgctgtcatttttaaataattcaatctcttactgtcaattttaaatactaggagagctcaggttaggccatctactttcaacctattcaccggatgtggttcgaaacgctcaagcttgctgtcatttttaataattcaatttattgccgtcaattttcaattctagcggagcttaaggccatcccggcccaaatgggtgccgttggcgaggagccttgttcacgccgttcggctcgccatcgcttttggagccggagccatctagtgcgctccctagtagaggtacgtgcctccctgtgctcctcggctccttttcatcgagccatggagctaggctctgtgttgggcgatgtcatgcctagcctcatactcatggacactgctcccgcaccagagatttcttcttctaccctcggccttgtcgctaggagtaggaacacggcggtgggaaggagtcagaggcggtgagatgatggaggagctgtcggcggtcctggtgaagatggatctgtgatacggccgaccagatctggcctcctgaccagccgctcgtcgtcgaccaccgcgtcctgcgccccgctcgatgtcgggcatcctgccctgcgtgttgcttgccgtgcggagggagagagaggcggcgacgggcggagggtgagggacaacgtgggagaggggatcctgttaccgacgtggtggatggcgacgagcggcgggagagagagagggagagcgaggcgacgagaaaagatgaggccacatggggtggctggctggcgggcggagaaaaaaaaaagaaagaggagaccaggctgtgaaatatagtagggacacacattgtggctggattcgagtactttcaaacagttgcctcagattttgtagggcccatttaagtgtgtcttccattgggagatatgtatcccatgccgtgtatagtctcgggttgtatggctcacctgaggctacttatagctatggctttcgttggggatgccctaagctatgcagtttcctggtcatcccttgggtgaatctatatcaggctactgggtatttatataatggtagtgcgagtgcgcataggggttggcaagctcggatgcagccatcttatatatcatcataataaggtttaggcatagctacactaataaaaaacgattttcctggacatggacccatttagctagattgcagacggaccataactggtcgtgtctggtaaaataagctcattttcgcgtgcggtccatttaagaggaccgcacggaaaaatcaccgcacgcgaaaataccactctctttccctcctacccactttaaatttcccctctttctctcctctcctcccgagtcccggcggcggcatggcgacggtgcgcgggatcccgcgggcggcggccaacccccgcacggatccggcagctggccgccctctccccccgagatctggctcccctcccctccccttccttccctccccagatccggcggaggggagggccatcagcggcagcacggccagaggggagcgcggatccgacagctggccgccctcccctccccttccttccctccccagatccgccggaggggaggggtgtcgacggcggtggagtatagtaaaaattaaagactatccttaatgataaaatattctaataattatttccttttctatattctcgtacaacaaagtttcattttataaacgttaagtgtcgatgtaaaggcgttatcaacataacaactatccatgtttctctttctttctcgcttttttttccctgtcagcaaacttacctcgtcaacaactctgtgtccactcttagttgccgttgtacatgcccttacggaagtatctcaggtaactcagacgatccaatgtctcagatccaatgtctcagatggattcaacgggcacgaaaatttagtccccgtgtttcacaaatccatctctaaatacattcactgtttcagcacaacagccgcctagctaagctactatatataataaatatccgactctcagcatggtactgaagggctcatcaattcttgcaactactctcaacttgttgcatgattgttggatcgttatggttttcttacaatgtttattttttaaacgaacaacacaggaccatgcgagtttcatatttatataggagtaaaatatatggccggttcttaaacttgagtgaagatgtcacttaagtccgtaaatttaaaaattatacattgcagtccacgatcttgttttattgaatcatatacaactggagaaaccatcttttgtgggttgcgcaaaaaccacaatagccctagttcatccaaaaaccgggactaaaaaccatttttagtcccggttggtcatctttagtccctgttcattcattgtcaggtcgtggtagataccctagtatttttagtcccggttagtgttaacaaccgtgactaaagatcagtactttactttagtcccggttatttataccaaccaggattaaagattaaaaaaagcacgcgcggaagggagaggagaaaaagcacgcatggaagggagagagacatttgcgcgcgggggagagaacaaaaaaaatctctatctctctttctccccctcaatcttattttcttctactagaactcatcattatcatcttatcctcttatcctcctcctcccctaggccctcccctctcctcccctcccctcttcgtcggctgcggccggcgggcggcgggatgcgggatgcggcaggatgaggtgggtagcgggtcgcgggatgtagcggccatagtggagagtggcggtaggcggtggcgccggtcatggctgaggctacgggcggcggggcgcggccgtcgcgaagggcggcggctaggcggcggtgggtgctgtgaatgattttgtgaattttgtgtcataaaattggggatgatttttagatgtttatgtgaatgattttgggatgtaaatttgtggatgattttgtgatgtttgtgtgaatgtggatgattttgttgttgaatttgtggatgattttgtgaatgaggatgattttatcattgagttcggtttaaaatcaacattcaagcagaaaaaacaataaaaaatgactaatgatggctgtgccaggcatgtggcgcagccctctttagacctggttggtgttatcatccgggactaaagatacatctttactcctgggtatttgaaccgggactaaagatcgccatctttgtcctagattctctctcccggtttgctaaaccggacttaaggggcttgcaaaccaagagagatgagggtttctctagtagtgatagccggtccaaaacgcgtttgatcagagctgaccgcctatgtggtgcttcacgtaggcaacatcttacatccagccccctccatatctcaacgtgctactaattttgtacttaccccctattgctactgtagacatcaaaatctcccaaaatatcccaaatcattttggaccggctatggtcagctatgctcccgtacatcttagcctcctcctccatgcacgtcatcgtcttatatgtaggatcgaatcacaacaactaagccaaccagagggggggtgaatggttggtatacccaaaagtgaatggttggtatacccaaaaaccgaaacttttagcggaaaataaaaattaccctcaaattcaatggatcgcggtctgaccgaagtagatgcgccggtctgaccgcctggttgccgtcgttttgactgaaattgtatcttcggtctgaccgccgagatcagcttctgccgcctgtcaccaccgtcggtctgactgcccttatgccgccggtccgactgccacgatgccgccggtctgaccgccggtgcgccgcctacattaaatttgatatgaaacttggagaag

SEQ ID NO: 4725 - DNA, 27109 bp, Oryza sativa
ccccccccccgtgcgcatggtccgcggtgagccgtgaggctacgcgtgggcccgccgcaccgcgtcctccgcgaaccgcgcgcatgcgccgcgcctccctccaaaaaccctagcacgccccgcgtgcacctcgctcacggtgagccgagtcgccgacaagcgggtcccacccgggaccacgcgggatggacctggcccaccggctctctcactctctcctccccgcccgcgcgcgcgctttgggccgccttcttgggccggccggcccattaagctcggccgagccgcccctttctctcgggccgcgccctagccgcccgaggaaagtctaatttccctccctccttcttttcctttcttttctttttttttaaaaaggatttaaataaatccttttcctttagaccaaaaatccaataatcttagaaattcaatatcttcccaaccgtaagtccgtttgactccgttcaacttccaaaattcctcaaatctcgaaatctatctaatggcacgcttagaggtcaataatagggctttatttttcgccgtttgttgagttgtcccgtttcgcgtgtagtttcggagcccgaagacccgcagtgcgaggatttcgaggatcaagctcaagatctcgagcaaggcaagccacctttgaacatattgagcctatatttgaacttaattatattgcttgcaaaatattatgcattgaaaggattgcacttaatctgtttgcaccgtctgcaaggcagaccggtgggcctacctaacttgttgcatctgatccttccattgttaattgttatatcatgttcccttgcaaccccttagttgcgcctcggtaatcgtgcactctgtatgagtatcgacggtcgccatcaaacttaaaatctgagaaacattctgagtaaaacttgggttttacaaaagactcggaaaacccgacacctgggtcggtgcttgcgaactaaatgaatttccaaaatcgcagaccggggaacgtaccgggtgtacggttacccgctcttgcacttaaggaccgtttccttggaatttcatccgaacataagacaagtacgaccacatgggtggaatgggacacccctggctgagtaattagctaatcaggggagccttgatgctgagagacaagtggattcgccggggtggtgtcggggaggacccctgggcttcctggcacagtatggtccgggacctaacctgttgttggtctgggacccctctcgtcagcatatggtgaacctgtgtcggctttcgaaatgccttgtcatgaaagccttaaggtctctagacgtggccgtactacacgggctggatgatccgggttagtaatgtcgtgtgggtaaagtgtaccccctctgcagaggttattaaactgttcgaacagctgtgcccacggtcatgggcggatgtgaggtgatttctagcgtagttttgtttgactactgctttgtgaaatttgctgatgaggtttgggattgatgtttggaaaatctgcggctgatgggatcagccaggctcgggtggccgtttgaaagctgttggccgggtgccaaccttgatcaattcaaaagactgatacattgcacatactccgaccggacgagacgcactgtctcatccgtgtcgtttgagaagcactcacttagttgttttcagaaaagagtttaagtaaaatcaattgcaaaaacaacagcctttccttgaagcctgcattaaacacttatttcccatggcttgctgagtactcctgtactcacccttgctctatataaataatcccccccagttgctgaagaagatgaagtagatcccgctgacgaggagttcttccaggagcaagtcggctacgatgagttttagggttttggcctagttcccaagtcgcgcctgtgatgtttggtccaagtcttggcttccgcttccctcttgtaatgtagttgtgagctcgggatctgtccgcagcccaacatgactgtactcctactctataataaagagacttctgttgctctgatattctgacttcctgtgataccagcactgtttcctgggactggtatcgattaacaggttaaattggagcgtcacgggctaattccgctcaggactagttcggggtgtgacacctaagtatcctgcatgatatctgaccatcacggacatcgccttatccccaagtcgactcccgatccatcaccggcaatactctcccgaggcatcaagtcaccaacacatgaatcaaacaaagaaaccatattccgagatcaagctatctccaacttgacttattgttagtaaacaacggtattacatatgcatagtatccatctagaagccataaacatgaaacaatcacaactatccgaacaaatcaacccgaaaccggagtcggccggtcagaccacgggctgggccgatcagaccgtgggctgagccggtctgaccactcgatcaccgctggtttgaccggcaacacatgcccgatctgaccggtcctgacaaaccagtaacacctgtatatcacctgtaactccaatcatctccaaaactacttcaccaataatctccaaatttcaaaaccaaaaatctcaaatgccaattgttcatcacagaataagaataaaaaacactttgattttacaatctaccccttgatgaacacattggcaaacccatcaaaaatgttttgttgtttggaaaaataaaaacaaatgtggtagagagcacaaaagtggtaaaaagcacacttcgtaccaaagtacacatcgtgctcaaaatcaaaaagaaaacttttctcacttttaaaaataaagaaatccccccttgaacaaaaaacatgctcttcccaaactcttctcccccttttgacaatgatttcatcatgcataggaattatgttcagtaatattcaagagcttagcatacatatagcatatcgtgtcatgtgtcgcaataaaaagaagatgaacccatcattaatatagcaagcatgcattaaagtataatcatgaaccaaagattttacaatgaagttcaaatcaacaatcataattcatgatttcgtactatttataatgcaacatcttaacaagcacataggttgaaaaataaacactatacatatccacctattgcaatcatcactctttcttgaaagagctctagcacaaaacaaccaagacaattttttaacttttatttgagcctgtttgctcattttttccctcaattatttcgggtatgtccttgtcgtcaagactgtttccaaggattcggcacccattatttttgctcacatcgaatacgttctggtcgtcaagactgtttctaaggattcggtattcattttatctctcatacatattttttattctcttgcacaatgagcaattacaaagctatttgaggaataataattcaataaagcatttataaatcaaaccatatgctagcatatatattgcatttttttaaattcaaatatagaatttaagtgtcatgcatcatctccattgaaagcaatatctaagcctcataaaaaaactaaaatacacacaagctatgctagatacaaataaaccttcatagtattgctagcatgcacaagaatataccatatgtataaaacaaagctctcttttctcaatttttcttattgtcaaattttgcttgataaaaccataatgtacaaaaactccccttcaaatcacgccaaaaggatgaactattcccaattctacacgaagaatagcaaatcgattagaatccaatggtttagtgaaaatatcagcaagttgcaactttgtatccaaaaacgtcaattcaacatctcccctctcaacatgttccctcaaaaagtgaaagcgaatatcaatgtgctttgtgtgtgagtgttgtgcaggattcttagcaatgttaatagcactagtattatcacaaaagagaggtactttctcaaaagtaagaccataatctttcaaagttgatataagccaaagaatttgagaacaacaactagcagcagcaacatattctgattcagcagttgattgaacaacactagattgtttcctagaagaccatgcaatcaatgatgtaccaagaaaatgacaagttccactagtacttttcctatcaactctacaaccagcaaaatcagcattggaatatccactgaagcatatagaagatgaagtagaataccaaattccaaactcaagtatatgattcaaatacgtcattattcgcttgaccgcttgatgatgtgaagcacgaggagaagcttgaaagcgtgcacacaaacacacaacaaattgtatatctggcctagaagcagttagatacaactaagatccaatcatacttctatactccttctgatcaacagctttaccatcttcaccaggatccaacacagctgtagaaccaattcgtgttgatattggcttgcaattctccatcttgaaccgtctcaaaagatccttcgtgtacttcgtttgatgcacaaatgtaccttgaggtgtttgcttaatttgcaatcccaaaaagtacgataactcacccatcatgctcatctcaaattccctgcgtatagtctcagcaaactccacaagcaaagcatgagttgaacaaccaaagatgatatcatccacataaatctgaacgaacagttgattatcaccatgcttaagaacaaaaagcgttttgtcaatctttcccattgaaaaacctttcgcaagcaaaaagttattaagcctatcataccatgttctaggttcttgtttcaaaccatacaaagctttagacaatttaaaaacatgattggaaaaatcaggattttcaaaacctggtggttgtttgacataaacttattactgtataaaacctaaaaccatttagaaaaacacttttcacatccatttgatacaatttaaaatcttttgaagcaacaaaagctaacaaaagtgtaattgccttaattctagcaacaggagcaaaagttttatcaaaatccaaaccctccacctgagtaaaaccttgagcaacaagtctagctttatttctcacaatcaaaccatcctcattttgtttatttttgaaaacccacttggttccaataatgtgcagggtaaccaagaaacattccatcggtagagcgtgcttcaaacttatccaaatttccagatttcaatacaaagtatttgcaaccaaaaacacgcaaatgtgaaactttgggttgacgttcaaatcgaagttcataagaagtttttccaagttttgatctcaagaaaacccgatttgaaatatagcatgtagtgtttatcgcctcagcccaaaattttctaggagttttatactcatccaacatcgttctagccatcccaaccaaaacacgatttttcctttcaacaacaccgttttgttgcagaacacgaggagaagaaaattcacgttcaagacctctttcgttgcaaaattgttcaaaagaagcatttttaaactcaccaccattatcacttcgaattcttttcaaagaactaggaaattcaagatccaatcaaagaaacaaaccacaaaagtgttgaaaagcctcatccttagttgccatgaagaaaacccaagaatatcaagaaaaatcatcaaccataaccaacacataccactgtcctccaacagattgcactctagctggaccaacagtatccatgtgtaatagttgtcccggtgcatccgtcatcacaaaaataataggagcatgtgaagaagtaaccatcttagcatgacgaaactgtgtacaaaccaaatcaagatctttcttaagtttaggcaaaccatgaacaagatccaaaccacttaacctcgtgagatgatcaaaaccaacatgtccaagtctacgatgctaaaacatcacatccttattaaacttagcaaccaaatatgttatcacaggtgaaacaggattttcaaaaccagcttttgtcgaaacaataattcagcaatataaagggggtagcgcatgagacctaaaagtggatggatgcggagacaaagatttagacaggtcaggacctctcgatgagaggtaataccttactcctgtttagggatttgaattcgccgtgtgtattatagatctgacgatctagttgtgtatcatgccccctagagggcctcctgcccaccttatataggatgaggggcaggattacaagatagaaatcttaaccgatacgatatcggtttcctatatgtactttacaatattatcaaatcaggactttaggccattccataatatataaggaaacgtaatacccaagtcatgatccgttacatatttcatagatataagttatcccctataactagtcggataactatgccgtgtgggtatggggtacccataatcttcacagtagcccctgagaccttcacagtcgaaaagataatcttctttcgaactagattactccaaagccgagtgcttcaatcatcttctcatcttcgccatggtttcccgagtacttttaccaaatctaaagactgtggagagctgaaaaataactgaatgtaaacttaggtgcatcaattagattcacctaataggtgtagcccccgactatgtgattagttgaacaagctaaacatatagtcaaggagtaaataatccaaccaaccgagtggttttgataactgtagtcaatcaagtgacttgatattaatatatagcatatgcggtgtgaattcccgaataacatgatccgagtgatataccgactgctttgtaaaatatgatgcgtgcaatctaaagttgactacatcattgaaaatttacatagcaaaacagctataaagaagcttgtatattgtgaataaagaaatttctaaagtattgggcatacaccatgcgcacactgctttaacagatgtgcttaagtccctaaaagacacatgatttcaccacacttggaaatatatggcatatgtggtataaaatccgagtaaataaactcataaaggatttaccaaccacctagaaaaatgaccacaatatataatcagcctaaaccaataaaaatgttcacttacgtggcaaaaagcaacgatattgtatccaatcaattgctttaaaaacccacacagtgccttgacttatataaaaaagtcagtggggtagctatataaagaattctggagttgtcggtaatcctctcttatctcttgtactttatttattactctgatttaatagaaatatcattctgagtaattaagatttacttagtgagaattacttcttggttagttcctaattagcatacgggatcattgttcactatagtccatttatttatagtgattgctttagtgtttgatcggcactaaagtagttattaattgcgtagatgcggtgcctgggtaattaatctccagtggttgatgcatatcccacagtacgtttgaggtgggtctagaggtggtgacagccctcaagagcacttaagtcctccctgtccgggtacgtagtagagcgaaatctgagaacaacgggttgccagtgcctgaagtattgcgttaggattaaagttaagcttttcctagacacatcacttctgaccctaaagggaggtgttcggcggtggacgctagggtttgttggatgcaacctgtagctgtcgttctacgtctattatagtttttagataataaattaaaacccaggcctttacatctaaaatggatgtacagagccatcctagatatatactccctccgtactcgtaaagtaagccgtttaggacaatatttaagtcaaaccttgagaacattaaatcatgaataactcttaagttgttgagtttgaaaatttaaaattatatgaatagatttgccttgaaaaatactttcataaaaatatacatatatcacttttcaataaatattattatagaaacaagaagtcaaagttgtgttttggagaccgtgtcgctgtgcaaaacgacttcctttatgagtaaggagggagtatatatatctgagaggtcgaagatgcattctatcccttgtcccacaattaagctcattgatcagctttcgtcatcatcccactgctccccgcatgttgcccaccttgttggaaataaaccttacacgatgtatctagtagtagctagttttacgttcctttctgttgatgcatgcatgttagtttttctgttgttgcatgcgcgagctccgggttgtggatgccgtgcacgtagtggctgtcaacgagattaactcgcgactggcctggacaacgggacgtgaacgcgtctctcggatcgcggggatggacgcgaaagaaccgggacgtgggatcgaatcctaagtctgttatttgcataataaaaggagaagaaaaaaaaccgaaaaggtgaagcttcatcgcaccacaaaactcagcgtgtttcctcgtgttcgcgtgtgtttttccacagcttgtttgtcgatcacttagggaaacctgacaagtggtatcagagctcggttcagagcgtggacgcgagatcgcgctcttgagggtgtcttcatgcctcgaggacgcacgcactccccgcgccggcggtcggcgtcaccgtccgtgcatgtttcaggttccggcggccgcgcctcgggcagcggcgggagcgaccgcgggctggtgatccaccgcgtggtcaaggaagcaggaggtgcggcgaactacccgctgttgacaagaaccaactacaacgattggtctttgctgatgaagatcaaactgcaagcccggtgcctgtggggcgccatcgatccaggcggtgtcgagcttcatgaggataggatggcgcttgacgccatttgcagcgcggtgccccccgagatgatctcgaccttggccaccaaggcctcggccaaggaggcatgggattgcatcaggatcctgcgaatcggcgacgaccgaattcgcaaagcaagcgcacagaaggtgcgcatggagtacgagtcgctcgtccttcgcgacggtgagaccgtggaggacttcgccatgcgcctgacctccaccgtcaatcaactcgcgacgctcggcgatcccgagccggcagacaaggtcgtcgagaagtacctgcgcgtcgcccgtcccaggttcacccaactcgtcctttccattgaaactctccttgatatctctacactgtccctggaggaggtgaccggcagactcaaggcaggtgaggacgccatgccattgccatcttcgtcctcagacaacgccggcaagctctacctcaccgaggaagaatggctagagcgccacaagaaaaaggagcaggaggcaaagaagaactcaggcagcccaagcaaccgtggcaagcggcgaggcggcaaaggccgcaacggcggcggcgctgaagtcggcggcgcggagaatacgaactccggagcggcccgtcgtgaagacaaatgccgcaactgtggcaaatacggccactgggccaaggattgcaggagcaagcccaagcgggatgaacaggtccacgtggcccaagacgacgagcccaccttgcttctcctcacaggaggagtaatcacacatgcacgtgaacaggagcatgcaccagcgccgtctgcgccaactccgtcatccgatcccatctacctggaggaaaagaagctgttcgcggcgctcgacgacgccgcggagcgtgatccgggcagctggattgtggactccggcgcctccaaccacatgaccggctgccggacggccttctccgacattgacacaggcatcaccggcaacgtccgactaggagacggctccgtcgtccgaatcgaagggcgaggcaccgtgctcttctcctgtaagaatggggagcatcgaaccctcgccaacacctacctcattccacgcctcgctgctaacatcattagtgtcgggcagctagacgagaccggtttcaaggtggaggccgaggatggcgttatgcggatatgggatgagcagcggcgcctgcttgcccgtattcaccgcaatcctggacgtctctacgtcctcgacgtcgagctcgcgcgcccggtctgccttacggcacgcatcggcgacgaagcatggaagtggcatgcacggttcggccacattaacttcactgcgctgcggaaaatggccagagagcagctggtgcgcggtcttccggctgtgtcgcaagttgaccagctttgcgaggcttgcctcgccggcaagcaccgtcggacgccgttcccacagcaggctcaacagcgctccctggagccgctccaactactccacggcgacctctgcggcccgatctcgccaccaactccgaccggcaaccggtactttctccttctcgtcgatgattacagccgtttcatgtggttgtcgctgctcccctccaaggatggggtggcggcagccatcaagcgcatccaagccgcggctgaacgcaagagcggcaagaagctacatgctcttcgcacggataggggggagagttcctggtccaccacttcgcggattactgcgccgagctgggagtccgacgcgagacgacggcgccctactcgccgcaacaaaacggcgtcatggaatgtcgcaaccaatcggtggtcgggacggcgcggagcatgctcaaagccaaagggctgccaggtatgttttggggggaggcagtcaccacagctgtttatctcctgaacaggtcgtcatccaaaagtattggtgggaagacaccatacgagctgtggaacagatcgccgccggccgtccaccacctgcggacgttcgggtgtttggcacacgtcaagaccaccacgccgaatgtcaagaagctcgacgacaggagtaagcccatgatctttgtgggttatgagccggggtcgaaggcgtatcgctgctacgaccctgcctctcggcgcgtgcacatctcacgtgacgtcgcattcgacgaagaggcgcaatggaggtgggacggcgagacggcgagtgagctggacttcaccatcgagtacaccactgtgtaccacccagctgtggcgaacgtgccacgagctgactcggagcagccggagctaccgactccgcccgcgacatcgacaagtccatgcacacctgccgccacggcgggcacaactgcgacatcggcggaattcgcgactccaccaaccatcgccgcggacgacctcgacgccgatcatgatgatgctccgcttcggttccgccgcgtcgacgagatattaggaccggcgaccccgccgggactggctgtgcgcgagttcgatgacgaactcatgatggcaagtgctgaagagccagcgtctctcgccgaggcgcaacagcaagactgttggcgtcaagctatgctggatgagatgaaatcaattgaagaaaacggaacctggctgctcgtcgatcccccacctcgccagcggcccataggactcaagtgggtcttcaagacgaagaaagacgccgccggcaacatcaccaagcacaaagcgcggctcgtcgcaaaaggatacgtgcagcggcagggaatcgactacgacgaagtgttcgccccagttgcacggctcgagtcggttcgtttgctgctggcgtacgcggcgagcgaaggttgggccgtccatcatatggacgtgaaatcagcgttcctcaacggcgagctcaaggaggaagtctacgtcgcgcagccgcccggtttcgtcgtcgacggcaaggaacagaaggtgctgcgcctggtgaaggcgttgtatggacttcgtcaagccccgcgtgcgtggtacaccaagctcgacgcgtcgctgctgtcacttgggttccatcgcagtgcctcagagcacgctgtgtacatgcgcggagctaacgcacgtcgactggtggtcggggtgtacgtcgacgaccttgtcatcaccggcggcaaccactccgagcttgatcaattcaagaaggagatgcgggagacgttccagatgagcgacctcgggctacttcggtactatcttggcctggaggtgagtcagaccgacgagggcatcaccctgagccagggtgcgtgcgcaaagaagatacttgaggcagcaggcatggttggatgcaacccgagccagactccaatggagccacgcctcaaactcagtaagttgagcacatctccttgcgtggatgcaactgattacaggaaaattgtgggtcgctgcgctatttggtgaactcgagaccggacttggcgttctcagtgggttatgtgagtagattcatggagaaacccactaccgagcatctggcagccgtgaaacgtgtgctgcgctatgtcgccggcaccatcaatcgcggctgcagctaccggaggaagaaaggagctgttcatcttgttggattcagtgacagcgatctcgccggcgacgtcgacacgcggaaaagcaccaccggtgtcttcttcttcctcggtgacaacttgattacctggcaatctcagaagcagaaggttgttgccttatcgtcctgtgaagcggagtacattgcggcgacaacagctgcttgccagggtgtgtggctggcgcgtcttcttgccgagctcaagggagaagaagccgacgccgtcacactcaatgtcgacaatcagtcggcaattcaactcagcaaaaaccctgttttccacgatcgcagctagcatatagagaccagatatcactacatcagagaatgcattgaggaggacagggtgaagatcgagttcgtcagtacaaacgatcaactggcggacattctgacgaagtcacttgggcgtgatcggttcaataaactgtgcacaaggattggcctcgtcgaagttaaagggacgtgcaaggtttagggggagatttgttggaaataaaccttacacgatgtatctagtagtagctagttttacgttcctttctgttgctgcatgcatgttagtttttctgttgttgcatgcgcgagctccgggttgtggatgcccatgcatgttagtttttctgttgttgcatgcgcgagctccgggttgtggatgccgtgcacgtagtggctgtcaacgagattaactcgcgactggcctggacaacgggacgtgaacgcgtctctcggatcgcggggatggacgcgaaagaaccgggacgtgggatcgaatcctaagtctgttatttgcataataaaaggagaagaaaaaaaaccgaaaaggtgaagcttcatcgcaccacaaaactcagcgtgtttcctcgtgttcgcgtgtgtttttccacagcttgtttgtcgatcacttagggaaacctgacacacctgaatcaacaagttctgtccccagcaaaaactcattcctgcccggccgtgtcgtaccggcaaggcgcgtcaagtctcgctgctcagcggtatatatatgccctggcaaattcgatcggttccagcgacaccattctctagaaggctaatagcatagtacagcatatataccgatatatctgcagcttttgttgagttttcttctgctctgtggtgacttctgaccctgatctgtcatctcctctttatacagatcactttcaggtttgtgtgctatatgcctactatatccctccggcttaaggctctgtcttgcgtgcttgtggcttaagcaagcttaattatgtccctgtatatgattcgtacatgtattctgtatcagctagcaacagattcatgtttctgttcctaatggaaaataattttcgggtttgttgttgccctcaaaacagacagagttttaagagatggagggagctctagtgagcacagcaaccggggccttgaagcccgtccttgcgaagctagccgctctgcttggtgataagtacacgatcttcaaggggctgcacaaggagatcaagtctctctctaccgaactcatggccatccatgcgttccttctcaatatgtcagaggaggagaatcctgatgcccaagaccaggcttggatgacggaagtaagggagctatcctacgacatggaggacattattgacgagttcatggtccatgttgatgatgaatctgccactccagatgggttcatcagtaagtgtaagaaatcgctcgcaaatatgaagactaaacgtcgaattgccaaggcaatagaagatttcaagagccaaatcaacattgtcggagaaaggcatgcaaggtatagatcagagaagaccatctgcaggaccagcaatacaatcattgaccacagggctctctctatctttgagcatgcttcaaatcttgtaggtattgaagggccgaaaaatgaagtaatcaaattattgtccgatgatgatggctgtgagtcaaagcaacaacatccaaaggttgtctcggttgttggttttggaggacttggtaaaactactcttgcataccaagtataccaacagctcaagggaaatttttcctgttcggttttcgtatcagtatcacgaaatccagacatgatgagaattctgagaactattttaagtgaggtgacacaacgtgattatgctgtgactgaagctggagatgaacaacaacttattattaaaatttccaattttctttcaaaaaaaaggtaatagtgtggtccctagataaatattcttttacatttccctcaaaaaaaatattcttttacatgaaaacgttggcacaattgaatttgtaatttttatttacatatgatctaatttagctatgcatgtttatagaatgatgtatgacgacataatatacgttgccaatatatagtttgtacagtatttagttattcggatgccatgcgaacgagaggggtatgtgctcaaatgacatgcatgctacctccgttcggaaaaagatgttattgcgcagaccaatgaaattgtgttagatgcagcaaaaattgccagtttgcccctaattaagcattattattagctccaatcacctacttttcgtcttggattgctacaaagaaccatgcgtttagctgtgtgccaactggaaattttcacctagaaaaccgaaaacgatatatctatttgagaacggagataatattccttatatagatatttatttcttataaattgattttggtcactatggatgttataaaattgaacacgtggattacaacttatggtcattttaattcttattattagttaattatatctcttgagttgctagctttccaaaaattaagtgcatgcacatacacttagagaacttttacaatacaatataatggaagtatttactatagctagtagtgtactatatcaggactagatcattatggtaaattatgtttgttgctaatctgtctctaattgcctagatatactctctccgtactcctgtactcctaaaggaagtctgtcacttttcaatatatgaaaagatttgtcttgaaaaatacttttataaaagtatacatatatcacttttcaataaatatttttgtagaaacaaaaaagtaaaagttgtgttttggagaccgtgttgctgcccaaaacgacttcctttacgagtatcgagggagtacaattttaattggttagaaaaattactcaataccatttgatcatttatactagcggtatatatatattggcagtacattataatggaggggatttggcctaaaataatttctttacacgtttaagtgaaaattgatagccaaatgcttcttttttttcgttcagagtagtatatattttccttaatctgttctaggcctaaagagaaatcctagctagaaagttcgatatatctaaatttaggagggaaaacattaaactaagtttaggaatagcatccatggtatatgccgtgttatccgaaagttttgttggacctaaatctatgctaatatatatcacccctaatatttatgcaggtactttgttgtaattgatgacatatggaacgtggaaatatggaacattattaaaggtgcattctccatgaacagtcgctgcagtaaaattatcaccactactcgcataagtgatgtcgctagatcgtgttgttcttcatttcgtggtcatttgtataatatacggccccttgataccgtgcactcaagaacgttatttcatagaaggctattcaaccctcaggaaaaatgtccatcacaccttgaagaagtttctgaccaaatattgaaaaaatgtgacggcttacctctggcaatcatagccatatctggtttattggccaacaaactaaggacaaaggatcaatgggaacatgtgaaaaattcaattggttgtgcacttgaaagaaatcctacggttgagggaatgataagtattttatcattgagttactttgatcttcctcctcatctaaaaacttgtcttttgtatctaagtatatttccagaagactatgtaattaggaagaatgacttgatactgagatggattgctgagggattcattcataaagaggacagtaataccttgtatgaatcaggagaaatgtgtttcaatgaactagtcaacaggaatttgctacaacttgagaagcaaaactacaatggatgtcgagttcatgacacggttcttgattttatcatctcgatgtccaagaaaaataactttgttactttagtgacttctccttgtctaactattgagggacagaacaagatccgtcggctctcccttcaagttggcagcgaggaaggaaattcaatccaacgaacaatgttgtctcatgctcgatctcttgatgtgttttggctgcatctacaggagatcccttctctagtggagtttcggcacttgcgtgttctgagctttcaaggttgcaggtggttgcagagccagcatcttgcaaatataggaaagttgtttcagctaagattcctgaacctcaggaaaacaggtctaaatgaactgccagaagaaatcggatttctgcagaacttgcaggcgctgaacttagaaggcagcaatatgcatcgactaccaccacatattacaaggctgggaaatttggtacatctatttactgacattcggattcaactcccggaaggtattgcgaagatgcggtcactagagacattaaaatgggttgacctatccaaccattcatctaacattgtaaaagaacttggccagctagagaatttgagggaactgaagttgtttatgcccaacgatgatatatgcgatgagcacgtgaaggttattgcctcttgtctagttgaattaggtagacataacctccgtcgtctatatatcgtgggttataccgaattgcctaacagcctcttaccagatccgtggtgcccttcaccacttaaactcgaagaacttgacatctctgactcacctatggtacaggttccgagttggatgcgctcattcgtccagcttaaaaggttaggccttattctaaaggatgtcagtgatgaagatctaaccaccctcggtcgcctaccttctctgctacatcttcatctcaatataccaagaggagaaccagggtacgaggataggctcctcatcagtggctgccatggattctcatgcttgaggcagttttatctcacgggtcagcagccaatttttacagcgggatctatgccaaggctagagctactcagagttgaaatggatgaatctaagccagagtttctaactaatgcttctcttgaaaacctcccctgcctcaccactgtgaaatgtttgcttttcaactttcaacgtggtgaggtggctcaaaatgggaagactgccatggcgagagcaatgagttctcatccgaaccaccctagccttgtgtatgagtagagctggcggtctttcatattatatatcgagctatatatttgatgcacaaccaccaaggaacagccagctggtaactgctaaccacttaattctctcaaacaacacatgattaatgcccagaatttgatcacctctttacactatcagatgatacaattattgtactgatgatggccttggggcacggtttcacgcaatctgcagtgacaaggttgcttatttactagcgtacttagttggtcatcctaaactcgatatcttttacagtgtttgcgaggtacttaaagatattaagagatagaacaatgtaaaccattgatcaagagaggggcaaggtacggaataaaagttaatgtaaccgatagcaacgaagtaaataactagtaaaatatgggtattttgggttaatcaaatacctagctgaattgatccgtattgtttggtagaaaaagttgtaaatcttacgaggcattttgtctccgatacattttgtatcattcggtcgaaaatgtaaatcttcccataaattttatctcctaaataagttttatcattttctaatatttgaatgtatttgagagaatagctactttagtccctaaagtttttctgtaggatcagtttagtccctaaccttttaaatggtccaaaaaaatccttaacctttgtcataagacctagaatagtccttggatccaccaaaaccatcatatggatatgccatgtcatcattcatgcaaaatctataatgaattgtccaatttacccttacgtatatcatagaaaaataaatataagggtgaattagatataaccataggaaaaaatactttttttcaccattttgaggtatatttttgctcttgcatataccatatatttttttaacattttccttttgttttttattttcctatgcgtaagggtaaattagacaaatcatatagattttgcatagaaaggtgacatggcatgtccatgtggcaattttggtgggaccaaggactatattagcccacatgacaaatttaaaggacttgtttggacaatatgaaagaataagaactaaaatgacccaggatcgaaactttaggtaccatattagctattctcccaatgtatttttgtgttgtttcatgtatcacaaatttataattaagttgacatgcatgtgtctatataatgtagcgtatgtgttcatgcatgcacgatgattaagttggaaacgatgatgttcaaattagccccaaatttctagcatgcttaacaagagtaacgcaagttattagttagcaagttcaaatatttgggacgaagatgtgagaataagatcaggatcccactaattaacacagttaattactatagaattaaagagaaaacattttttcttaaaagaatttcctccattgtagcgattgcaccctaatcaacacaataataaaaaatgacacattttttttgtccaaaataacatggctgcatgatcaacaaaacatatcaatttccttcttcacttactgtcatatatgttgtactttgatattttttttaagactttgtactttgaaattatagtatctacctatgttcatgttattgagggagaatatgcaaagatgaacaaacatgtaaatatagcgtattgacaatgaattacatatgaacctacaaaccgatgatcttttactgagtttatatgttctttgtgataaaatatcaattttaaaataaccacacgaacattcggtcatattttatccgattgtgttattagacacaaaatatcgggggcgtctaatgggcgggtgatcgctcccccgtccgtccagcgatcacccgtccgcgccctcacttatacaatacactcctccctcctctctccccttcctcctccctttcttctttttctactacagtaaaccacaaaaaaaaatttaaaaaaaaagttagaaaaatttatgcatagaaataatatatataataaatttgaattcaaattcaaatttgaatcgggtatgtaaacttttgacttataaactttgggtctataaactttaggtatataaactttagatgtatagaaatactatatatagaaaatatttaaattcaaattcaaatttgaatcggatataattcaaattcaaatttaaaacgggtatgtaaacttttgacttataaactttaggtctataaactttaggtgtataaactttagatgcataaaaatactatatatagaaaatatttgaattcaaattcaaatttgaatcagatataattcaaattcaaatttaaaacaggtatgtaaacttttgacttataaactttgggtcattaaactttaggtgtataaactttagatgtatagaaatactatatataaaaaaaattgaattgaaattcaaatttgaatttgaatcgaatatataaacttttgacttataaactttggttctctaaactttagatgtgtaaacttgaggtgtataaactttagatgcataaatttactaaaataatagagtaatacggtgccaaaaaaggaaaccaggtggagggagggagggaagaggggatcgatcgctaccccatagccaaggcgatcgattgcccattagaggtttcgcaaaatatcaacttaaaaaaacatcacgatcatactcttaaaaagaaaatgtaaatctaagaaaaaaaacacgtaaattttttttaagggaaaccgaaaactttattactgaggcaggccagccaaatcgctggtcaccaaatactcaaggcccggcggagtgccggcccagctacaagggtcaagcaaattacaacccagtttcgccagttcatgcactacttgttacattccctggggcaataattaaccaagaatgaaataaatcttctagaaatgacattcttgatctccagaatcacaccccccatgacagagagattgaaagagttctcctggagtgtagacttcagcagcagcgagcctatttcaaactctaccttcattatccccctttcacttgccgcccctacagccgctgcacaagcaataatctcagaatggaatgcatccatcatgttatcagctccgccagctccagcctgaaccacccgtccatgatgatcccgaataacatatccccatccgccttgtttggtgctgctgtggaaggccccatccgagttgatgttcaggacatcagaggtgggttttctccattttgccattctcctctccttcaacttcccctctttccaattcaacttcaagaattcctctccctggttatcaatgatatacgccaagtcaattgggtctctggctttacctccttccctcacttcattcatctgcttccaccattgccacaaacaaacgacagctctcatctgtatattctctgggcacccccaaatggtctccagcacacttcttgcattaggttgttgcgctagagataatctcaggtcttccaagttcatcgcctaccaaactttcttaacaagcttgcacttgaaaagcacttgaaaaacacgtgaattttgtaatgcaggattaccgacgatcatgttcctaggaaggaaatgtaaatctttttagaacacgtaaataacggaaatgagaatcacgggtatagtagagatgaggtaccgatgcggaacctgtgtacctagaactaagaagacaattatgcccttctccatcttaaaaaaaatatccttttacacttactacctaagtacctatatcagtacttaaatatcttttaagtggtatcttttattatggaccattagatttttaccaaacaccgtaaaatctctccttcaacatatagggaatgccttggctgtactctcgagcttccgttccatgaagcggccgttgtagaacaccggcctcgtcgtcactggtgatgaggacgcctattcacccattattagttgcaggcattcattgccgctaggtaagctggccaccctaccaatgccagcactccagccggcgccaccaacgctgctacgccgccctcagcaccctccattacgtgccccttcgtccacggaatcgccgccgcccatctcaaaccccttcttgcccagatctgtcaccctccactgcttctgcagggactccaccaccaccacgccggtcaatgtggccgccctcccctggggaggtctcctaggtctcggaaacgccagatcggggctctagcagcccttaattaaggcgttgtttaggcctcgtttacttggcaaaaacttttgcctatacgtaccacatcggatatacggacacacatttaaagtattaaacgtagtctaataataataaaaaaaactatagattccgctaggaaattgcgagaggaatttattaagcacaattaattcttcattagcaaatatttactgtagcaccacattatcaaatcatggcgcaattagacttaaaagatttgtctcgtaatttacacgcaaaatgtgtaattgattttttattttgtccacatttatactccatacatatgtccaaacattcgatgtgatgggtgaaaagtttttgttttggaaactgtggccttgtttagttcgcgaaaaaaaattttaggtgttacatcagacgtttgaccggatgttggaagggtttttgacacgaataaaaaaactaagttcataacttgcctggaaaacgcgagatgaatctttttagtctaattaatctgtcattagcacatgtgggttactatagcacctatggttaatcaggtgcaattaattgcacagtttgcatggaaatcgcgagacgaatcttttgagcctaattagtctatgattaaccataagtgctacagtaacccacatgtactaatgacggattaatcacgctaaaaagattcatttcgcggtttctaggcaagttatgaaattacttttttcattcgtatccaaatacccttctaatatccggtcaaacgcccgatgtgacccccaaaaattttcttttcgcaaactaaacaaggccgtaatctagacacgacgctccttcaatccgctctgccaaccagctcgtctccgcatcccatcgagccttcaaggagaagacgcaaggaaggtgctttatctaccttgcgcatgaccatcaagtggtgactatcagggcaatagcaatgcgtcccatgtatataccgaatctcagatgccacatgggctaaggaactgtggtagtcacaagattcacaatgtagcaactccaaagtggggtccacaaaaataaagttctccttttttttctccacttttccccatctccttctccctttcctcgggaccaccgctatccttcttctcccccatctctcacgccttcccctctctctcctctcatgctcgggtggcaacctgactcagtcttctctccttacaccgtgttgggtcggccaggcggagcagcagcctgcggaaacggcgccgaggtggccgggcagagtggcagcctctgaggcaacggagctaggcggagacagcgccgatgcggccgggcggagcgccggcctctgcggcgacggagccggacggagcgccggcctctatggcgacgaagccgggcaaagaggcgacggcaaccgagtagagaggcgaccgaagcggtgacggtgcaggccggagcagcggaggggtgggctcgccggatctagcctcaggttctctctggcgcggatgcggctccctatccctacccccacctcctctctgtctctctcccgctttctccccacgggcggatgcgatttttttagcaaaagttgattttttttttgacgaggttcttggagccaatgttgatcacgtgaacccggcgaaggaatggtcaccacttccctctctcctccacgcaagcactttttctacctggacaaacattgacacatgtcacgtgcgtgcaccgtgaatggcctcagagacccaatctgatgtttctcctgccatcgctcaggttattgtgcctatgaatgcactaaggccattcacagtgcatgtatgtggcgtttggtctcgatgcaccagctcggcgattcccctctacacaagcgttggtcgtaaccctgtgaagtccgcggaaccaattttgtgcactcgttcttctcacaaaatcaaggtcgcgtggcatgggggagaacggtgcagacgcattgtgaggttgtggccttacgggttcgtggctccgcgcttcccctccccatcccccgagctggcgatgaaggaagaagaagagatggcggcggaggaggaagaggaggcgacaaatctggtgcctacctacttgacgccccccgagccatgttgtcactcattgtcgtgtgtcgctccaacccaccggacccatcctcgttttctgatctatgctgctgctcgtcatcatcgcccactccaagccgcaacgacctctccttgacccctccacagcctcaatgggagcctccacgacccatccagatcgatgcgccaccgaggagagggtagaggccgcgctgccgctcgtccttgttgcccatagccatgggcgccgacgaggagagagaaaggatttggcaccgacgaggagaggggtgaagggatttagcgccagagaggggaggagagaggggagatctggcgagcttcgggcttgttttggccgcccggcgctgtcgcttcatggggaccaccgctgcaaacaaccctccgcctggctcgccgtcaccgcttctgcctttcacgagagcatgtgggttggggaaaggggaagcatcggttttggggagagagacggaaaaaggcgagaaaaatattgttttttcatggaccccagttaaggctacatagcacggtgaaacttgtggctaacattattctttggtgttcttggacctacgtgacatatgaggtctggcaaaattcgatgttgcactgctaatgccctaagcagtggtccctaggcaccacctgccgtcaccccccatctctagtgcaaccttcaccgcagagcacctggacggactggcagcgctcacttcgatgacaagctatgcccttgccaccaccacctccaagaactatgcatggaaggcaatggcacttctcggcgacacgcccaattgatgacgagtatctcagcccaacctcctacgcccttgatgaggagcactatgtgacatcctggccctattaggatatggactgtgtggctcatgagagccgtgtgctcctgtttgataccaccttgctaatgtagtgaaaagctggaaccaacttataatggtttgtccctctagtcgtatcactcctaggttaaccattttacacaaagcaaggatgaaagtatatgtgtgctatgtgtaagtgggcccacccataggatggactaggttgcgcggttccaaagggcgtgttgttacatgcttaatttttttccattttggttcgcgttaccataacatatcccattctctaattttatttattcttcaggagaatccaatgatgtgtggttttactttatggatcaacaccgtcagcccgacgtatgatggcagaagagtaactaaagctgaatgcaaacaaagtacaagagaatgaaggagcacaaagttgcagtacgtgctaaacgacgtagaagggggtagtagagaagcttaggcccgattcgttttcggccatttcttttgttatgttggtgtatgtgtcacgaatgtgttatgtttatctgtgtgttagctaatggttaactctctttttcatcgattaagttgatttgtgctaccgctgcaatatctttattctccttctattctttatccaccttctattctttttcatcgattaagttgatttgtgctacggcgacgtgaatatgtgattgtcttacgagggcaaataaattgcgacaaagctatgaaaccaaaaaagccaatgaaagtaataaaaaatatgtaaataaataatacctcattagtccaattattttaataaacaaataaatactagaactacaaaataataatgtattttccacctgagaaaaacataacatatattaaaaaattgctaacgaaattaaccaaacaaacatgtattaaaaaaataatttcggctgtacaaaggtaaagagaggacactcagattgtattgaaagcccgacagacaaaccatatatagtttgattgggattctatttttacaggatgaagaagtacacattacacaaagagcaattttacggtacatgtagagactcctagcagacataggtcgcgactacaaaagaaagtaaactaacgacagaaaacatctgtttttgtgcaacatttctaaacatatccaaggcagctatcagacatccaaacacaatcagacacatcatcatcttgctgcccatagagaattgcttcgtactgccgcgcatgtccaccttatacatggctgggccacttctctccatatttctgcatggcatcacattgccgcaactctttagtagactagtagccatcttatttgaggacattgcacttttctccatatttactgttccattttcacagttcatttgcccatcctccctgcaagtgacagcattattggaatatgatagagggcattgctcccgcgcaactctgctacctggacattatcgaattttcagcggttagattctgccgcgagagttgatcagttctttccatgcttcatcgatttacatatatggtgctacatggtgctagacaatctgcagtttttatcatgttggtttaagacaggtgctaccgcttgaatttttttccctataatatgtatagagagttgatcattgcattagtattaatatgtatagagagttgatcattgcattaagtataatatgtgcaagattaattaagtattaacttaaaaaacttgaaaataaattaatatgatttttatagctactttcatatagatttttttaaaaaaacaacacttaacagttcgtgaagagtaagctagggagtcgaagatgggaagaggtagattcaaactcaaccttaagcgtactgcccatacagttattgatttattagctaaacaacatcaatcaattcttttcatagttcatttcaaatttaagggtgtacagaaaaaaaaacaatcgaccatatgtctaggagtgaggaaagagcctgagtgagattaattattgatgtcgactgaactg

SEQ ID NO: 4726 - DNA, 121106 bp, Oryza sativa
ctagttgtgtagagtctaaggtataagtcgattgagtccgctggaaatattttacggctaaaatataaaaagatgaaaaatctctcactaattctaaaattaagctctaaaattcaaaatagatttcttctttgaaatgtgccgatgtgatatttttaattctgtaacaacacacgggcattttgctagtcacaagagaaacaggtagtcgtcgagctgctgctttagctatttgatcatctgactatctgagttactcaactattgcttatgctgcttcctttgaacacacatttactgtagttcaaaattgcagtggacctgtgtctaactaaggtagatctgtagaagtatttagagataacatagatgcctacctcatgaccttcctcgaagcaattgacaagatggaatgtgcagaatggttctacataaaaccatattactgagtctgcatcaccgtaatggggcataaccccaattcttgaatagctttcctcttcaaactcaagcactctatatgagggatgaagaaggataaattcgatttgtgagaataattttggatttttggtattagctataccaagtacttacggagcccctcttagcatcctagttgggttgagggtaagtggtgaatctatgatgatgttgtacctgcaatcattgaggatgttagatttcactaatttttctaattggtttgctatttctagaaaattcattacatcctattaaagctattgtgttcatgcatatttgaaagtttttaggtccactttacttttatataagaaaagtggagcttcaagagaacttgactttaatagaactattttgactttaatgaagttatagcttattttatgtggcatagtaaaaaatgaatatattatttttttggttattctgtacagttcaatagaaaactgctagacaaatattgactgagctgctgactaattgcaagcattgaattaggcacagttagaatgtgagttctcaatcctacagttagtagcagagcaactcagctggttgctgccataactgggatccatggatttggttattccatatatatcatttagggattaatagtgctctgtgtttcaaattctaatagattttttatggagtccatgtccatcccatgtgagttaagacattgttgttttatttctgtgtaatgtttaagaaatttgtaaatgacagtaaaccagacaaaattagtgtacttcatatcatgaaaaagaaacgaatatgatggttttctactagcttccagttggttctaatctagttcataagacaccattcctctgttcttcacaataaaattgctattttttacttaaaaattccctgttgaaaaaaaataaaaattaagaatcctcaagaagcgaccaagattgattgttttcttgtgcatcagtctatgtgaaatgtgctgtttagtatcttccatttcttgaaattaaataaatatactatttgaaataagagcaattcttgaaattaaataaatatactatttgaaataagagcaaaattttacatgcatctaaatatctaatgaaatcagaagagcagccataaaaacaaatatagctagctgtaggcaagaaacttacgtccccgtgaccccaatttcatgacaatatgtgcatctgtctagcttgagaccaaccttttgtttaagtttttctccatcctctgtgatgtttatgaagttaagcatatgaccccatttttattcaggagatgtagcagaagacaatggaattatgaaagtagataacctgagattatgccaactgttaggaaaggctgtaccgcattgatcccgaaaatgaccatctcttttgacccagggattacctgttaccgtggacatgatgcattgcatagctaaaacatgacaaaagaaagctaacagatgtacaaatgaaacaatggagcactagtggctttaactacagtagttgaactgttattattggaaaacttggaaagttcagatgaatgaaacttatagggactgaattttggctgtatctaccttcagtttgatttgtatatttttgcttgtcattatttaaatgatgtggtggccatctgttgtggtggaaacatgtttaaaagttacagatttccatggatatttctgcaataatctttagctatcttcttagttttgaagcagagtaatgctgtactaatttaccaacagaaaacaatctaactgtttccatgtaagaattaacttatagacagtattcatagatgctatgcttggttctggtgttcatctccaatgtcaaatcggctatgtgatgcttgtcagttaatctaagcacatgcattgcattctcattactttatttatggtcatggtactccctatttacgggccataaaaatctgatgtgtaagctatttagcttaacattttgaagaactaggcaaaaggaccaccgaccttggggtgtgctgtaaatggcaacttccattcaccaccgagatgccagctgcctagtgtactgaggttatgcaagtcaacctcgtggggaacatcatcctctgatgctgcataaactctccctgcatgctcaaacacgctagtgttgctcatgcttttcattacctttcggaattcagctgcacatactcaacagtcaacatatagcatttccaaaatgtttgcgacaatcccaaaaaaattacagaagaaatgcgatgtagtaatagcagcaggcaccatactgtgttaagaacagaggcgatgagcatggcgggagggttcccatcggtcatagggagaaagcatggtttctgacgttctttctcaatcctaaatgtttcagattgcacgtagcggttattgtacgagattgaccatgtgctgttattacttttgcagaagtatacagcatggagcatgccttctccttccacccagatgttatgggactgcccgaaaatggaactaacagattggaggcctccatagagagggtttccgcctgcattccacaatcatcagagcatctgggtttgttccatgacattttgtgaaaaaaaaaggaaatcttattcggtcaaacgtattactaataagcttgcatatgtgaattaccatttcttatgtagacaccctcaggaaaatctgctggaatctctccttcaatctctataacccgtgtgatctccccgatctcgtcgactggtgcaaaattgctctatagaagtgccaacacaaggtatgcatataatattttgccttctgctcgtttttcagctccttgtcagcaagttaactggaacagaatcgaaccatttgtatttacctcagtgggacgcaaaggttgacatttgaatgtgaaggtgtgatcaacaaatgaatccagcagctgttggtaagtactgttcatggcatttgatgcctctcccagtttggagcttagatgcacctgaatctccctgaaatacggctgaaacatgaaacaaagcagagtatttggtttacatttctcactcactgaaggatcacacatctattgctgtgtgcaagattgccaacctttccagtggatgctttctgatgagatagacgagcagctttaggggagatggatgacctggagctggagatgcatacgcgtggttgaagggtatacatggatggcaccgtttttggtctccctgtatgcacattttaattgatcgccggggtttctatttatatctgcacttcatgtgtgaatgcttttatgcccacacgtaactgtccgtatcacggtactttacaagcggtacggaaacgaaacaaaatctccatcagagagaacatgaagtgacaaattcaccgtacttttcagtcgtgattgcgtttcttgtgttatattagtaggataaattggagagcacgtgctctccatggagaagggagagtaattaaagcggtagatatttttgataaactatatagaaaacgctactacctccgtaaaaaaaaaaggtattttcttacctagtacctgtctagaaaatgcactcccttggctttttaggtggcgtttggatccagggacttaactttagtctttgtatttagatactaatttagagtattaaatataaactacttacaaaactaattacataaatgaaagctaattcgcgagacaaattttttaagcctaattaatccataattagagaatgtttactgtagcatcacataggctaatcatgaattaattaggctcaatagattcgtctcgcgaattagtccaagattatggatgggttttattaatagtctacgtttaatatttataattaatatctaaacattcgatgtgatatggacttaaaagttttagtcccatctaaacagggtcttaggacggagatcactcagactccgaaagggggttccttttgggcagtggtgcgccaagaaaataaatacttcctccgtccttaaaaaaaatttactacgatgtgacatatcctagtactaggttgtctttttttgggacggagggagtaccgtgcatcttggactcggttgtcttttttgtttttatacacgcttttccttattgtgcatagtgtcgcatcgctatgatagcttgcacgctattagtgctaattgcagtgctaagcgaattgattcgtgttaattgtagtttttataatgaaaatagccactttctccgtttcacaatataagactttctaacattgtccacattcatgtagatgttgatgaatctagacacattgtgaaacggaggaagtaggatagctcacacgctattagtgctaattacagtgctaagcgaattgattcgtgttaattatagtttttataatgaaaatagtaaacaaatagttaagttgaaaagttttgaaacgagtaaaatgttttcaaaatttaacttgaaagttcaaaaattgagttaaaagttttcaaaattagacttgatagtttaaattttgagttgaaatcttttaaaattttacttgaaagttcaaattttgagttgaaaattttcaaaatctagttgttagttctaaatttttagttgaaaattttaaattttagtttcatatttttataggaagtacttttaaattttatttgaaagttagcaaattttagtatatatttttaaattttttatataaaaaagaaacaacttcctatgaataaaataaaagaaaaggttaccttaattaaatccgtgataataaaaaactaattatttgagcaaatcataacctttcccgatcccactctaacaacgcacacgtaactggtggtctagtggggcggaatcgtgaacttatcaaaattcggaattgcttgtagctggtgggtcaaaaccgcacatgtgggtgtgggccaaaaacacgcgccaccttgcttgtcggtgcgcctgtgcggaacaggaatagtgattaaaacagatggcatctaaaagaggtacagatgacacccacaatacctccatactcttgtgttgacaagtccatactcccatctatctttacaccattttttttataaagaaataaacatcccggcctttgctcaagagagctacaacccattattacaatttagcacttcatatcgagtgtagtccaaataagacagcaaacatcacggaaaaataaagcgaaccatatgaagttaaaaccatgattaaacagggatgaaagctgtgaattatatctattctttttggttgatggataattttatctggttttgagataattttatctggttgatggaattcattttattttaaatggctataatcggttgagttatggatgataagacgtagaaaaataacaaatcaaacaaggaacatttatgtgtaaaactttttttcctttttatgtttcaaaagctaaggcaaatagaatctactgttgcggccaggggcatatcataggatatctagggctcaactgctcaagctttatgcttgggttatggactccagtaagtttcatattaatttctaaaatttatagaaaactatgagtccataagccagggcctagatgtggctcctggagcctctgcttatgactgataagccaatcaggagatgattagattgatgagactagctcacttctaaatacgtggtcgtgatatattacggcttagagcgttacatgtattttttcgatagagttgatggtaaaacgtagttttgtcaccgaacaaagaagaaagcaatcgctatctgattacttgtacagacagaactcacgctgcaaattcgtgtcgatcttgtacggatagacagtggctaattttgttcaccttgacaattccgtgaaaaattaatgatactttactgttggcctaacatggacagcaaatggagaatggtactttactgttagcctaacatggacaaaaatggagtccccatgagtgtggccgcaacacatgattggagtttacactgttcggcccatgttgcacgcaagttgattatccctggacgaactagttgaccaatgaagttagaggaagatatttttgtaaatttcaaaaacctttcacaaaaatctttataactatggcctggattagttcctaaattttttccccaaaacataacatcaaatctttggacacatgtatgtagcattaaatatagataaaaacaaaaattaaatatacagtttgtatggaaatcgcgagacgaatcttttgagcctaattagttcatgattagctatataagtactacagtaacccacatgtgctaatgacggtttaattaggctcaaaagattcgtctcacggttttcaagcgagttatgaaattagtttttttattcgtgttcgaaaaccccttccgacatccggttaaacatccgttgtgacaccaaaatattttctttccgcggactaaacaaggtctatctgtctttatattccagcaccttttatggtcgctacaaagcttggattaccgagatttggttgtgttaagactgttagccagtatcacgattgatatgacaggccaacatgaagttcatcttttcacactgacggtgtgtttagttcacataaaaattgaaagtttgattgaaattggaacgatgtgacagaaaagttgaaagtttgtgtgtagaaaagttttgatgtgataaaaaagttacaagtttaaaggaaaagttgggaactaaaccaggcctaagattcagcacttccttcgatttgcccggaatccaagccatatttaggccgagtttagttccaaactttttcttcaaacttccaacttttctatcacatcaaaactttcctacacatacaaattttcaactttttcatcacatcgtttcaatttcaaccaaatttctaattttgacgtgaactaacacacccctactccaaaagtgtcttgagttggttgtaattgtgacttcaatgacatgccttacctcgttcataaattgtgactacaggtgcctttataataaagcactctcttatttacttgtttcggtcataaatatttgccattaaactagggagtagatatttgatgttggggtgcgccggcgctgctcaattagaattcttgttagcaggatagtagtatcaggccctttctttgatgctttgctagtttcggagtcatttacttccttggagtttttcttttcttcccctaaccgttttttccttggcgttccttggcagtgacctgacctcctgctgttgtgttgtgtaattgaaattttactttcttctaatatattgacgtataatatttttgcgtatttgcgaagaaaaaaatgatgttgaacttataaaattcggatcatgaacaatttctcaagtgcttaatattgaacgtaatatggtatagatagatttggcttgaaaataactatcacaacaccatacacttgctaaggctgtgttctttgtgcgttgggatttgggaaccaccatagattccacaatgtttgatttgcacaccatacactatcactagcatagaaacacccattactgcgggtccacaattggctttgttgtcaaacgacaactgcgtcacgtcgaaggacgtggttctctcaacaatagtcggaagtaaagataattgtattacttggtcaaattttttcgggatcccccattaggctatttataaccctatggctcccttcttttaggttttgggcttataggggaatttacatggttgcccttatgatagggacattattgagggcacactgtgtcctttacatatacgggcttctaatgggccaacagactcggcccagtcatggcgaaggggctcctcaagggcacgacggcccatcgggccttcttctggcaaggcctggctttggcgaagctcgcgtgcctcgcgatatggctttcatcatacagccttcgcccgcgtagtcttcttctgacaaggtccatctccagcgaagtccgtgtgcttcgcaacatggctttcgccatgtggctttcacccatgcagccttctcgggtgtggagcgcaactgcgtcccctcggtcttcgccgtacgtcttcggcttgaatccttgctagcgcttcggtttcggcaggtctggtcgaaggacctcgtggtatacctccaacaagcccctcacgggcaagggtgagtatggagctctggctgagaccgtgcaaaatttatggtatggcatgaggcgccccctttcggccgatgttcctactgaaacctgttctcgttcctgcacaaattttgacacttttgttatttttgctagtgctttttcccaggcaaattgtcttggaccttcgccttctttatggcgaagcttttgtcttggctttactgcctatgaatagtgttgggctttttgggccggctatccattgtttttggcttttcactgttcggcccactctaacgggaaattaccgttccgtatacccccctagcgacacgtggcaagctctaattgggtggtaggcgaaccgtcgcgtgggtgggttatatatacttccccccggtgtcgcttttacttttaccccgagtcactttcaccatctcctctaccgggagtattgccctgtctgccttttgtgttcaccggctcttgttgtccactttgactagcgtgatctcaactccttcactagcctttctgtacttttcggtcatggctcctcgtaaacctgctcctgcttcgaccactggtctagacccgggaaagatcgacgaagagcacaccgggtatcttggtgcttcgctcattgatgaggcggagctagcgaagctggtttcgatcagggtcgtgaccgaagaacaggcctttgcctctggcaaggcggtggtgccgaagcctgacgagaactagaccgtagtcttcgtcgcattcttcgatgcgggactccagtttccttgcaatgtcttgctaccagagatacttcggctttttgagattgtattgccccagctcagcccttccgctttggttcgggtcgccatcttcgactagacgtgccgaaccgcgggttttgagccgaccgccgagctgtttggagcgatcttctacgccatcgtaaattcgaagacggtggtcaccctagccggtacccgaaggacggttttcgggagcacgaattttaacttccaccccgagcgctccaatttatggtctgtgaacgtgtccatgcctaaatgggatcgtcattggatgtcgatgtggttttaccacaccatcccctttgaggccgcatcggacgcagccaagaccatgaagtggcagtgtagggccatcgcgcccgtccgaaaacccaaagtggtgatcgacgacgcgatggaagcttgcttcaccctacttcggaagatcactcttcggcttagctgtcatgatttggtggaagagttctatatgcttcagattcttcccctttagcagacatggcaagtcgaagtaaacaaggaggaggaggcggatggcctaccgaaacttgtgctccccggaggggcgaattgtgagtttgctattcaattcaactttttttggtgttattgtttttgttatgcttccccttcttattgtgctcattcctttgcctttatttcgatagtacttatgctgcctaaggccgaaagtgaggcctgaagaatgatcggggagcttaccataaacgagcatagccagctgcttactcatcagatgggtggctgggcgaaccgtgttttctccggcgagctgccggcctgggcaaaccctatcaaggtcgtcatcattgacgaagatgatgccgtaccatctaagaagcgcaagtgagttaaaggaagttttctacgtgaaggacatggctagcaaaccaaagaaggggaaagggcccgatgagccaagacgccacgtggttctcccaggcaagaggaaaatcgtcggagtcaaggataagactgacgaacattacaatctgtttgagggacaacctccgttcgcagtgatggttgacccgaacatcctcctatcaaaggaggagaccccttactcacgtaaggatcatagcgaaggaacaatagtgaggagaaagtacgtgaggaagacagtgacataggttgttgtatggacgatgtaaattatttgtaatgtactgaaggtcaaacagcttggattaatttttaatatattctccttaacttcatgattttatttattatgaatcataatccatttaaatatgccatatgctaattatatgtgactatagatatttattaggatttttaaaccatttaaatatgccatatgttaattatatgtgattatttgtatttattacgatttttaaaccatttaaataggcaatatgttaattatatgttattattggtatttattaggatttttaaaccatttaaatgggccatatgttaattatatatgattatttgtatttattaggatttttaaacaatttaaataggccatatgttaattatatatgattattggtatttattaggatttttaaaccatttaaatagggaaggccatgtacttatttgacgagtgaggcctaattattatttttggatacaagcagctccatgtgaattcatgtgtatgtctgttcatttttcgctacaaacagctccatgatcttttgtattaccagataggacgacgtggccttgttcacaaatggttgacactttcgtgacgtaagtgttgtgttttgaatgccttgcaaatcatgtggctgacacgacactcactgtatcagtgttagatgtaggatcgaatcacaataactaagcccaaccagaacggggtgaatagttggtatacctaaaaacaaaaacttttggcggaaataaaagttacccttgaaattaacggatcgcggtctgaccgaagatgaacgtcggtttgaccgatgtagatcgatcggtcgaaccgccaagatcagctgccgctagctgtcgccgccgccaatctgaccgcccttatgccgccggtctgaccgctgcttgccgccggtctgaccgccggtatatcgccggttagaccgccgagacccggtaaacacaaatcgaagaacttttaaagtggatgacgactttattgattctctctgtgtttacaaagtacaccaacaacactccttacaaaaatttcgactaaactcgaaaccctaactcaaaactcaactcaattgctctcaaaagcgataccgggaagcctcacgctccccctctatttatacccgaggtaggcagtttaaagtcacgaaccaaactcatactaggagtcctaaacaccttaggaaaccctctagtacaagaaacaaactttacataaccaatcgtaccaaatttagactccctccaaattcgactccgcatcccatacgcacataatatctccatcgtatgccatatggaatctccatcaaccacgtgcatcaactctagcctaagtatcccgcatgatgtctgaccaccacggacgtcgtcttatccccaagccgactcccggtccatcaccgcaaatactctcccgagacatcgagtcacctacacatgaaataaacaaaacaaaccatattccgagaccaaactatcccaacttgactcattagtagcaaacaacagcattacatacgtatagtatccatctagaagccataatcatgaaacaatcacggatatccaaacaaacaacccgaaaccgaaaccgacacagagtcggtcggtcagaccgcgggctggccggtctgaccgcacgcataccgccggtctgaccggctaccagagcccggtctgaccggtcacataaaatgacagcatcctgtaaattcacttgtaaaatccaatcatctccaaaaccacttcgcaaattaattccaaataataaaaccaataatctccgatgccaattgttcatcacaaaataataataaaaacacctttgattttacattagatgtctgatattaacacatgtcaagtatttctcattgaattataactggtgatgaagtgatacacttactatataatcaatattttttagatggatatagtgatttttcagtactcactgtattatgaaatctggtctaatgcatctggggtatttactcaattttttagtttcatatcaacgaaaattggattagctgcaagcaatctagattactcccttttacaaatgagattgttaatatatttttgccctgttcaggtgaacaaccttgattcatatagggtatcttcattgcggtgccacaagtactactgcatctcagcaaactagattggtaaggattgaagggtttgttgtataaaataggccagatgattaacagctggaaccaacaagattgtaatataccctataatgttagcctactcctttttccagatgcaagatgctatcgtacactaaatttgggcttcattttgttctgcttttatgcctccaattttttatcagtgtactgattttttgttgagaaacacagtacaaacgcaggcgctcacaacatgcgcacactcacccctatgaacgcgcgcacacacaccctacccctatgagcacctccaaaagacaatctatcaaaagcaacaggccttgtacaatctttttattctaaatgactgatgatagggcaccatgcaggatttgtcgccatgttcttcctctccgtccacggctgcaagctctccaaccaggtcaccggatccccttatttgtagggtcgctaggtaaatgagttgcttccatgttctacttcaatagcatttctgagggcaacaattcgatgttggcaggttttaaatggaccaactgcatgtaaatacaagtttgcattgcttgctggaccgtagatatttcatattgatagccgcagggtgaaaatatctccatagcttcaataagagttgagatagttttaggaggtattatccctatatctaatatctatctcctaatttgtctttgatgtgtacaactgaactaattgaaatcaaatttcaactaattgatagtctttaaatgtttgctgaaccaaggttttaaggtagatggcattgcaaaatgtttgtaataattgttttgataaaaagttaatgagctgcaagttcttaccactgcatctgaccacctgacataaagctagctgaatatgaccatgatccatctgtagctttgcacattaggccttgtttagctcctaatttttttttcccaaaaacgtcacatcgaacctttggatatatgcataaagcattaaatatagattaagaaaaactaattgcacagtttgcacagaaatcacgagacgaatcttttgagcctaattagtccattattagccataagtgctacagtaactcatatgtgctaatgatggattaattaggcttaataaattcgtctcgcagtttccaggcaagttatgaaattagttttttttccatcttagactaagcaaagtatcgaccatataaatggaggagctcacttcacttctcaacccactcaagcaagctcaattgctcttcatacattactattagtagtatagtgctaagtggagtagtatagaatagtgttcggaagtcctcggagtcttcagaagagttttcggtatggctctagcagctcttgtaatattctgtaatactctccaaattaatgcaatactcttctttatacatctttggaactttgcttagtctaattactggtcttactttatatctgcattatgttaattgtgtaggtagcctaccagagaggtgtaatggtgttggtttaatgtctgatttatcagttgctctatttcgagtgcacggatatagagtagtatttagtaatgtgagcatggtgcttagattattaaatattattaattgggcatatatgttgcgggacagtagaggtgggccgttgatggtgacagctcagtacgggtattattcctccacgttagtgtatattcctaagacaaattcctgggagggtactccttcgttttagctccggttggacggccatgacaggctgtcgtaagaaactcggcaactcggggtggtctctcgaagtaccaggaggacacttttagggggtattggccacatgattgtacattagtagatgtaaagcgaggatttgagtgtatactagaagtatatgaatcgaatgctttctatttcttttcccactaagttagaattatttcatgatgaggatttaatcagctttgcttcgtgtcactctacccctgtattacacttaacccctgtttaggctttgacaattataagtagtatatgtataaagtgcattagcaaagttcactcttattatcttcccttgggattaaaaatatgatactttggaatacttccgggtaaaatgctacaattgtatatccgtgcgcttgcggattatatctgtaaccataaatatcctaggggaatactcattcccagcaatgtcgttaagaagtactaacaagcatttctagcgtcgttgtcggggaagattaataatgagttgactaagctaataactttatatatataatacctctgtatgagtcactatcctttgcaggctaaccttgattgcttttatttgtgtcgtgaaaagaggatagtgtataactggtttcaacttaccggaaaactttaacgagaatccatagtccttcttccggagagtcaagcctcgtgtcatccctccacagaagaggctctcttaaaagaaactagccatcccaacgtcaccaagtttcatgaatagggccaagaagacccttcgcgaattcgctgctccgtctgctgacaacgtgcctgttgacccggctgtcaacatgggacacatcgacttcgatcttaagagcagcctgataactatggcgcaggcaagcccgttctgtggcaagctgaacgaggacgcaagcgctcatctgcaacaatttctagagatctacagcacctacactgtaaagggtgtcagttcggacgctgtcaggcttcgtctgttttcattctcactcctggggaaggcgaagcaatggttctatgcgaaccggatgacagtcaacacttgggacagatgctccaccgcgttcctctcaaaattcttccagatgggcaagaccaatgcctttcgtaggagaacatcaagcttccagcagactagggatgagacgatattctcgaagcatgggaacgtctgcaggagtatgtggccacctgtcctcatcatggaatggacgactgactcattctgcaaagattctacaatggactcattccctcatctggaaatcatctggatgctactgctgggggtgccttcttctcaaagacggtccgtgcggccattgatcttattgagaagatggtatccaacatgggatggagcgaagaacgactctagaccagacaacgcggcatgcattctgtcaaggagacggagatgtttgctgctaaactgcatctcctgatgaagagactggacgatcaggagaaggccaaaccgcaagccactgtcaaggcattagactcgcacatcacatgcaaggtctgcgagaacactggtcactcagggaatcattgcccggagacccgtgaggaagccatgttcatggggaataatggctaccggccgcaaggaagccaggggtggaaccagccccgaccatactatcaaggaggcaacaacggcaacaataacaataacagtaacttcaatcagccctccgtgaaggacttagtttttgcgcaggctaaaacaaatgatgctataaacaaaaagcttgccttgaatgttaaagttcttgagaatataaatgtcaagctagaaggctttgcttccgctttccaaaaccagctgagcttcaacaaaatgatagactctgctggtgcaactagactctttagtacctatgaaggagacgggaaggattccggggcagcccgaaccttccctaaaaaaatgttaaggcgataaccacgaggggaggaaaatccactcaggatccgccatatcctaacactatagggaccaagcaagctagaaaggaggcacagcccgctagcataaatgaacccgaggaagatgaggagatgcagctcaacaagatcgcgccgcaggaatactgtgacacaacgcggctgccgtttcctcaatgttggaagaagccctccatggacgagcaatttgctcggttcatggatgtcatccaaaagatccacatcaacatcccgttggtggatgcattgcgggtaccaacataagcccgctacctaaaggacatcccgaacaacaaaaagccgttgcctaccatggagatggccaagctcatggaggagtgtagcaacgctatactccaccggctgccggaaaagaagaaagatccggggtgtcccataatttcatgctcaattgggacacaacacttcgatcaggcccaatgtgatcttgaggccagtgtcagcgtgatgccgaaggacgccttcgacaagctgaactatacggggttgattccaacaccgatgaggctccaactggctgactcctctgtctgctatccagtgggcatcgccgaggatgtgccaataaaagtcagggatttcttcatcctagtggatttcgtcgaacttgaggtggagttagataaggagacgcctttgattctggggcgtccatttttgagtaccgcggaagccaacattgatgtgggggctgggaacatccggttccacatcaatggaaaggagcagaaattcaactttagaccaagagcagagcaatgctctatggtcaagatcaaatacgacctgaatgcacggaacatgaaggaagttgaagtgcagccgccaaaaatggacagcctcgtaaccttcatgaagaaatacccttcatggtgaccgatctatcccaatcacttgatttatgtatatatcgacgaaaatattatgtgtcattgatatctacagccgatcgaatagatttactcttacttattcatgactgccgattgattcaaatatgacgtcggctcaaagataaatgatacgtcatcggtggctagccgatcggctatcgtttaaggatttaactgcgatttctttgtctttatttcttgttgattgcaggatcaaatcaactggcacgctcacgaatctaaaggcaagatttttggacctgcactgaagttaagcagatcttccaggcctcgtgttttcgcatcaacatttatggtattgaaatacttttcgagtatttgaatgcctactttacattatgttcatgttatattgaatatactgctagcttatctaggagatgctttggtgcaggtataatgtttgcatatgcaattactctatgtcatgacgatgatattagagtagtatctggtagtttagacgtcgtgtctagattacgagatatcattatttggggttatatgctgcggatgagaggtgggctgctgatggtgacagctcagtacgggtattcctccacacgtgtatatagttctaagttaatttcctggggaggatactcctccgtatttagccccggttgtatggtcatgacgggctgtcgtgaggaactcggcagtcaggggtggcttctcgaagtaccaggagggcatcacatagagggtattagctagtatatcagataactagaatatatgtatactatgtatactagaagtataggaatagattctctttctcttttctttccacttagcttagatattttattatgagaatgagtagcttactgcttgtgtgtcactctacgcttggattatcttaacccctgcttaggatatgattatcacaaataatatataaattattagtcaagttctctctacatgatcttcccacggtataaaataaatacgatacccttgtaatactctcgggtgaaatgctacaatggtatatccgtgcgcttgcaaatgaactctataaccataatataccagaagtatttatgcgccattgctgggaattatatttctaatagtgtcgttaagaaataccaacagtgatctaaccctaagttattgtgagatatgatatagtgatatagagttgctataatctagatccaagcttgatttaaattctggatgatttgttttttgaaatgataaatttgcatgttcctcatttgatataaattcctaccacagccaaatatagtttgcacttacaaactttatacaatatttggttacttgtatatccattgaactttgtcaaatcttgtgacttgtgtagatgcttttcatactttatgatcaagatcataaacccatatatgcacacatatgctaagcttctacactggaagatagcatccatgtcatcattatccacaaataagctctccatccatgcttcctttccaaagaaaaatcctttgcaaaaataaaaaaaagagggaaaggtatggctatgagaaaataataaattcttgctctcccaaaattagagcatgatgaaaaaaaaggaaaaagaagccataccctctctatgaaaagttaaaggatattttggaggaaaagcataagcacaaaggagaagcattttctttatctacattttgttttccatcatattttccgccatacattccacacactttgcacgatcttgatctaagtatgacttgctatctgctctagtctaaatttttgacatagtaatatatgtgaatgcaagtattcctcatttgatctttaccaagctccacatattcaaccttagtatagggatcgaaaagttttgtttcccttttgtcctttactcggaacgagcaaaggttcaagcttgggtggtttgttgacggttgttacagacaaattttgaccgtcaatataactaaaataatggagaattagctatacttacaatgcatatttgttttcaaataatatagttccacttgtacttggagaataacatgttgcaggaatttatcaaataaaataaagagaaagtgaagaaacctcactcctaagcaagcaaatggataaaatgggcccacaagtcaggtgtaacagtcggaaactgaccttaacttccacaaccacctaaaggacccacttgtcagccactgtaccgaaggggaggtcggttggagccgaccctggttcggccgaaccaggggcaagccccaaactgttgtttattagaacctttcggaagatcgggaaccctagtgcacatcaggagtagtatagaatagtgttcggaagtccccggagtcttcggaagagttttcggtatggctctagcagctcttgtaatctcgtctataatacattccgaataaatgcaatactcttctttatacatctttggtactttgcttagtctaagtattggtcttgctttatatctgcattatgttaattgtgtgggtagcctaccagagaggtgtaatggtgtgggtttaatgtctgatttatcagttgctctatgttgagtgcacgtgtatagagtagtatttagtaatgtgagcatggtgcttagattattaaatatcattaattgggcatatatgttgcaggatagtagaggtgggccgctgatgatgacagctcagtacgggtattcctccacattagtatatattcctaagacaaattcctagggagggtactcctccatatttagccctggctagacagccatgacaggttgtcgtaagaaactcagcaaccggggtggtctcttgaagtaccaggaggacacttttagggggtattggccacatgattgtacattagcagatgtaaactaggatttaagtgtatactagaagtatatgaattgaatgctttctatttcttttcccacttagttagaattatttcatgatgaggatttaatcagctttgcttcgtgtcactctacccctgtattacacttaaccgctatttaggctttgacaattataagcagtatatgtataaagtgcattagcaaagctcactcttattatcttcccttgagattaaaaatacgataccttggaatacttctgggtgaaatgctacaatggtatatccgtgcgcttgctgattatagtaactgttgaccatccttaaatcataagattttaccatcaatacttgcatataatgaaataaaatatagtatccaacttagtggtagggtttattactaatcatttccactagtgttggtgaaatatgtgtatgcgggtattttgagaagaaaacacatccgtcaagcgacaaactgtacctccgcgcattcaggacacatttacatagattggaggccccataagtcagttaaacacctccaaatggcccaatccatcgggccaatgggctgagggcctcaaaattagtgtccacgaggaaaaacgggccgatcagagccgtcctgagttcgatcgaaccgttcctgaggctgttgatcgccattttccatgtggacggccctgattacttcctgatggcagtttaggggcattttggacatttcacataagctgtaaccgtcatacctgcctataaatggagtagctcactctcatttccaacacacaactttgagctgaattacaagaggctctattgtattttttgtacattagaacaaggtagagagtgaggggaagctctggaggggtgcccggaagtttggcgctcatccgacttctttctcgacgactgcagtttcttaggaggaattctggaggagtaccggagctggcggtacactctgctccaggttcggagaacttcttctataaagtaagcatttgtgtttttttcttatgttatttaattacttagtctaagtaagatatatttccatctttgtgggttcattgtttagtattcgtactaaatgctctagtactaggactacggatattgaaggaagttcctgcgcaaatattagagtaataattaataacttagacgtggtgtctaggttagagattacctttgtttgttgtgtatcccacggatttgtcagaggtaggcggtaggtggtgacagccctgaatcccgtcccagtaatcctccacattcgggtacatcatagagctatagccggaaccacgctggtagaaaagcaggggttggtgcccaaagctacagataggaaattacctttgcttagcgtagataattaaaacacatagaaatacctctctagcctagcttgcctacctattgttgatgtccttggatagtcttagccttaggtagattacacacgttccctgagttcaatatccttttgggatcactcgaaggtgaagtgctacatcggtatttcgtgcgcttgcggatttatctgtggtcgtaagaaataccaacagtaaccataaatatgccaggactatttctggcaccattgctgagaatgactattcctagtagtgtcgttaacaagtaccaacacccaccattaaagcatattttagtttaattatggtggtacatcataatataattaaggacataattataatgattcccattgtgagctaattgatctatgcatggctaagtattgctaaaccaatcatctagtcaattataacccaagttatcaatgacataagatattcaacaggctaagtacgataggcatccatcccacatgacattctaaaacaataaatttaatagaaagcggtggattttgtaaaaataggttcaacgtgatcaatgttgtatgtatgacttgccttgctcttgagctgacgaaacctcggtaccacttcgaaataaactggatcactggaactggcggaatctagacgacaaacaaagtacacaagaaatacaagcaataaggctactgaaacaacaaaagaaaccaattttaatggatgttatacattttaacggattcactgcaacttgaatgggttaaaatggagctcaaattatttagttatgaattttacaatatgagctgcatgattactaataatcggaaaaccataatcatttattacatattattgcccaaagataaatagatcaatagaaatatatctccggtaagcaagtctcacgagttaatgactcaatgagtcaatacttcgtgacacgggaccatccaaacagtcaactgaaccggcgaacggaaccggcggcttagaacgactacggctaaaccggtaaactagacacggtttacagtagagatttggtaaacgataggccgataggaatttagggatgcacctagggctttgcgactcagctaccgagctacgggcagcgaaccaaccatgaagacgttgcgggagagcggtggcggcgatggctaaggctgcggctcagctaggcgacggctaggcgcacggcagtggcagctagggccgcagcgcggcggcggcgctagagcggtggcgcggcggcactatggtttagcgggactaaacaattagggttacggcaataacgctaggaaaaataatacctaaactaggggatcacgggaaagttcctcaccaaactgagacgatcggcgaggaggattcgacgatgatgatccggcggcaacacatgggaacaacggcgacgctagatgagaaacaaacggaatagaatagctaaattgatggttgcagtggcaaacacaccaatagagagggagaacggagtatcgacgacgcaacggcgacggcgggaggcgacgacagtggccggtggcagcagcggcttgcggctaggactaggcaaaaatagattagaaaaaggtgggggactaggacttatataggagaggaaaaataggagaggaggtgggaccggtggggagtcggattaggaggggaaaggaggccaactcggatggggagagggggagggcgcacgcggctagggggagagagagggcgcgcggccggctagggggagggagagggggagggattaggattaggactaggactttcccaaaccggaaaagaaatgcgctgttatttttggaaaagaacggaaacagaacaggaagctgacttagactcgtctcgtcatgcaaaacgaaaccgtggatgaagagaggagtgaatcgagcacattttaggaaaagaatggaaacagaacaggaaattgactcggattcgtctcgtcatgcaaaacgaaaccgtggacgaagagaggagtgaattgagcacgattcacgaccaaaggcgggagagaaaaaatattattaatttaaatcctgacaattttttgttgaacgaataaatcctgacaatttaaattaacaacatttattccgatggtttttgagtcccgttaatggtttttgagcaaagagaattcgggaaaaaaaattctccctgacattttcgattattaaataccttggtaatttgggttttatcttgtttaactaaagtaatttctatagacaatttattggtgaattagaaactaccgaaaaaggaaaactccgggtgtgacagtatatatagcatcgtcttttggaggacaaaatttaaattcttagcgaaggcatacgtaaccgtgccgtaattaattaaaggatattttgccattatgttgattgagtctatacttaatcgatccttctgttttgtcttgtattcctccgaagtcatcaacaacttatcaatattgcagactaatttaccataacgtctctattgctgaacttcaaaattttccaatcacataacaacggttcgttgaaacggtgaatatatatagaccacgttagcttcgtaaacatccttttaagagaaaaaaaactacgatatcctggtaagatggcagttgggatatcagcatccggcatgattatgtgctcgaaaaagtgtggactaagtcaagtcaaaattatatatgcataatgtgcttatttgatcatatatatttttccaaaagataatcgcatagagaataaatttgtcttgtgacatggaaagattggatttacagaatcaaacttcttggttacacactaatatacaccacgaaaagtgtacgagttattactattcgttctaacagaagatgttttgcctttttctatatattcattgataaaacattgtatatttataacatacttaaaaaaatattcatgcattgcaacaggttaaaggaattttaattttacatattacttaagtccacactcagagtaaaatattacactcatgcttggacctgtgagcaaaatttccatccctacacactcaggatatcctactctagaaaggaagttcaaggttgatctaaagagctggccattatttgctggatgaaaataggagccctgctatcatttttgcatccatgcaaaatctatacatcatgatgtccatctatactgaattatagctcatgatgtcactataccgaattatatatcattatatacctcatgatgtcaggacgtatgatgtcactatatacaccatgatgtgaaatttggaaggtttttatgctatacgtccataaaaacattgtctggatatccttcaatctccaaataactctgtcactatatacaacatgcgtatagcttgtgcatggatgcaaaaatgatagcagggctcttattttcatcgagcaaatgatggcctgctcctttcgatcaaccttgagcttcctttcgagattaggatatcttgcggagtgtggacttaatatgtaaaattaaaattcctttaacttgttgcaatcactactagaagaattgtttttacaggcggcgaaaaatatatttcccaggtggagaaaagaacctctcgtaaccaaagacctacaaaaatagatgattcgaaaataatgttcacagccggcatctcggcatctccatcttcgtaggcattagatccacccgcctacgaaaatattttcagtgcacgaaaaaaaatctgttgtcagttggcctctccctctagccgacggctctctacctctatccacctccgcctctgcctccgccgccgccggctggctcccctcttccgtctagatctgggaagggaggggccggtgctgtctgtgccaccgccgcaggcggcggcggacggatctaggaggaagggaaggagaggattggagcgtcaccgccattgtctcctcttccgtctagatctgggagggtggggaggggccagcgccatatttgagatgaaggggggagggcagtgcggacggctgtcagctcccctccttggacgttgccaccgctgcctccttgcacgcgccgagccgctgacggccactggctcctccttcttgcatgcactgacagtcatcggctccacctactttgacgccgccgcggcctccttacgcgccgagccgccgacggcagctggttcctcctcgtccttgtgcacacggacggccgtcagctcctccatctcctccgccgctgccgcctccttgcgcgtgctgagccgccagctcctgcttgcgcatacgtgctttgaggagatggagagggacaggccggttggacgagtgaataaggataagtagtccgcatgtgaaaagtaatttttgctggcgaaccacttaagaggtctgctagcgaaaataaaagtatttttacgggcggttctcttaagtgatccgtccggaaaaattgatttttgcaggcggacgacgatcttacccccggttgctattttcgtaggcggccatttgggttcgagggacatatccacctgggaaaaaataagcatacatctgcaaaaatgattcttctagttatgaatacacgaatatttgttttagtatatatatatatatatataacatatatacaatgtttcatcaatgaatatagaaaaaggcaaaacatcttctgttagaacgaatagtaataactcgtacacttttcgtggtgtatattagtgtgtaaccaagaagtttggttgtataaatccattctttccatgtcacaagacaagtttattcactatatgcgattatattttggaaaaatatatatgatcaaataagcacattatgcatatataattttgacttgacatagtccaccctttcgtgtattaataatgccggatgctgatatcccaactgccatcttaacaggatatcgtagtttattttttctcttaacagcatgtttacgaagctaacaaggtctatatattcagcgttgttcaacgaaccgttgttatgtgatcggaaaattttgaagttcagcaatatagacgttatggtaaattagtctacaatattggcaagtcgttgatgacttcggaggaagacaggacaaaacagaaggatcgattaagtatagactcaatcaacataatggcaaaatatcggaggcgactccccgtcgggcggccgatagggaggggtaaaatcggggcgctgcagcgccacgtatgcgtgaaaaacactttaaattattttttcttttaaattatttatccaaatcatgatccgattgcaccattaaattcgttgcaattaaatctttaaaacaagaccacacatggatatattacaacgaaatttttttagcttattattgaattatttttaaatgttgcacgatgttccaccaggttgtcagggttatggataccacatacctaatagtagtcgactaaatttcggcaggacccaccacataccatgtcctatacggaaacaaccttcagatataggaggagtttcatataaggaaggatgaatagagtcctacatggaaacaacaaggactactcggattgtatccatattggttttccctacttctacttagacaaggggacacctattggtataaatacaaggcctcctaggaggagaggggagacggaacaatagatcaagacacaagatcaacatacaagccaacatgcgccaagacaagacgtcggatatcgacttcagagataagcatggctagtcccctacggtgtctatgatactgatatgagagatgtagcgctgtctttgatcttgctgaatgcggattcgaggaggaaggctaccctgttgtcgactacgagtcagcacttcagaccgccaagtcgacaacagttagataggctaccccaaatattgtactggtgtgattatggtgaataagagcaacgaccagcttcggccaacaagggtagggttattacctgacaattcaggggtccgaacctgtataaaaatcctcgtctccgtctcttttacctcaatcttgcatatatccgagtaccaacgatccccatactatgaaaataccggaatcgcgacatcaaacgtcgacacacgtcgacacaggtatatcggaattatttcactaagtagataaaaaatgttttaatcgtttaaatcagatgttgttttaccttatataaaaacaatgtttcagcaaatagtgaaaagatgtttcagtttactgcaatatttgaaccatacatagagaaacaaaaaatgaaacgaatttccttaatagagggtttccaaaataggtgggtgatttgttgtaaaagaatgtttcgttcactgcaacattagatcatacggactcaaacaactcaaatagatatcccagtagctgcccaagattagatggaaacataagcatagtaggaaacgtaaatacgttatctgcttgtctcgtctgtttgccatgaaaataggaacgaaaatatttaagcgaattgtcgaaacatgaattcggcaataataaaaggggtagcgcacgagacctaaaagtggatgatgcggagataaacgatttagacaggttcagaccctctcaatgagaggtaataccctactcctgtttggggatttgaatccgccgggtgtgtattgatctgacgatcaggttgtatcatatgccccctagagggcctcctgcccaccttatataggatggggggcaggattacaagatagaaaccttaaccaatatggtatctgtttcctaaatctactttacaatcttatcaaaccaggactttaggccgttccataatatacagggaaacataatacccaagtcatgatccgttacatatttcatagatataagttatcccctataaccagtcggataaccacgccgtgtgggtatggggtacccataatctccacagtatcccctgagaccttcatagtcgaaaagataatcttctctcaaaccagattactccaaagccgagtgcttcaatcatctttgccatggtctgccgagtacttttaccaaatctgaagactgtggagggctgaaaaataattaaatgtaaacttaggtgcatcgactagatgcacctaataggtgtagcccccgactatgtggatagttgaacaaactaaacatatagtcaaggagtaaataatccaaccaactgagtggttttgataattgtagtcaaccaagtgacttaatattaatacatagcatatgcggtgtgaatccctaaataatatgatccaagtgatataccgactgctttgcagaatatgatgcgtgcaatctaaagttgacaacatcgttgaaaattcacatagcaaaatagctataaagaagagcttgatgttgtgaataaagaaatttccaaagtattgggcatacaccatgcgcacactgctttaacatatgtgcttaagtccctaaaagacacatggtttcaccgtaactggaaatatatggcatatgtggtgtaacattcgagtaaataaactcccgtctggaaaatgaccaaaatatataatcagccttagccataatattggtcaataaaaatgcacacttacatggcaaaaaataatgatattgtatctaatcaattgcttgataaacccaaacagtgccatgactatataaaaaagtcagcggggcagctatataaagctttactgtttgacacattttaagatgcattgtaccaactcctaaaaagttgagtaactgcggtataaaaggattttaaggtatttggcacttgatcacgcgcactttggccctgaaaatataggctgcagacatattaggcctaggccaaaaaaaaatgccttcaacaccctttaaaggatgacgcatgtaacatgctcccgagtaataaatcttctgggtgatatagaccaagtgtagctcatatgaatagcttctgatctgagtgattatcccttatgggatactcccaaatagatataataattgaatcccaactggcggaagtattcggttgataacccttatgggggataataaatagtccagtctttgagcatagaaaatagacccatgatcataaattcatgttgcatgtatccagaacaagtccaaattgaaggtatgctacttgtgtttgagctagtaagcccttgagcatatagcttgtccttctgtagtagtcacaattgtccattgatggtagctgatgtagttggcatagagacaagacgaccaatataaagataatattgcccaccagaggtggcaaaaatattggtggtagtgaagatagtgataccaatcaaaagtgatgaagttgcacagccgtagaggcgaagaaaccagtcggcagcagtcaggtcagccagcaatgaagatgaaggcgcccagcgataaagttgtgtaaccatggcagcgaaataatcagtcgttgacagacgaggcagctggtgaagaagatgaggatgcccactagtggcgacataataagccatccgtgaagacgaggataccagtcggtggtgacgaaagtaagccgacggtgaagatgtagacacgcatcaaaggcgatgacgaaatccaccaatcatgaagatgaagaaaatagtcgccgacgacaaatgcaaccaacagtaatgatgataagcagcaacagagatgatcaaatatgatgacgaagttgtccatcaatagcagtagagtgggctatgttgaagaggcttgacaggatattgatgaagatgacgatgtcggtgatccagtcaatagcggtgtaacagccgatgataatgacgaagatgctcatcagcgtttgcatagtaggtcaaccatgaaggcaaaataacaagtcggcaatgacggaagtagccagaagcgaagacgtagtcacccattagcaacggcagagttgtcagggccaatgaaatagaggtgctgttgatgatgtcagtgacaataatccatcaaactgttgagaagatatcaaagctcgagtaatttccttgatgtgagcatgtgcataacgaagactgatgcaacgcttcttgatttacgaagatgactacagaacttagtgttatagctgttgtagatgcttcacttggaggaaagtagatgctgttgtccaactcatctaaactgagctgattggttgataactccaaactcccgaacatgtagattaaatcttgaatttgatactttaattatggcagcgtccagaaaccaaaattgccggtgaaataattggagttgctgaagtagaatgtctgctccgaagcaaatatgaagataatgactcctagagttgactcgttggctgattaattgatttcttcagcttatcgaattttgagagtcttgtatttgtgtagcccccgactctttggttagttggaaagcaactgaacatagagtcgagaactgtagcttcttgtcatcgagtagccatcacttgagtgaagatatgtgtcgaagatgtctgagtagaaatcttgataattagagaaccacttgttgtagtagaataacacggcattatatttgttaacgcatgccgagatgtcgaggttcttgtagacgtcatggtcggtgaagtagcaaagcttgcgaagtagaggcaatagagtttaccggtgccgaagataataaagatgaagccgctccatcatggtgacaaagttgcatagccgtgatgaagtgaacacgagtcggcggcaacagaagcaaaccggtagcgaagacgcgtagttgtgaagataaaaacaccagtcggcggcggcataaccagtcggcgatggaagaagtagaatgatgacgaaaacgaagacgtctttgaacagcagcaaaataggccagccgtgaaagtgaagacaccatgggcggcagcgaaggcaaaccggcgatgacaatgacgacagtcaatgatgatgaagacgcgtagccatggaggcgaacaaaccagtcggcgttagataagacgcccaacaatgaagacgatgacgtccatcagtaatggtagcggtataaaccagccgtagaagcgagagcagtagtcagcagcaaaccagacaaccgacggtgaagacgataaggccaatcaacagtatcagaatcatgcagccatgggagtgaagaaaccagtcggcagcagacgcagacagcttgcgttgaagatgatgacgcctactagcggtggcagcgacgtggccagccgtgaagacgataacaccagttggcgtcatacgaggcggccggtcggtgaagatgtagacgcccaacaacggcggcataattggccagccgtgcaggcggagacaccagtcggcggcggtgaaggcaagccggcggtgaagacgtagacgccgaccaacggcgcccaacaacggcggcataatatgccagccgtgcaggcggagacaccagtcggcggcggcgaaggcaagccggtggtgatgttctaactgatccattcctagagcgtaagagataagcttaaagccatgaatcccttttatgcatatctggatctggatcctgcagaacaaacatatggaatgagtagtatctgatgtaaatataatactcgaagatataattcaagtattttaaaatgtttataaatatatatttctcctcttgtcaattttgatttccccgagctgatgactcattacgtttaaacactctgtccgactagtcatagcccccaagcaccggaagtcggcctaggcacttcccaaacatgcatatgagtgacatgagttcgtcattaatggaataaagcttcacgaattagaatttaatactcgggtacttttgcaattgttaagagaagaaaataaattatctttatctctatgcttttgatttcttccgagtaatacttagcaccttgcgttactcggtctatccaacgagcccccgggtgctaggaatcggcccaaatgcaactatccatgacaaaccaaacggaaagcataggaagatagaactccataactcgataggcacttttgtactcagattatatcgcaagcaatcaaaaaaaatattatgaaaattgtttaaaaaatatgatataacatatgtagcccccgactcactagtcaacggcgaaccagttgatgtagtgaggcagaggaagagcaaaatatcatataaagaataaatgatgacttagctttgcaatattccccttgatgacggcagaggtggccgatgtggaaacgaggtcgtccatcaataacaatgaagacaccagtcggcggcgaagaaagcggttgacggtgaaagcgaagatgcccaccaacggcggcataataggccagccgtgtagacagggacaccagtcagtggcagcaaaggcaagccggtcggtgaagacgtggacgcccatgaacggtggtgtggccaaccaaccatataggcgaggacaccagtcggcggcgacagaggcaggccggcggtgaagtcgtagacgcccaacaacagcggcataataggccagctgtgtaggcagagacaccagtcgccggcggcaaagccaagccggtcggtgaagacgtggacgtccatgaatggtggtgaggacgtagacgcccaacaatggcggcatagtaggccagctgtgcaggcggaaacaccaatcagcggcggcaaaggccagccggtcggtgaagacatacacgcccaacaacggcggcataataggccagccgtggaggcggagacaccagtcggcgacgacggaggcagaccggcgatgaagtcgtagacgcccaacaacggcggcataattggccagccgtggaggcggagacactggtcggtggccaaggcaaaccggtcggtgaagtcgtagacgcccaacaacagcggcataataggccagccgtgcaggcggagacaccaatcagcagcggcatcgtccgacgtgttctatagagaccatggcaaatttggcggtggctctaacaatacatgtaaagagacaaaaatagtctctagttagtatcaagaaaattaatcctgtggatgtatatttgcatatatgcagcacacatatgttatttggttggccgattgatctcctgtagcatgaacattatatgcatccatacaatcagattattataccaatcttctgccatgcgtgcatacaggtcgcgggtccgagtccggatcgaattagactcgggcaacgaggtgcatgcaaaataataaaccacagatcaaactgagattggtagtagaaacaaataaaaagtgcagatgattatgggtattaatcaatgcatgtatgtatgtatgtatgtatgccatctgctttctgcttctttatatgttgtgacaccatcaggagtctgtggcaattggagtatttcacgtgtggcttccacattacgtctcctatacgtatccgatggcttgcttgatagtctcccagcacgatgagtcgtgcacaggtggtcggcagatctcatcgacctccagtacacgtattcgaacaaaatatcggagagtaaatcaatatatgattagaaatcaatctaatataaaatattgaaatgacaaaccagggattagaatcgtagttctaattgagattatcctcgaccgaaaaagatgtcggcgattcctgaaattgtttccatcgcccttattgacggaaatcttgacgcacccctacctgacgcgccaactgtctaaacatgaattcggcaataataaaagggatagcacacgagacctaaaaaagtggatagatgcggagtcaaaggatttagacaggttcaggccctctcaatgagaggtaataccctactcctgtttggggatttgattccgtcgggtgtgtattgatctgacgatcaggttgggtcatatgccccctagagggcctcctgcccaccttatatagaatggggggcaggattacaagatagaaaccttaaccaatacggtatctgtttcctaaatctactttacgatcttatcaaaccaggactttaggccgttacataatatacagggaaacataatacccaagtcatgatccgttacatttttcatagatataagttatcccctataaccagtcggataaccacgccgtgtaggtatggggtatccataatctccacacgaatcaacagaaagtgctggtgtaattagctaattaaccaatcgaaacagatcgctgctgttttaattggatgaactgatgtgatcgttccacatgtggtttgcacacgtgggcgcgtggcttgcgagtacatgacgatgtactgaacaaaagcgagcgcacgggtggcgagacacgcgaggccaggtgcaacattccaaacgggatcatcggtcgggctgaaattaaaggaaagtcacgctaaacgtggcacgtgcgaacaaacaggacgggaaacgcgtggaacaggaaattggaatcggacaaggcgatgtgtcaaaggcctgacaaaaacacctcgaatttttataaaaccaaattaaaaaccgactaaaacacagatctaaataaattaaatccaaaataaataatacacaattaggcccataattagaaggacgttgtggctggcctgttaagtgcgttgggcccatgtggcaggccacggcccaagtcggtacaggtgtgctaagagtcatcgaattcgattgaacggttaggatcgctcgtgatttagataaagcttgttcctcgtccacagccttttcggccgcaacttccgcctccccttcgtcctccccttcctcttcgccgtcatggtcttcgacattatcttcctcatcggcatcaaagtcggaggaggcgggggccagcttcacttgcccgcgcatatgcttcctggacgtcccctcgtcgccatcggccttgaagggttttgcccggggtggaagatcaccatcatacacccgattcgcccaaccggccacctgccgcgtgagcagttggctgtactcagtgaccgacacatcgccgatcatcctacgggcttcggtgtcggcctgagcaagagtcagcactgcgaaaacaaaacgtgtcaaaacatcaggcgtcgaacagataaaaaagggggggggggggcgaaacacaagtgcatttagagaaaatctgctattgtttgctaaagacttgtctgtgttatattattttcataagaaaacatatagcaaatcttctcttatcacatattttatacttattactgttttgctctaggttgctgaagtttctgtagagattaggatgaaaaatgctaggaacagaaagttttcaacctgcttccatatttttttcaaactcaaaacgaaattatgacatcagccactaaattattgcatatttttttcatgattgagtcttgtcgtttgtttttctttcctttccctcgtcgttttttttgataatcttatatctgatgttcgccctcttcgtcccctctattttttgaactagattcttgcggctcattgttcgacagagcgaaccatgcgggctcgccttgacggattcaagaactgtcttcgagccaaggatgacgaactgggccgcaagagcttggagatcgagggcctcgttaacaccctcaaagaaacgaattctgaaaataagcggctccaagccgagctggagaaggggagcgaggcgaaggccgagatcgaatgactcaaggctgagctccaaaaggagaaggatcaatccgccaccttgactgagtactataatcttactgagccgaagatggaggctcttcgccagaaggccctcaaggcagaggcgagcgctgaaaaagaggcggaacggttcacgcaagggatggtgaaagccaccgagtccaccaaaaccgcatgccgtacgcttcgccttgccctcaatgatatgggggagagggtacaaggagtccctagagaagatgcctccatctttgacttctcggagtggactcagcaggccggcagggcggtctcggattgcgccaccgcgtacggcgattgctgtgcgcgtgtgtcggcggccttcaccatgggcttgctgcagcagttcgggtgcgaacacgtcgccgaattccctaactttgcgaagggggattgggaggtcagctgtcaagatgtttccctcgcgctttgtgcctggcgcaagcagttctggcaaaaggatggccgatccactaccaaggcgcgtctgcttgaacaattggcgaaggcagaggcggcaaaccagggcgaagaggcagcggccggagagggtggaggagatgcccaagatcacccagaggtgtgaggccctccgcccgctctttagattttgtagttttcttttggcatttgccgtggagggcgaacaatgtaaatttggccaatggccctccctctttcgtattgtagccgaataaaacggcctttctacaaatagatcataaatctctactacataaaaaattgaagatgtttcccttgtccgtttaattagaaaaaagtgcaaaaaaacatataaaaagaaaaaaaaaggaaagtccgattcgtgataaaaaacataaaaaaggaaaagaaggaaactccgattcaatgatcgctcccatgcgcagttgcgcccaatcccgagtccgattacatgaaaatgtaaaagtcaaagcctcttatttctatttctaaagccacaattaaaattttccgacaaaattccccaaattcgaagaaccctaatttcgggtaagaaccctaagactcaaaatctaaatcaattaagctaagggtttggattacttaccagacttgaagcccctatgctcaccggagcggcaccgccacaccttcaccttcttgcagtcgcgtcgggttcaccgtgcgtgcgcgcgcgtgcgcgttcctctctcccgccgctgacgaggtccgggccactcggcgctcgccgtttgcgcgcctgcctcgccggactaccatgacgtggcatggcttggcggcgcccttaggtgcccccctcccccagccggcgaagcagtatccgctcggcggtcgtcactgcacgcgcgcaccagctcgccgaaccgctgtcgccaccttcgctgtcgttctgcttgctcgtcgccggagagaaagggattgggagaacatttgggagctagggttttgcccctctctcctcatcggcgcttcatccggcgcgtggacaatcggagccgtccatcagatcgttacacaacatgaaagcttgtatagaagattcatgttttttatggtatatttaatttttagaaaaaatatttttatgtggtatataagagaggatttgcttaaacaagagataatagcataaaaataaatatcttatgtagtgtaggaaagatcatttgcattaaaaataacaataaaatagtatattatatagcatataacatataagttatatcttttttaaaaatagaaaagtaaaaaaacttgaaacttttatacaaattttccaggttgtgtaagagatcacataaaatttttcatatttttatgaaatttctaatgagataaaacaattattaatcttgtatgttcgtaatggtatttggggtgttttttaaaagaaagcccaacccaataacgtatcataaaaaactaataaagttgtcagctattatagaaaaagataatatcgatgacagattattaaactctgctatatgatatagaataaattctctcctccctttttctctctctcccggggctcctccttcccggatggcccaagccacgctaggcccgcgcctcgctcggcctcgtggcctactcgcctccccgcgcgtgggccgccacctcgcccagccagcccacgccgctcgcccacacggcctgctcccgctcatcgcttgggccgctttctccctgctgggccaccctgcggctccccgcgcctcggcctgggccgcttcgcccagccggcccgtttcacacgcgcgacgcctacgatagcccgccctgcagccctgctgccgattcgtagtctcgtagatgccgattgtcgagtccagccgtaaggaacaacctcgctggtgataatcaaatttagcatgtcattgtgatttaggtcgaaattatagaagtacggggttgatcagctatatttggctaatactactagttaattagcttaattagcattaaacgtataggaataaggaagaaatcggctgccaagatcaagctggcagtcatacttgattatccttaatcaagtataattaattagcggcaagattagtatttctttctatgcagggtttgcatgcatgaagatggcaagtttattcctttttttgataaattgatcctggtagaaaacttatttcgaaacttgtccctataaaaaactatatccaggaataggctgtcggctcaacgccactttggcgctgatgttgttcctatcagcgccaacgggatcggcgctgacatcgcgccaacgtggcgggcgagacgtgacgtggcagggcctcagcgccaatgcacttagcactgacaccttgtacacgctaaatagactgatgtgcagcaatgaattaatggtgtcgctagtggtgcaaccggtagtttctttcctggtgtacgttaggactagggtttgaatcccaggtcagccattttcctttttttaaaaatcatcaatctacgtgcgtgcatattaaatcatcaatctccattttcgtttttttgtcttcaaatcttcaatgtacttttttttgtttaaattaatttttattaaaaagaaatatcacatttagtacaaatttaaaaagtagaagaatggattaaaaaattttagagtcaacttttaaaagaaatatcacttttttataaaaaagaaataagaagaatggatttaaaaaaactaagtaaaaaaaagtttagtaaaaacataaaaggagagggttctaaccatggtcactgtaacgaccccattcaagtacctaccactgagctaagccaaacctcattgttacatttgcttttgcttttacttctatttactcagtataaaggccagcgccgctgtagaccatattctgatgtgatgttgcgatctttttttccaccatgtatatatctataactaatataaatattcatatttttccggtcgtcacatctaattttcgtccatacacacaatccgatttggttagcaatagcaatagccatagaaaaaattgtaaaaaaaaaaaaaaatcagcggccgccgacaccaccaccgccgccggactgagaagagtcagatccaaaaacaaaaacaaaattcatccactctttgccccaaaaaaatcaatctcaatcatcacaaaatcacaacataatcatgcaagaacaacatacatacatcatgcctgccgccggatccgccctcaaccattgccaccgccgccgacgccaccgccaccgccggagggagccgccactaccggatcaacccgcggtcgccgccaccgccggcggatccacccgcagacaccgccgacgctgccaccgcttccggatccgacgttggggccaccaccgccgccggagggagccgccactgccagatccgcccgcggatgccgccaccgtcggagggacgctaccaccgccgtcggatccgccgttgggaggaagggacagccgtcgaggccgacgggaagagggagacggggagggacggccgtcgccgtcggctccgccacaccccgttgtcgccgcgccgtgccggcgagacgggagggagagggggagaaggagcggcgccgccggaggggagaggggtggaaagcggcgccgctagaggggagaggggagaggggagagccagcgccaatagggaaagggagagggagaggcagcgttgggcgagggaggcggccggcagtgggagggaggatgggggacgggcggacagctgagccgatgggggtaggggagagttagggttagggttttgattcatttggaatcgatctgaaccgttcctcaaaacaaacggctcagatcgatcaagtgttgggctggcctcccacacttatgggccgatggaaggccagcgggtccaacaaacgtaattaaaggaggattttgaggaggtaaattagactttatttatcaaaattagcaattaagacctgtaaattccaagaaaatttcaaagggtgtaatcaatatggagaatttaataaaaattaaatccaattatatacctacctacttaaaaaatacccaaatatttcagaagagttgtatttcatttagttagaatttaatatgttttaattcaattttctcttttttctttccgttgcaacgcacgaccacttttgctataatttcaaagagtgtaattaatattgcagaaaaattatatttcattaaattacaattcattttcttcatataaatagttcaaatcaaatttcagtcaccatatcattatccggtgcaacgcacggacattttgctagtatatatatatatatatcaaaaacagagagcatcattaatcatttatatgtactaatgtacgcacgtagattgaacatttgaagaaaaaaaaaagaacgaaaaatgctgccgtgatggggattcgaaccctggtgctagggtacacaagcaaatgatcataccattgcaccacaattgcatttcttattcttttaattaccctgtacagggggttagcgcgatgtcagcgccagttccattggcgctgataggaataacctcagcgccaacctctttggcgctgagccaacggtctatttctggctatagtttttggtagagactagtttcaaaataagttttctacaaggatcaatttatcaaaaaaaaaaaaacgaagtttatttgatgtttgcacttgcacacaacgcagatgggagccctgctgcctagctagcggccggcaagattagaccaaggtgggtgatgagctacgtaaaccaagacgaactgggagtctgggagctgatcaaatgcatatttccatgggcatatgcgcgctggatgtgttgatgagctgaacttgacatattgccaggcgcatggacgcatggttgcttacactactacagaaagcgtttttgcatacgggcggaatcgatcttcacatgcggttggccggcccgcatgcgcgaaatggtctgcaaagatcaccatttgcgcatgcggccgtcgcatgcggtcacttaagacggccgcatgtgaaaatagatcttcgcatgcggtccatataagaagccgcatgcgaagatatattttcctatgcggtcgacctaagaagaccgcatgcgaagatctattttcgcatgcgggcgtcttaagtagaccgcatgcgaaattcaatttccgaatagctaaaataatatttattctagcattttggtgattcgtaattaatattaaattattgagggatttattatcgtatttcggagtagtaagcatataagataagacaagtgccgcagtaacaaacatgtaatacataaccattaattcaatcgtaatttacatacaaatatataatacaagtggcacagttttttcatcatatgtataattagtgtacatgttattacatatgttctttctcccactctctgagaggtttaaatttgtcgtccattgcgagttcactctggttgtcgtagaagagacctcttgcgttgcagacatcgcgacggatgaatcggcagaggtcagcggccacgttcaagatagtagtgtggttgaatcgttgtgcaatatatgggatttcggggatctgcacacataaaggaaaataaaacggtactcagtgagaagtgtgtgcgagatgggtttctttgtagagaagagttcgatgacctactcggttactggttgttttgtacctcccatttactctgagcatctcgcacacgtaataaccacacaagttggttcctggtggttgtttgtagcactgcgatataattatggggaccgatctcagtagatatatttagtatatatgtactgttcgataattagttgtattggtataaatttgatagtaccggccagccagtcctgacggataacttcttctgggatggaatatgtactggtccacctcttttgtggtagtacttgtgtgctatgtttgaaggaaacaattgttttattagtagttagaagactggtgatcgacctaaacaatttatagtaatgaaatgtttatcacttacaaattcaaaatagtgaggaattccataaatgtctccttgtcatagtgtgcggggtctaatgatatgatcaattggtctttcggatatacaaggaataatatgcagtggtctctacatataagataggcttattggagacagaaaattccgaagaagataaattaattaaacaaaaagaagagagagcttacgtgaattggtaggggaccattaagacatctttgtcggcgtgcgccaacattgcttttgccaagtatgttgctacttatagcttcttcctcttgtgcaatgtcttcacatattcttccttttcttccggggtcttgccaaccaattgctcgcagtcctgtctcagctctacggtgtgttgtgttttgcatattcttgttggatcgacgtatccaacctttgctccagttctatcagtttcgtggaattgcatactgtacaatgaataaagaagaaatgagatttgttttatttgtttcgaatgaaacgtgcaacatgtaataaagagttcagacttacagacagaaagccgcaacgagattaacgtccattttatctagcttgtagagggcgtaaaggtcttggaaagagataaaaaatatcccattaggaccactcatgaaagcgcctttcctagatgccttcatataccattcgtgcattaccctcatttcccatggtagcttgttcataagataagttggcaagaatggcttgccatactcataagtttcaggcacatcggcagataaccaggattgcacttcatcttgggccgccagtactgacttctgggagtctgacaagacgtgagcaagttcttttctcttctcagaattcctgaaagctgaaaacatgaacttctccttatccttgtcaatctcctttgggtcgtatgtcgatatcaactttggaattatacgacgaggttccaaagtattagacttcggttcggatgtagtaccatctggtatgtgcacttgttctaccagagcagattggggtgtaggtggagaggtttgaactgagggcggagccgggggagcatgctttttagctggggaggtgggagaggcttgaactggttgcggggccgggagaggcggttgttgagaaggggagggtggtggtgtaggttggcgaggcggtgacctaagcggtggtggtgacggcggatgtcgaggtgacggtggttcaggaggcgacggtggtgcaggagcggcagctgaggatggggttgaagatcctgctgcaagaacggccgcgctcaggattatgtctctgcggtgccacaagataaactgattcactgcatcaccgagaagttcaatcccctcaggtgcaggtatgtctagttccaaggaaacgtggtcgctatggaccttggcgacctgtacccttgcgtaatcctcagggattgccgtgttgtggaattgacgtccgggtatcgctaaacccgttgcaacctccttagtctttccagcgcggccgattggtacgacgagactgcacggagttggtccagttatactatccacagggaaggtacttgtctgcactgagcctacactgctgggtacattagttgtttgctgtgcggattgtgtgggttgctggctatcagggaataaccttggaaatgctgtcgggttttcagctgccaacgagtagaagtgttccttcacttgcgcatagatcttgtccgatagttgttctttgtatttgtctctcttcttataacttggtgcgtcttgtggaaacccgaccttccaacttgtctttgaggacaaaccccttacacgtccagagtgttcagccgtccccaacgccgcagtaagctgatctcgctccctccgtgggacgaactgtcctgatctttctttctcgactatctgctgcaaattagtagtcacttcttctatgtctggagtctcgaatagtgtcgcgaccgggaaaattgccttttcccgaacgctagtgtattaatccccgtcccaggaaaagccggggtacaccacacaaacatgatataaaagacacatctttattatatcgataatatttacattattacaaaggcgcttcaggcctgacaatcaaaaataaacagcagcggactagcgggcctacggctccatcttcacaggcgctcaactggggtataagccaggactccacctaagacatcttctccaaagcttctcttactgaagaggggaaggattgagcaagaatgagtacaaccacagtactcagcaagccacaccggcggatgcataattaatgcaagggaggtacaagggaataataatatagggattaagttttgcagtaaacagcatttaaaagacacttagttgcccaaagccattttgtaaagacgatcctagagctacacagtattattaaacaaggccgtgaaccctcacgaacctgccttaacccaaggcctacgatgattcggaccgaactggcaacccgacctgggtcccagctcgtcccaagccaacccaggccaaccattccatattttagttgttgagcaaattttaagaattaaaacactgacttgggtacattgctaggcttgcccatatccgagggctcggctattcgaatagatttactctgatcagaggtgtacatctttacccacaggacacatcttcctcacgtgcaaacacgtgccacataccaccacggtatacggacggaagacgtgacatagttcccaacccatcctagccataaacaagagtaccgacccaatcccacctacggccgggatacccgggacaggcaggcagaactgagcccctagcagcagggcaccaaccctctgccatatgacatctcgactaccgggccgcagctcgtgtagccttcatttgtcctggagaatgtccatcgacacccgacttcatccatctccaatccgtgtacttttgtttatgactagactgagccacaaactaagccttacccattagacatgtggaagtacggtagtgctttgcaacagaggcccgagcttaatccttatagtggccggggtgctacttcccacaactggcatgcacccaaaccccaccgaaaacaggttttaggggttttgaaagaggaagagaggtgtgtgtccaattccaacataagccaaccattccatagtgtccaaatgatatgagaattcccaaagtctaaagttataaaaccacctaatgttgcctaattaatcagcgaagcatctacctaaattcatactagtggaaccataaatagagtgtccactagttagggttttatttattctagggtgaacaaggtaataataacaatagcaataataatgtcttaacaaaggtaaataggcatggctaaataaaacagtgataacgcgggaatttaaataaagcggtaatgcattaatttaaatcaaaataattttataaactgggattcaatatgctcaaggatgatgtgacttgccttgctcgctttcccaaacaccggcttcaacttccacgaagagcggatcttccgaagctgcagcgtctacacgaccaacggaaaagaaaaaggcttttactctaataaactccaaataacaagcaggaacaaagcacaaaaatgggttctttacatcttaaggaaaaattagagacttgaacggtccaattccgagttcaaatggccaagatatggccatttgaagtttatatgctctttaaatggatatttgcgaatttcttcatttaaattttaatttaaaatcgaattattgcgtcagccgaggggagagggcgcgcggaccgggtccacgggagtggggcccacgcgtcagcctctcggtccacggtggaccgggagcacgcggctggcggcggtcggcgccgtgggtcccgcgcgtcagccgcacccgcgggcgcgggcggctgacggccgggcccacctggcagccgcgagggcgcgccgaaggcggcctcgccggcacggccgacgggaggaggacgcgcacccgcgccccgatggtcgccgccggcgaccaacggcgcggcggagtggcacccgagagagaggagggaagggggaagcgaacggaacggtcttcggctcaccccggtcgacggcgacgacgggaacggcggccgaagcggaagaagacggcggcgcggctcgggatgacgagggcgacggtgctccggcgatgttcgggcgaggaggaggcgcggacggagtcggcggcaacacggcgaagcggacggaggtgtcgccgagtaaggaggaagtccggagcggcggcggcggcggaacggagctcggcggcgacggcggagagagaggagcacggcgcgagcacgaatccgacggcgagagcgagcggcgagcggcggaaacggaagagcgaagcacggggatcgaataaatagcaacgggagggggagagcgcggccggggagagaggaatcgcgcgcggagatctcggccgccattgaagacgccggcgacgattgcgggatgaatccggacgaatccgagggagagagagagggaaaagagggggaatcgggagagggaaacgcggggagtaattcgcccctctttatggcgcgcggggaaggcgggatgcggcggattcggcggcggcggcggcgctagggcacgggcggcggcgggtgcggcgcgaggagggagatgacaggtgggacccacccgtcagcgagggcggcgggcgggcccgcctgtcagcggcgcgcgcgcgcgggggaggccgatgggccgcgggggaagagagagagagagggagggaacgggccgagccggcccaagaggggagggggggggggaaaaggagacttcttttagggtttttctttttataaacctttttaactttgttcatttcttttcaattattatttgtgctctgaaaattccactaaaatttgagggctccttttagaccaaggagaatttaacaaaaattctccgggccacatttgaatttttcttgcacgtattttagtgtttgccaatttcttttcgaattttaattaattctattattccttttagcgaatgatttttatttcgggatgaatttatcaggacgtgacaaatccaccccccttacaagaatctcgtccccgagattcgaggaggctagcaagaagataggttgggcggtcttctcttcttgtctgacttcttccgttgcgtcttgacgaacttccagcaaaactttaccactcggaactgcttggcttgacctcctgttgcggatggaatcttctcttcacctgacttggaccagggtgcaccttttggctgactcagactaggttgcggtagttcaatgatgcttccgttccagaacttctcatgattcatatcttcggagtcaacctcggacaagttatcaacttcatgtcatgcgtcgatatcagcttgtcattactagggtaccatgcttgttatcatgagaatatcatgcttgtcatttacttctaacttaccactattcacttcatgttgtcctcagttagcattcaacgtattcctgtgcaccttcagccttgatgtgttctttcccattggatcatctcccaagacatggcgtcgcctggtaaccggggcttgcacttttcactccgtgtagcatctgataccgagttgaagatttcactccttgccttcatagaaacacttttacctaggtcatcttgcttacttaatgacaaggtgactgttgtgggggaggcaattactatcaggggtcttccttgagcgatgcagagcatgtttctgtttatcaatcacctttcggcctacttctttcatgcttgagaacatctttgccaatctcttttatcaatcatctttcggcttatctctaacaggtggtattctttaatgtggattgcggacgcttctggggacgatgaggtcctttggcttgctgcctttcagtgaaaccttgaagtgtttcaccaaaagctatactgactgtctttgcctttgatccgaaaaagacacatctgaaactcttagtccaaataaatgtctctttggttaatcgcttgattttcttttccatcatcaggttggttattaactcgaggttagaatatagttcctctggcacgagaccctaggtctcctttgtcagtaaacaattatacacaggatcacatatccgcatcttccaaaagaatcctcttagaacttgtttttattacaaatctctcccatagtacatgaatacaaggcactgtcttaagcaaaaagggaaggtgcttaacatcggtacattgtttccactatgggttagaattaacatgaggcctcacaggtacggcgtttgctccagtgaccacaaggcgagtgacttgtcttcttcttgcataatggccggagtgatgacgcaggttacgcttcggctgtggacaatctctggagaaatgacctggttctttgcagttgtaacaaatcaatgccctttttactgagttgtccgtctgagaacgatcattctgacccggtgttggaattggtggttggaaatccttgctaacattggcatcagtggtaccatagttgctatcaccattggagtctttctcagagtcaaaattgctaaggttgtcattctgggttccaacattgatactatcgttgacatcttggtgaatgctactgacattgcacgctttattcgagtggccactaatggggcaagatccatggttgttggtggtatcatcatcattagtattgctagtgttgttgtctgcattgcgtccatcttcttggggcggaaactcttgatgcgcaacagaagatccggtgatctgaagtggctcagtgcgctgtctttggttaccacctggaaatactggcatgttgacaatccttctcttgcagttcgtcatccgattatgctcactttcgagttgcatggctttgtccacaagtttctcgaaatcttcataatcctctagaagtagttgcactgcaagctcatcttttaacccctgaagaaacttctcttgtttgtcttcatccgtttccacatcttctggtgcatagtgagccaaacgatagaactcgtgtaggtactctgtgacggtcaaatctccttgcttcaggtagcgaaactctcgttttcttagtgtgatcattcctgcgggaacatgtgatctcttgaatacagatgaaaactcgttccaggtgatggtatgtccttctggccgtgatgcttcgtagctatcccaccactctgaagccggtccaaccagctgatgagttgcgaagccaacccgctcctggtcggtgcactgaatcaaccctagcttcttctcgattgtgcgcaaccaatcactggcttccataggatcgacggcaatggcaaaggttggaggctcagttttgagaaattctgataatttgcactgttgctggactgtaggcacttgaacgttggttgcccctgctgggttgttccaattctgtaatagttgaaaggttgttgccaacatgttggtttggttaaccacaacttggattagctctggtgaggtttcgttgatgcttttctcattcccattggcttgggttcttgagtcatcggatccatcattcccgtagcctttgttaccagtgttatccatctgtcacaaggtagaggttgagaggggaagcatacaaggaaagaatagaccagaactagggacaagaccttaaaggaactaactctttttgttgatgtgttgtttgttttgcttattctgcaagttgattaagcaaacaacctagcatggttacatcacaacccactgatgcaaaccacgcgctacacacacaagcaaggaacacacgactaacaacactaccctatagggtggcttaggttcagcgacaggttctccaagatcttcactcctgcttcacagctggcttcactgcttcctccacttcgctagcggatcctgcagtctttcggagcttcggcaaacaactgacgacatcttcttcttcacaaagctaaccaactagtactagttgaaatctgaagaaggaagaagagggtaaaccttttgcaaatagcattaggggaaggagaaaaagaggaactttcacaaatagttttatttataaaatatgtccttaggttttatccacttggcttatcctacagtcgagatggctctgataccagcttgtcgcgaccgggaaaattgccttttcccgaacgctagtgtattaatccccgtcccaggaaaagccggggtacaccacacaaacatgatataaaagacacatctttattatatcgataatatttacattattacaaaggcgcttcaggcctgacaatcaaaaataaacagcagcggactagcgggcctacggctccatcttcacaggcgctcaactggggtataagccaggactccacctaagacatcttctccaaagcttctcttactgaagaggggaaggattgagcaagaatgagtacaaccacagtactcagcaagccacaccggcggatgcataattaatgcaagggaggtacaagggaataataatatagggattaagttttgcagtaaacagcatttaaaagacacttagttgcccaaagccattttgtaaagacgatcctagagctacacagtattattaaacaaggccgtgaaccctcacgaacctgccttaacccaaggcctacgatgattcggaccgaactggcaacccgacctgggtcccagctcgtcccaagccaacccaggccaaccattccatattttagttgttgagcaaattttaagaattaaaacactgacttgggtacattgctaggcttgcccatatccgagggctcggctattcgaatagatttactctgatcagaggtgtacatctttacccacaggacacatcttcctcacgtgcaaacacgtgccacataccaccacggtatacggacggaagacgtgacatagttcccaacccatcctagccataaacaagagtaccgacccaatcccacctacggccgggatacccgggacaggcaggcagaactgagcccctagcagcagggcaccaaccctctgccatatgacatctcgactaccgggccgcagctcgtgtagccttcatttgtcctggagaatgtccatcgacacccgacttcatccatctccaatccgtgtacttttgtttatgactagactgagccacaaactaagccttacccattagacatgtggaagtacggtagtgctttgcaacagaggcccgagcttaatccttatagtggccggggtgctacttcccacaactggcatgcacccaaaccccaccgaaaacaggttttaggggttttgaaagaggaagagaggtgtgtgtccaattccaacataagccaaccattccatagtgtccaaatgatatgagaattcccaaagtctaaagttataaaaccacctaatgttgcctaattaatcagcgaagcatctacctaaattcatactagtggaaccataaatagagtgtccactagttagggttttatttattctagggtgaacaaggtaataataacaatagcaataataatgtcttaacaaaggtaaataggcatggctaaataaaacagtgataacgcgggaatttaaataaagcggtaatgcattaatttaaatcaaaataattttataaactgggattcaatatgctcaaggatgatgtgacttgccttgctcgctttcccaaacaccggcttcaacttccacgaagagcggatcttccgaagctgcagcgtctacacgaccaacggaaaagaaaaaggcttttactctaataaactccaaataacaagcaggaacaaagcacaaaaatgggttctttacatcttaaggaaaaattagagacttgaacggtccaattccgagttcaaatggccaagatatggccatttgaagtttatatgctctttaaatggatatttgcgaatttcttcatttaaattttaatttaaaatcgaattattgcgtcagccgaggggagagggcgcgcggaccgggtccacgggagtggggcccacgcgtcagcctctcggtccacggtggaccgggagcacgcggctggcggcggtcggcgccgtgggtcccgcgcgtcagccgcacccgcgggcgcgggcggctgacggccgggcccacctggcagccgcgagggcgcgccgaaggcggcctcgccggcacggccgacgggaggaggacgcgcacccgcgccccgatggtcgccgccggcgaccaacggcgcggcggagtggcacccgagagagaggagggaagggggaagcgaacggaacggtcttcggctcaccccggtcgacggcgacgacgggaacggcggccgaagcggaagaagacggcggcgcggctcgggatgacgagggcgacggtgctccggcgatgttcgggcgaggaggaggcgcggacggagtcggcggcaacacggcgaagcggacggaggtgtcgccgagtaaggaggaagtccggagcggcggcggcggcggaacggagctcggcggcgacggcggagagagaggagcacggcgcgagcacgaatccgacggcgagagcgagcggcgagcggcggaaacggaagagcgaagcacggggatcgaataaatagcaacgggagggggagagcgcggccggggagagaggaatcgcgcgcggagatctcggccgccattgaagacgccggcgacgattgcgggatgaatccggacgaatccgagggagagagagagggaaaagagggggaatcgggagagggaaacgcggggagtaattcgcccctctttatggcgcgcggggaaggcgggatgcggcggattcggcggcggcggcggcgctagggcacgggcggcggcgggtgcggcgcgaggagggagatgacaggtgggacccacccgtcagcgagggcggcgggcgggcccgcctgtcagcggcgcgcgcgcgcgggggaggccgatgggccgcgggggaagagagagagagagggagggaacgggccgagccggcccaagaggggaggggggggggaaaaggagacttcttttagggtttttctttttataaacctttttaactttgttcatttcttttcaattattatttgtgctctgaaaattccactaaaatttgagggctccttttagaccaaggagaatttaacaaaaattctccgggccacatttgaatttttcttgcacgtattttagtgtttgccaatttcttttcgaattttaattaattctattattccttttagcgaatgatttttatttcgggatgaatttatcaggacgtgacaaatagtatgtctccctcatccgagacttgacctgtgctgcgcgcccaaacccagttcttgctacgttcaaccatggggtctaccagcaggggcttaccggccgcggcaaatctttgctcgatctcccgccattgatcgacgtgaccagcgtatccgctcgaccccaatctatggggatatctgttcttcttcgcgagctcggacatttttttcctcaaagccattgcttcagttgttgtacgatccgcaacaaacgtgtcccagtcagcctgcgatatatgtccataatccgtaaacggtgggagattcttctgaacataatcccgatttagatcggacttccactgtcgccatcgatctcccatctttttaagtgcgtaatctctccccctgacctctgatccaggagggaacacaaaatacttctgcaactcattccagagaagtgtcttgatgttgtcgtccactgtttcccacaacttgacattaatgggacaacgcgtcctgactagagtgccacaggcgttgctgaacttggaccgcactatcggtggctcgacgggctttccatcctgatcgagagcaatcacgttgtaagtttccttgggtaatttatttttgcttctctcaccacgtctttttttcccactcccgcctgcacttgtagatgtctccgtacgttcaggtgcagacgtagcggtgtccatctcaacttcttgctctgtcctgttcctcccggctttacgtttcgagcggcgtcggactaccatctgcacagaataggtaactctatacaccattaggttcatgtcacatcatagttagggaataatacatggctaacgattttcagcacttacggcctgttcgataggtatgtagtccggatcatcatcgcggggggcgacttgtgttatttccattggaaacgggtcacttggtgtgcgccacgtttcttcactagaagcgtctggctgcttattgctaccggaattttgaggagcgttaccttcttgaggcgctattggtgcgttcgatggaaccttttcgttcgacatcttccaacttgacgtaaaaaaatttgacataagtcccaattttacgtaagtcccaatttaacgcaatttcacataagtctcaatttgacataagtcccaatttaacataagtcccaattatacataaatctcaatttaacataagtcccaattatacataaatctcaatttaacataagtcccaattatacataaatctcaaattaacataggtcacaatttaacttattttcacataagtcccaataacttaatttcacataagtcccaatttaacataggtcccaatttagcatcagtgacaattaaacagaaatctccatttgacataggtgccaatttaacaaaagtcccaattatacatagatctcagtttaacaaaaatcacaattatacataaatcccaatataacataaatctcaacttaaacataagtcacaatttaacataggtgccaatttaacaaaagtcccaattatacataaatctcaatttaacaaaagtcccaattatacataaatcccaatttaacataagtcccaatttaaacataagtcccaatttaaacataaatctccatttaacaatccacaattaaacctttctcaaaattaaacaatccacaattgcacatatcacaatccacgatgcacaattaaacaatccacaatccacaattgcacatttcacatttctttttttaaaagtaaatgttatcgagcgacggcggggacgacctggcggcgacgatggcaacggcgaggggggagaggtccgtgcggcggcgacggcgacctggcggtggcgacggcgacgacgaggggggagaggtcctggcagtggcgtcggcgacggcgaggggcggggcgacttcggggaggagccagctgtagcggggacgacttggcggcggggacgacctggcggcggcgatggcaacggcgaggcgggagagttccgtgcggtggcgacggcgacggcgaggggggagaggtcctggcggcggcgacggcaacggcgaggggggagaggtcctggtggcggcgacggcaacggcgaggggggagaggtcctgacggcggcggcggcgacggcgtggggcggggcgactttggggaggagccggcggtggcggggacgacggcgacgacgacttgggaaattttggcagcctggcggctagggtttcgcgggagccgggacttagaaaattttggctccccgcgctccctatatataggcgcagatcatcgtatgcgggcggcttaagggaccgcatggaaaaatatctttccatgcggtcgacataagccggccgcatgcgaaaaagatctttccatgcgggctgttaagccggccgcatgcgaaaaagatctttccatgcgggctgttaagccggccgcatgcgaaaaagatctttccatgcgggctattaagccggcatgcgagccagccgcatagaaagatctttttaccaaaaaaactcatatttttttttctctaagtaaactgtccatatatatttttttcccaatatttcgccacaattatacattccaaatgtttttggcactaagaaaactcatgaaaattgctcaaaactcgtaatcaaatgttacatgctaatgattacaacataagggggacctaaattcatgcacgtacatttggaatacaatgagaactaaaggttacaaaataactatgacttaataaccttggcaacaccatctgctcgaacgtacgacatatttgcttcatcgattgttctctcaaccttcttaattcgcataggaagatcagtaaacaatggtacatcgtcgaactggttgtaatcattggggtcttcgatgttgtcgatgccgacgatctgttgctttccggatatgacaatagtttttctttcatctgaagggtccttcacataaaacacttgagccatacgctctgctaaaacccatggatcatccttgtggcctgttttactgtgatcgactatcgttagcccgtagtcatcaacggaaacccctattgtgtctttaacccattcacaacggagcacagggatctggatgtttaggccatagtccagttcccatatttcttgaatggtcccataatacgacctcttttctccactcgtgtcaatcgcttcgacacggatcccactattttgtgcggtgcttttcatgtccttcgtagtcgtactcaaggtaaatccattgatgtcgtaaccttgccatgaattgacaatacttgaaggcccacatgccagtctttgtaaagtaagttcctccacagaatcaccaactggcaggtttagatctttcaaccacagaggaaagcgacgcttgtgctctcttgatatccaatcattggaccgccctgggaagcaggctttgatttcttctaggtgtcgctcaatgaatggctcaacgatagcgagctgttgaagaacgctgttgtgtgccgcggacacctttttgtaatcattatcgaagaactgcttcctaccaacagtaccccttccagacaatctaccttcatgtcgatgaacaggaatgccaatggcattagcatcctttatgtagtccatacaacactcgactgcctcttcagttgtgtatccctctatcattgatccttccgggtgagcgcgattgcgtacatagcctttgaggatcgacatgtaacgcttataggcccacatctgatgtaagtataatggaccaagttcaataatctgagggacgatgtgaacgatcaaatgctccatcatatctaaaaatgatggtgggaaatacatctcaagctggcatacagtctcgacggcaaatgtctgaagcggacctaattccaaaggatcaaataccttctgcgaaattcgattgaaaaagtagcacaactttgttataaccacctttgtatggactggtttgactgcccttatagcaattggtaggaacaccgttagcaacctatgacagtcatgcgtattgtatcccgaaatggacaaatccttcattgatactagcttcctgatgttcgatgcgaaaccagtaggcactctaaccccttgtaaacatttacagaaggcttttttctcttcaagtgtcaacaagtaacaagcaggaggaatctcggtcttcccatttggcagcactactgggtgaaggtcatgccgtatggacaaatctacaaggtcgttacgtgacttcaatccattcttcgttttactcgggatgtccagcaatgtgccaacggtgctatcaaacacgttcttctcgaggtgcataacatcaattgcatgtcgaatctctaggtccttccagtaatctaagtatttaaagaaaattgaatgcttcttgaaaggcgacgcagtaccgttgtcaccatcagctttcttcctctttactgtcttcttctttccctttccatatacaaccttaatcttctttgttatctcatacacgtatgtaccacctcttgctactggggcagtgtcattctccactgtattatcgaacaatctagccatcttacggtacctatgtctttgtggtaggaaccgtcgatgtcgcatgtacactgtcttcaaagacgacgtcaggtatttgtatgaagttttctccagacatattagacatccagtcttccctttaatctgcccagataatgaaaagtttgcaggtaggtcattgatggtaacaaatatgatcgcacgtagattgaagtctcccgcttaaactcatcccatagtcgtaacccctctttccaaagctcctccatgtcctccatcaaaggctcaaggaaaacatctatgtcgattccaggttggtttggaccttgtatgaggatagtgagtagaatgtactttcgtttctgacatatccatgttggaagattatacattgtgagaaggactggccatgtgctgtgcgagctgcttaagtcaccaaacgggttcattccatcagtgctcaatgcaaaccttacattcctaggatccttagcaaattctaggtgttttgcatcaaatgtcttccactggcgagcgtcggcgggatgtcgaatcataccatctatttttcggctctcttgatgccatctcatcaactcagcatcagtcgggtttgagtacagatgcttcaggcggtccttaattggtaggtaccacatcaccattgaaggaatcttcccgcgcttacccttatcagaatctggatcggtacactctgaatctacgggcccattccccgttttataccgacttgtgccacacgttgggcaacattccaattccgcatattctttacggtataatatgcagtgattcttacaagcatgaatcttttctacaccaagagataaaggacatatgagtttcttcgcttgatacgtgttcgatgatacaaagttaggcttaggaagcaacacacggaacaaactcatcagatcattaaaacttgtgtccgaccatccatgtttagccttcaatctcagaagttcaagcactgaacgcaagactgtgaaatccttatcacatcccttcgtttcatcgtaaagaagatccttcgatgccttctctaatgcctgccaattctccaatcctcgtgacctacccgctagcacctctggttcaacatggcgtagcatatcctctaaatcaaaaccaccatcgaaatcatcactatcggtggaaacatcgacaaccattctttcacgcgaaatgtcttcgattataaaattctctgcctcattcatctcgaaacttaactcttcatcgtcatcttccggattggcgaattccccgtgataggtccaaaccttgtagttggcggtgaatccgtactccattatgtgacccaatatttcaccaggatctaccaacaatttctgattcttgcaatgacggcacggacaaaagatctttgtcatattctccctcaaagcatgctccttagcctgatcaataaatttagatgcttccttaataaatatcggctgcgttctccgcatctcatacatccatgacgaccgatccatctaattatataaaggcaaaaaatttacagataaaaaaatagaccgcaggtatttcatacaaaagtttaaatgcatttgtctcccaaaaaaatacaacaatacatgtaactagtatgtacaattgtttacatgcaaaatttgcccatcaaaacatatattttgaagctagattttgcaaaaaatagttagaacaaaccttgtcaaaatattaaaaaaactccactttccaccaacgaaatataacaaaaatggagccaaatgaagcaggatagagagttcttcacctttcgtatagagttcaagtaaaaatttcgagttgaaaacctccccccctaattggtgcttgctttacgagagagaaagcttcgttttcaaatggtcaagctcgggcctggaggagcatatatggccgatcatcgcatgcggctaatcaacccgcccccgggggggcggtttttgcaggcgccgccacaagcggcccgcatggaacctaccgaccccctcgtacagaaaaacgatttttgtagtagtgttaattgcgggctggcgcaagaggacaaatttaggctgtgtgatatgcgaacgtcgtcgaagcagattttttttttttgacaatggaatagaatatcccggcctttgctcaaaacgagctacaaacaattattacaaagttacacttaaaaaagagtgtagtccaacaaaacattgagaacacgcacttaaaataaaaaataacccatctaagataaggagaacacgttattgaagtctacttgtgaatctccaaccataattggcaaaaagttgcataactgtcgtctcaagcctacggcatgcaaccttcataaactcgccatcttcatcacacctttgtagctgagcccaacaccggagccaatatgttgccctgaaaattacctgcatatatgtaatagatggtgatttgtcaaaaaccaaatcattcctgcttaaccacagagcccaacatattgcagaggctcccacaagtataagcttactccttttcttgtccacccccaaaagccaaccataaaaaatatgtgatatactactaggagggcatagaccaaaagaatattgtattgctctccatataaagtttgtataatggcaattcatgaaaagatattgaatattctcatttttcattaaaaaacaacatcttaaactacctttccaatttcgtcttgctaaattgtctttggttaacacaacccctttaagtaagtaccacatgaagatcttaatcttaagcggcattttaagtttccaaatcattttatttctctcaatatagccattattaattaaagcaagatacattgacctaaccgagaaccttccattctgattaaagttccatctaaaacaatcagaagaatgattcaactggatatgtacaatagaggcacacaactcatacaaaaaaataagattctgaccaactaaagctctcctaaaagaaacattaagtggaacagatctcataacactagcaattgaagaacctttccttcggacaatggcatataaagagggatacttatctttaaaggctaagttatctaaccatttatcttcccaaaatctagttgttccccactattcacaatccaggaacccatgtttaagaaagtatcctaaactttcatgagacctgactaaaactgaccaaaaatgagagtcaccttgcttcttatcaacttcagtaatagacttattatgaagatatttcctcctcaataagtcttgccaaaccccttgttcattaattaacttaaacaaccatttgctcaaaaggcatttattttgtatttccaaattatgaacccctaaaccaccctgatctttgggctggcaaatgatatcccatctagtaagtttgtactttttcttatgatcatctccttgaaaaaaaacgagatctataataatcaattttttgaagtacccctttcggtatctcaaaaaaggaaatcataaacatagctaaacttgaaagtacagaattaatcaacaccaatctaccacccacagacatatacttacctttccaactactaagttttttttcaattctttgttcaataaccttccagtctttgttacccagctttctaaaatgcattggaataccaagatattcgacaggaagagagcctaacttacaaccaaagatattagaatattgatcgtaatgatccttcgtttgaccgaagcaaaataattcacttttgtgaaaattaattttaagaccagagagcttttcaaatacggataaaatcaattttagattctttgcttgctgtaaatcatgctctagaaaaatgatagtatcatctgcatactgcaatatagataaaccatcatctaccaaataagaaattacaccatttatagaaccaacatctttagccctcttaataagtaaagcaagcgtatcagccactatattaaaaagaattggagataaaggatccccttgcctaagacctttatgggtttgaaaattattactaatttgatcattaactttaataccaacatgacccccttgaataaaggaagctatccactgacaccatttaggggagaaacctttcattcttagcgtcttttgaacaaatgaccatttgaatttgtcataagctttttcaaaatcaatcttaaagattacaccgcttttattcttgcgatgtaattcatgtatagtctcatgcaaaataaccacaccttacataatgttcctccccggtataaaagcagtttgagtaggactaatgaccttctaggcaacactcataattctattcgtagcaactttggtaaaaatcttgaaactaacattaagtagacatataggcctatatagctgaattttcatggcctcaacacacttgggtagtagaataattgtaccaaagttaaaagagaatagaggtaaagtaccgttatgaaaatcattaaagagatccattaaatcatgtttaataacattccaaaaaacttgatagaactcagcaggaaatccatcaggacccggtgctttattatgttccatttggaaaatagcctccttaatctctttctcattaaattgttgcgttaaagcttcgttttcaaaatgagaaacttgaggaggttttttttatcagatcgtcttttaatagactgagatattgcaaacgtatcatgtagaatatgtacgtcaaaagaccagggcatagcgtatatgtatctataggtatactagcaaaatacccgtgcttcgctacagtgtattaaaactaaaaatatttatttttagccaaagttattttcacactgtttggtacttttgcttgataggaaaagtctcaaatgataggtgacgccgctttttttttcttttttttgggattatcgttcggtttttatgttgtgatttgtactccgttcacgattaggattttgtatcatctttgatttttttcaagaaaaagtgcccgcgcgttgcaacgggaagaaaagatgagaaaattgaggaggagttaagaaagatttacttaattaactaaaatacaaatttctggaatacttgtattttttaagtattttttaagtaggtaggtgtttaaattaattgaaaagtaaagttagtgtaggaaataaaattgatatggctagatttaattttaattaaattctctatagttaattacactttctggaattttcttggaattttcagagcttaattgctatttttaataatacaaatatcatttcagcatttatttaaatagtaatctaaataaaatcctcattacacctgggccattttcagcccatggccaccctcagtccacagccgagccggcccgctttcattccttattctcccctcctcctcggcccgcggacacgcgtccgacccagcaagcaacgaaaaactaattaccctccctatctcactgtcgtgtgggcccatcactacagtgtcatcccctacctccgtcaagttcctcatcttcccgacgcctcccgatgtcaccgccttcataaaactcggccgcatcctttaagataatatgaaattagttgaggggtttcaatccttatattctcctctttccgttttcccaaaaatcaaatcaaatctgcttcatatctagctgagaataaagccctatccaaaccctatttttcctactgtattacgatgcaacccatgttatttttccgcgctaactattggagacgggcaacgcacacacgcgcgagagggggaagagggaatcgcacgattgatggacgaaaataagtgtgacgaacggaaatttatgaatctttatattagttaagatatggtcgattgggaaggcacccaacatccaacaattgaattatctgctgtttactttgttctatttataccttctatttctttgcttttttgctcagaaagtaatctttcgtcgtcatgtaagtacgatagttatcttcttttatctaaaaatattctttacaaatgtaaattagtttttgattccatgaaagtgaattgattgctttcattaaccggttttgatcttaattttaacgactctattaattataccgtaagccgttaggtaatcttttgttgaaaaaaaaagcgtcaatacttctcaactcgagagaccagcactccatcttcactaatcataaattcacaattcctaatctctgttgttcgtgtagtagcagcaagaagcaatttccgatataattgtaaatgatgttttagagaatattaagtatggttgtcgaagtgacaactgcgtacgtcgaaggacgtggatactcaatagtcactggaaacggtgaagtgtattatctttcttttattttttctggatccccgttacatggccctaggagcctatttataaccctattactagttcccctattggggtttaggtttaacaggggaatttacatggttgcccttatgaaagggacatttacatgggtatatagtgtaattaaggtatatgggcccctaatgggccgactggcgaacgctggcccagtggcctccgggcttgatcggctgagatggcctcttgggcctccttgaagttggacttgctacggcaaagtcatccgccttcgccatacactcttcgccatatagtcttcgcccaacatgccttcaaccttgtgggataccggtgcgattcttcacccttcgccatctttgcttcatagtcttcgccatgggggcttcacctcaacagactcgacgtcttgggcttgaacccacccctggttgcatggtttcggcaggtccggtcgaagggtctcatgacataccgccaacaagcccctcacgggcaagagtgagataggagcttcggctgagaccgtgcaaaccatgtggtatggtatggggcgccccctttggaccgacgctcctgccgaaacctattctggagtcctgcagagaaagtgtgcattatgtgtacgtgtacttttatggttagtaacgttttctaggtttcgcgtcttgcgaacggcgaaaccgtttttaattttctctaggccaaaatgaacagtgatgggctttccctcttacgattgggtggggagacgaaccgtcgcctgggtgggctatatattcccccttcccctttttcaccgccgcactctcgtcattttcaccgcgagcgctctctctttctccattctttcctttcacgacgccctttgatttcctagatctttcgcttgttctcccttttcgccaccgcgcacacctttcaccatggctcctcgcaagccgaacccagcttccgcgacaagccctaatccaggccgaatcgacgacgacaccaccgcctttctaggggcttcgcttgtggacgacgacgagctggcaaagcttgtcagcgccagcctgctggtggaggggaaggccttcgctccgggaaaggccgtggtgccgaaacacggcgacaaccggacgatggtatttgccgtgttttttgaggtggggcttcagtttccatgcaacgttttgttgccggagatccttcgtcttttccaggtggagcttccccagctgagcccatcggcacttgtccgagtcaccatcttcgactgggcgtgccggaccgccaggttcgaaccgagcgccgagcttttcggcgccgtgttctatggcaccgtgaactcgaagacagtggtcaccccagccgggacaaagaaaacggcgttcgggagcgtgaactttaatgttcgccccgagcgctccgatctatggccggtgaacgccgccatgtcgaagtgggatcgccattagatggcgaagtggttctaccactccatccccttcgaggccggttccgacgcggcgaaggccctccgttggcggcgcagggcaatttcgccgaacaggaagcccaaggtcgccatcgatggcaccatggaggctcggttcaccctgcttcgcaaggtctgctctcggcttagctgccgcgatctggtggaggaattttgcatgcttcggattttccccctctcccaatcgtggcatgttgtggtgaatgaagacgaggaagttcacggcttgtcaaagctcgtcatgcccgagggggcgaacagtgagcctctgcatttcccttacgtacttgtgactcgctctttttgttcaacgcttgatgtggcgatttttcgactttctgcagtgttgacccttgctcaggttgacactgaagcccggaagatgatcggcgacgtgtcgattactgagttcagccagctgcttacgcggctggcggccggtcgggcgaaccgggtatatgtcggtgaactgcctccccggacgaagtccttcaaggccgatggcgatgaggggccatctaggaagtggctgcggggcaggtgaagttggccccccggaagtgcagggcccctgcctccaccgactctgatgctgatgacaaagacactgtcatagatcacgacgacaaagaggaaggggaggatgtgggggaaacggaggttgtggccgaaaaggccacggacgaggccgccggcaaccgcgccaagacgcccagctacactccgactccgagccccgagcacgttgggaccggggtggagtcgaacttctccctcctccgccaaatggatatggagggggtgaaggcgctggttgcgatcgccgcaaccaaggtgacgaaggggggttcgatcaagaaggcccccaaaaagaaagggctcgttgatgtcgctcgcatttttagcgacgacgagtcttcggacgagacccctacttcgcccactggtcggagcttgggtctttcgaccgctctcagcgccatggttgatgcaggtggagctcggggggagtgtggccgctgggctttggcctttgctgaccggattgtcagggtcgttgctagggtctttggcagtcctgtgcggaggactgtggttttcgccgcttgtcattgagaaggggaagaagacggtcgtcgagacgtctgcttcagagtattctttggtggccccccactgcgcccctgctgacttcgagactggcgcggaccttatccccttcgtcgagggggtaagtaatctcgtgtctctggctggcagcccgagcctattcaccgagctgaacgagttcgacgaaggctattctgccatcaagcgtttggcggttcgggtatgttgttctcctttttgtttactttcagttgtccgtcttcgacggcttatgttaacgcttgtcctcttcgccctctctttttcttttgatctagattctcgcggcccattgttcaaccgaacggactatgcgggcttgccttgacgggttcaagaaccgtcttcgagccaaggacgacgaactgggccgcaagagcttggagatggagggcctcgccaataccctcaaggaggcgaaggctgagaataagcggctccaagctgaattggagaaggggagcgaggcgaaggctgagatagagcgcctcaaggctgagctcaaaaaggagcaagcacattctaccgctctaaccgattactacaatctcatcgagccgaagatttaggctcttcgcctagaggtcagcaaagcggaggcgaacaccgaacccaaaggaggcggcggtgaagcttggtgatgatggaagtgttgggatacgcgtaggctacgatagcataaatcaaaattttctatcgcgtaaaccaggaaccatgcaagtattagatcatagatcgttaccactcgacgcgctgcacagcggaagaagacgctgagaagtcgaaggaactctcgcgaagtagcgcgcgtcgatgtagaggaagtagtcgatcgcaccggctcgaccttctcctcctcgtgctttctcctcgccgtattcccacgccgatcagcaccgcaaaccagcggcgtctctaccggtatccacacgtacagggacggaacgccacgcgcagatgtgcttgcacccgcgcgtggctagggttttgctcggggagggaagtgatggctagggtttctcacgtattgcaatacctccgccggtcacacccctcacgaatatataggatccatcactcgggcctccaaggcccataggactcctattcggatccctatccgaattaagcttatattggatccctatcaaatccccttattccggcccattaagcatgcgaccctgtatgttcatatatactcggctgtaatctgaaaactccttttcggtccacgcgtcaacagcggcccctagcagaacgtattgacccaccgggcatacataaagatcatatcggttgaacctctagtgtatacttgtataaacccctttgcctcacgatatcgattaagctcaaggctagatatgtggcatcctctaatagctaatcattcactcgaacctgttgatagattatataacttgtgattgacccctcaatcacctttggcatggctatgcacttccataatctacaacatcgaggggcctagagatatctctccataggaggggcaaatcccatcttgattatacatatcccactacatatttcatagcatacccgaaaactacttttatagctacccatttacggagtagcatttagcagttcttaagtaagctactacacatgttgagaaccatgataatctcaggtctaaggattcaacaccaacactaaatgagatcactgatgacacaacacatatggctcttgcagtgtctcatgttgggtctatccaataacatgttcaccaacatgtgtccacattattaatttggtatctctataccatgatccatgagacatgatcatcaattaaaacatgtgctgatcatataaacatatttgttccacatatgatatttgattagggatcctttagaaatagtaacaaacaacataaagagtctcatgaaagaatcacatattcattaaccaataaggagttatctatttcaaggaacaatgtcggataaatatgtaaacaaagtatgtgatacaatcatctctatgattgcctctagggcatatcactaacaggaaggagcagcagggcctcgctggagatcaaaacgcggcggcgagctcggtcttcatggcgacgaagtgcttcccggggtcttcggctttggggagatggctgctgagcttgctattgaccttgcggagccgagagaggtggcggcgctgactggcgacggccgaagcgacggcgcacggcggctggagcggcggccgaaggtagagagagaaggggctcccggggagagcaattccggcgacggcggaagacaggacttgagggagaggtagaggacaacgagggggtcctttatataggcacgggagctcgggtccaggcccaaatcgacggaaaaactacgggaaattctagggatcttcgccggaaaaaggaaagattgatccgcgaaattggaaaggatttccgtagaaacttttggggatttcttggggaaaaggaagaggagattaagaggattccattcccagaactaatttggaaataggagcaacggggaggtcggatttggaaggaggaggcggcggcagtgcatgcgcacggcggacagtcggctcttcctgagctggaagatgaacagtggcgcaggaaggcaaaccagacttttggctgggcttctattgcacagcccgatagaaggaggaatgcaaaccagactttgggaagggataaggccggccgaatagaaggaagaatgggcgaggactaaaggtgaactggtgtgattatggtgaataagagcaataccggcttcggccaacaggatgtagggctattacttgacaattcaggggcccgaaactatataaaaatccctgtctccatctcttttaccttagtctcgcgtatatcctagtaccaacgatcatcatactatgcaaataccggaatcgcgacataaaacgtcgacagtggcgcgccaggtagggcgatttttggtgcttcaaggtttcgatgagatgggtttacgagatggattctccaacaacaagctactcggcgacttcggctgtgggaaaatctaacctgatcggagcatatcttccgacgagattgggactaccgccgccgcggagaaccatgatgtcggaagcagcctaaccctcgacgcgtgcgacatcaactggtgcaaggcatcggccggccgagtccaagccgaacccgacaccgattcctaccaaccaagcaagtgtgtcgaggagccaaaaatcaactgccagagtagtgctaccatgttctgactaggacccgatttttagtcagttgacacgggcgtcaactcatcacggccggcgtcaagtccaaccaatttggataacgtccatatgtgcatgcatcagatcaattaacagcaagtgcatgtgtttactgcattcatgcggctgtacacctggagaagtaagattgcatcgatctaatctactccgaatacacatgtcagaaatgtaattagtaggttaattaatttaattgatctactaatttcgtagatatatccggcatatatctacacaggtacgcattattttatataaaattttccataccaatattcagatcatacaacattgtcggatttataatttattatgtttacctagagcatgttttttatacaatatctgttgcgcgggtgtccctgatgttaaatcgactacgatctaacgctggggactcgctctgtcttcttctgtataaatcatgcttgtttacagtttacataatgccctgatatttaatctgctcgttatatcctgataatgctagaagattcatgcagttttttgagtacatactcgatattatctgctatatatcttgtcttctagaaaatatttttcaggaacaattgagcactcgagtaggttgtggtcaagtacaccgcattatcgagaacgatctcgacaaatgcagagtcgtcgcgcccaacctaccaacgaaaactgacaacctatctcatagcaccggctgtggctggactatttgagaaaaggttgttaacggataattcctcgtgaacgttgtcggctttattacctgacatgattgtgaacggacatccggatatgctacaagttgggtgtgtgagtcatgctagccacatgagatgcgcatgtaataaaccaattccagcgcctccataggtgttcgagagtcgaggtacgactacagcaataacgcagcggtcctcgtactacgacttcaaatgatcgagagacacctactcactggtcctcaaccagtcaattgtagcgatctctcgtacatttaattctagtggttgagttacgactactacctggttctgaccagaggtgtagtgattctcccattacctctacttcaacaaagttgatatcaggtgcacaatatcgccaagtgttttacccagagatcccttaccacaaaagacacctagcgttgaaacctatcctaatgtccctttacgccgtcttgacaaagcctctgaggaacctaaggaaacttcggctggggacgcccagagcggataaggctttgtcggatcctttagagacgaaagaccatgtaagatctggtcgtgtaagagttctcgccgtgcgtattaaccaagccgtgtaatcgaaaatggattttccaacttcacggctgggggctaggatcagtgcttgttcaaccgaggcaggtgaaaggtccaagagccttatcctccaagaacaattcgccgacaataaggctaggggctagggagagtgtataactcaacaaactgactgatcgaagtcggtaaaagagtagacgctcatatacaaaacattggtctgtaagtttaatgcattttcggttttccatacatattataacatgttaccctttgagcgttcgctcgggggctatttctatctaatattcttttctgagtattgattttaggaaaattctattcgacattatcgaaggctccatgtctctatggttctacaccaagatcgactaaggcgagtacgacaaaattcgacaaggcttcgtcgctgattctacgccttctcgatcactcgagaacagttggtggatctcgacaaggaatacggaatgaagaaatggtgtacccaccgagataaaatttcttgacttcaatccaaattctcgattacagcaagacgggagacttagtcgtatgctttgaactttcttggttgacgtcagagattgactcagacacaccctttaggtgcccgcacgaggctgataaaggaagtctaacgttatctctgaattcaccaagaacggtcacatgagctcgataacaattactctaaggtctgcgcgcggttgagaatatgaatttgttcatttgcatcgaagtctggggctactgtcagggttatggataccacatacctaatagtagttgactaaatctcggcaggacccaccatataccatgtcctatacggaaagaacctgtggatatgggaagagttccggataaggaaagacaactagagttctacatggaaacgacaaggactactcggattgtatccatatttgttcccctagttctacttgcacaaggggatacctatgggtataaatacaaggccccctaggaggagaggggacacacccaccatagaagacacagacaacatagacgccacaaagctacaagccaatacaagccaacatgcgccaagacaagccgccggatatcgacatcagagatacgcctggatcgaccctatccggtacgtactgaggctagccgtagggatctagcgctgtctctgacctcgccgggcacgaactcgaggaagaagactaccctgttgtcgactacgagtcagacctacagaccgcaaagtcgacaacagttagataggctaccccaaatattgtacttggtgtgattatggtgaataagagcaataccggcttcggccaacaggatgtagggctattacctgacaattcaggggcccgaacctgtataaaaatccttgtctccatctcttttacctcagtctcgcgtatatcctagtaccaacgatctccatactatgcaaataccggaatcgcgacatcaaacgtcgacaacttgggcaccctaagtatttaacaaaattgaaaccagctcatttaatgattaatttaatatgtgaataattactgaaatagtccttgtattattaaaattaggaattgagctccgaaaaatccaagaaaatttcagagagtacaattaatcatggagaatttaataaaaataaaatccagccatgctttatatttaggaaattttatttcccacatttaacttcacttgtaatttaaggaacatttaatataaattctattaatattttattaaatactttataaatcctgaaacgaaaattcaggctgtgacaaaggcgaacgatgtaaatttggccaatggccccttccctttcttactatagccaagaacggtctttttgatatatggaatggatgatccaagtttagccaattattatgcttgatgcctttggcatatatgcttgcgtcattttcgcattatttttgcatactagagagtgcttactctttttgcccacttttacgtttcttgtggagtcttaactttgcacttcgtcatttgccctttctgcactgttttagcagggtgtttgccgaaaattgtgtgttcggtccccctttgggaattggcgaaacaagaacgagaagttcgtggcggcgaagggtttgccaaaggtgcgatgcccgtttcggcctgtttactgcgagatgataataaacggcaacagctacaaggttttgaaggttgccggctgaatgcgggcgcaccccgggagaaccctggaagactacgaccgtatccatacagaacgtctggaggacatggttcgcttttggcgaaaccatcagaaaacagatcgtcaggaggcgatctcccaatgtcgttatagtctagtctgtgtttcgcccccttccctcttagggtcgtgtataatattagtagtgatgacgaacctgattcgccaaatcattccttagggagtgaggattgttgtgggggcgaatgtgtaatttatctgtaagctaggctgtaaagccgttgctttctttgtctataccatgttgtaagacttgtattcttcgattgttttttcgaagttgataaagatgtgttttacttccttttcgctattctttgcattgtcacttttcgtgctttcgttaggtcggaacgtgttggcccatttgcgtatattagcgaaataggtctgctgacttttcagctttcggcttccgttttcgatctgtagtattctgcgctgataggagcgcttgtgttttcatattgatcgagtgtaacggtgttcggttagttgtttcccgaaacaagtcgtcggagtacgtcacccaaggttgtttcgacaggctcggattaaagggtgaatgccggtgtccattcggccacgaagtcagctaggacttcagacttgatggcagtgcgggcgaggaaatgtaggttgaagggagataactccgccacccacttgctgagccggctagtaatttccttgccccggagctcttagcccaaaggatactgtgatggcactgtaactttgtgggcttgaaagtagtgtttaagctcgcgcgaagccatcactagggcgtaagcaagcttctccatttcaatgtatcgtatcttcgccccttgcaaggcttcggagacaaaatacactggtttctggcctgactctgtttcttggacgagggccgcactgaccgccaccggcgaggctgctaggtagagtagcagttcgcttcctagtgctgggctgaccaaagcaggtggactctgcagatattgcttcaactcgtcgaacgctgcttggcattcgggtgtccaggtaaacttttccgcgccccggagagtcttgaagaaacgcaagcctctttcggccgcttttgagaggaatcgactgagtgccgcaattcggcccgcgagcttttgtatttcgcgtacgctcgacgggggcttcatttgctgaatggcatcaattttctcggggttcgcctcgatatccctttcagaaacgagaaaacccaacaaattgcccatgcgaacaccaaaaacacacttctcaggatttagtttcatacccgccgcgcgtaagttgtcgaaggtcccctgtaagtcggacgcatggtcgaaagccttgtggcttttcgcaacgatgtcatcaacataagcctccacatttcaccccaactgcttgtaaatgaccttgtacactagcctagcgaaggttgcctcggcgttcctcaggccgaaaggcatcctgaggtagcaaaaggtgtcgaatggtgtgatgaaggctgtcttagagatgtcggctggattcatgtggatctggtggtagccggagtacgcatccaaaaagctcatgagttcgcagctagttgtcgaatccacgagctagtcgatccgcggtagggggaaatggtcttttgggcacgccttgttaagttctgtgaaattgacacacatgcgccctttgccgtttgatttccgcaccagtatcgaattcgccaaccactcggggtgatcgatctcctggatcaccccagatttgagcagcttttgcacttcggctttcgctgcttcttggcgattagcagacatcttgcgcagcttctatttccttggcttggcattcggcctgaccgccagatgatgcatgatgagatatggcgaaacacctaccacctcgtcggggccccaggcgcagatatcaatgtttttcttgagcacctccaggatgttctcaacttctctttcgcccatgtcgcccccagcgatacaagtcttgtgggattggcatcatcgacctgcaccttgatcaccctgccatgaggggcgcgcttcggcgtgtgcttcgcccggtcatgcggttcggcctcatcattgtggactgctctgttgattacggccaaatcgccctttgatgtagccgaaggttgaagcccattgaccacgatcactcttgcagggccaggcatcttgagcttgagataattgtggcgggagatggcttcgaacttgttcaaggttgcgcgactgaagatggcattatagttgtatgggatgtcgacaacgtcaaacagtatttgctctttgcgcctcttttcacttgtgccgaaggctaccaccaattgtacttggcctaggacttgaactgcttctccgtcaaaaccgcgaagcgaggccggtgcttgggtgagggctagggttggcatccccatcctggcatatgcttcggcgaagatgacgtcggtcgaacttcctccgtcgactatgattcgccggacttcgaagccaactacctcggccgagatcaccagggggtcttgatgcgggaacagcactccttcggcatattttggcccgaaggaaatctactgattcaagtatcacggggcctcttcgcttgccgaagtgatgttgtgcgccattcgcagctgcatcttcttttgctgttttgacagttgattcggcgggtcaacctttgtaatcacttggattactctgcgctgcacatcttggcgctgttcggccgggggtgcttgctcttgaacagcttcgtgaggtgcttcaacagctactccttgttgcggttttggatcttgcgcgttgccatgctgtcgaatgtttcggcattgatcggtggtgtgcgaacagcgtccatggaaggcgcagtaaaggtcttttctgaccttcttgcgaacgggctgttgatggctacttgcttgctgggcgtcgaactccttgcggagggcttgaacttcttcaacaaccatcacggccttgcgtggatggtcggttctgaatttcctccaagtcatgggagcttgacctggccttggcggttgtcacaccccaaagttctcctcccaagcctaaaatttaatttataaatgaccctaagaaaatgcaggtgcaaatcaagagaaaaccctaagaaggtaatgcaaataataatcagatttgacatgtggaatttttcttgagttctacatgtcgaaattcattaacaggatttttagtggaattttcagagctctagaaataattttaaccaattaaaattgagcaagcaatattttaattccagggaaaatccttttttttcctttttctttttcttttttcctctctttttcctcctttttttcgaatgggccgtcggcccattctctcctttccttccccctcctccttgctaggccggccgcaggccgaggcccagccaggccgtcccgccgccctcctctccggggtcaccgacaggtggggcccacctgtcgggtccttcccccacctcccgccgatctcgctcgcgccgccgcgcccgcaaccgccgccgcacccacgtctccgcctcctccgggccacgtcgaccacgcccgcgcgtgcgccgcgtctcccgcgcccactcctctctctctcccgctcgcgcccgcgcccgagatggccgggattcgattttcgaatcccgcctctctctcctccgccaccccccacgtcggccggcgattcccgcctctcccggccacgtccggtcccctctccccctatttaagcatcgccgtcgtcccctctcactttttccccattccgccgtactctctcgagcctcccatcgctcccgcgccgtgcaaccctttgccgccgccttttccgctactccggccgccgctagccgccgttagggtcgccgccaggccgcgccgtcgccgccgtcgggttcgcgtggccgagatccaccccgtccacccctcctccgtcgaggttcgtcgccggagccctcgttccctcgcactcgggtgagcaccacctccaccgccgccttcggccatggtttccggttgccgtggtccatcttcctctctctaatccctctcttctccttccttagggcaccccgaagctcgtccgcccgccgacgtcgtcctcccgtggcttgccgtcgctgttcgccatcgtcttcctccgcgccggccaccctcggtgaggcacccccctcccctcttttcccctccctctccctcctagccgccgctttagcgccgccgccggttagtcgtcgctttagcatcaccgcccttcggcgccgcctttgcgtcgccgtctccgccgccggatgccgtcgccggcaacgcgacgcgcgcgtgccaccgccgtcagccccgggtcggccggtcggctttgatgccgagccgagcccggcggctgcctccaccgccgcccgtccgatcggcccgagggcgatctgggccgtcggtcccgtggaccggcggtggaccacccgcgtggtcctggtccacggtgaaccgctcctcctgagccgctgaccggtggggcccgcttgccggcgccgcacccccctctgtgctgacgtcagccctgggatttattgcgcaataaatgatttaaggtttttcttgtatagtaataaacacagtgaatcttctaaaattcataactaattcatccgagctccgtttaagcccattcaagtctcagtaaatcaagaaaaatgtgtagaatccattaaaaatggttttgttctctgtttcagtagtcttatagcctgtttgcaatgtttgccttgtatgtcgctagattccgtttcttccgacgctcccgtgtacttcgaaatagtcgccgaggtttctccagcagcagagcaaggcaagtcatgcttgtcacttgaacatgttgatcctatattgcaaatgctctattgttttctttcaaatattgcattgttttataatattactatgggatggttacctatggttaccagttcgcgggatgccctggaagaacttatcgtacttaccacaagccagcgtgggcaacggctgggcttgtagtgtagctttcctctagtcgacgcatccaggcaagggtgggcgtgatggagcggggcgggccctgcgacggcctctgtcgcttccggattcacctaggcacgagaggggactgcccgttgcccgctggggacgggggtgaaacctgaggtgtggtgtgcttggctagagggggttatgcgaagggtcctgtcacggcctctttctgatatgtcgtggtggcatgtgggcgcacggaaacgtgtcgtggggctgtgtcttgtgggtacagttgtacagctctgatcagagtaaaactattcgaatagccgtgcccgcggttacgggcggtcaaccagattcaccgtgattagtctcaccttagtgtaatcttttgaatttggataatttaggtggatggttgggcctgtcgcaacgtgggttagcgctggacagaggatgtttaattaataattacaactgtttgaatctttcagcttctgtttataaatgctcgctttatgcaaatgaacctgcttagctatcccttgttgaatccttgcatcatacccctattcctgtatgacttgctgagtaatattgacaaataaaagttccacaagatgctatcgaacaagtggttttttcttccccttttaccatcactattagcctacccttaactatactccattgcaccacacataaagtgtatttttgcatatattattctaagtgtgaaatggacttttcacatagtttatgggagactaacggtgatacaatgaaaggtaggggtgaaaatggatcggattatatccgatctgatccgttccaaatccgtcctaaacgaggatggtatggaattttagaaatcggcggatatggatgcgaatgcggatagtaaggtgcggattctgattcggatgtggtatctctaaaaaccgataaatgcggattatctggtatttctatcggattatcccataggtcgtttgccggataatccgaaaatatcaacccatgtaaccactctatctgggcatataacatgagtcggcccatccaatgacctaatttatcaattaacctaaacttccttgtttgaggcttttgccgtctcatcttacacttaagtttatgaaaggtcgtttaatgattattgtattgctgtcccttgcattgataactcaatgttgtattgattgtataaacatctaacatctgataaatttaatttgtttcccgaaccgagtctgcaccgactccgcaccatttccaacatccgaaacaatccgctctgcatgcgcacatatccgcacccgcttcgaatctgcttaaaaaatggtttagaatatggttgttgatgtgaaaacacggtggcctgggagatttgcttaactccagtgcaggtccaaaggttgatgagatgcgggtgtgccaatcagtttgatcctgcaactcacaagatatacaatagcagatcaaatagccgatcggctgataagctgatggagtagttccagtcgatgccgatactagccgatgtcaatagggttttgatcaaacggctatatgtccaatgtagataacgatataaagacaatcggctgatggtaatgtaatccagtagaaaccaatcggctaataatgatatgagagcataaacactaatccgaaggttaaagcttacatcggctgaaagtccgatgtcattaaatccaaacgattagataaacaatgaaacctttattgcgatcggctaaaaccaacttgtatgtaatccttgtaagccgatgcaacgcccatgtaactcattggctgaaaccccgatgaaacccttattagcaatcaagaagcaggctagagatcatggttctaaatacgacttagtagatcgaatgtactaatgcatcactaagtatgaaaagaaacacaatatctagacaatcaagcttttgactaatttttagggtggtggataccttagctaatccaatctagtaaatcgatttagccgataccggcataaacccttaagcgagaatcagctgatatgactaaatcgatatactaaaactagattaactaagatatatgataaataggtaggcaaaaatatcaaccgaaccagagcgatccaagaggtcgaagcgatgcagccttgaacaacaccattatagccgatacaattgccaggactggcggaacgtaggacttacccccttcgccgaagatcgaaagccgatgcaaccccgcgtcaagtgctaaggtttcgccggatgataaataaaaacctcgggaaagagggtggctatacgccaagagtagctgtattgatctatgagataaattaaaattaccacatatgtacatatttatacccatgggtagatactagtccttgttggacaagaaagaaacttttcgaaagataaaaagaaaacataaaatccttatgggacactaaacacactttcctaaagataaaaggaaacacaaactcttcctaattaatagataaactgccatgccacatcttccttgaacacggtctcttctagataagctttctttaattgattaattttcttaatctgattactagcgacttgatgactctcatcggctgattccagaactctgaagccaatactaactctaggccgatcaggacttcggggcttaccaaatttcactgttaacaatggtgtgaccactatccgtccgaatccgatccgtttccacccctaacgacaggatgtcgttttagattagtggtactaggttataatattctaggaaagagggagttatatttacatatattaatgatttaagatttgatggtttaactgtacacattttaaaatgtcatatatattcgagaagctagtagatagtaatgctttgttctgcatctgaccgtatgtgtctgttgtgatgaaatgactacaaatcgggtgcccgatttttcctaaaaatcaggcattattttaccccttatgaaagagtgtttcagcactaagtgaaagaatgttttagttcttgaaaaaagtgaaacgcaatcggatcgccagatgaaacaatttggttcaataaataaaactaatgatttaaagccattgaaagatcaacaagttccgagtgaaatcgaagacaaaaattgaaacaccataaaaaaatccaagtgaaacactttgatctgactaatgaaacaaccatatacatagaatgaaaacattgaaacaatcacccgaaaaaagaccagctaaatccacttcaggttagccggatcatcgacggtagatgctgcccaagccacggaggagacgtggctaatgatggcgtgcagctgccgaagatgatgatttggctgatgatgccctacaaaccaccaccaccacccactcctacagccactcaggacatagccattgccgccgttgttgcatagactcagctaagtctacattgccgccactgcagctgcctgccaccgtcacccctattagccaccgccttgtcctgccgatatcttgccttatgtttctgcctgtcactaccttgcctccacctttgcctcctcacagatcaaaggggatagagaggagagaaatggtgaagagagagataaaggaggggaatagatgagaccgagagagaaaggagggatgtggggcgcagggcgcccgatattttccttcccaccaggcacccgagccaaatgctaccatatataactttcaatctagttagtaatagttagtaatgaaagagaattaccatttctaatatatacaccctctggaaagtcctccgggattgccccttctatccgcaatatatttgttatttgaccaatttcttcaactggtgcaaaattactctgcatggatatatagatccaccacatacgtaagttattagcaatggaaattgaactgattctccaatttagttttagaggaaaattgtttctccaagggaaattaatgtatttctctccaattcattgcttagaccccaaaataagtgctacttgctcttctaacttgtttagcataaatcaatgcttgagaaggaaacaactatgatgtatgataggaggatgcatgattaggagtaggatgggacaaagttttgaatataacatgtacttcctccgtttcatattataagactttctagcattgcccatatttatatatatgttaatgaatctagacatatatgtgttcctagatttattaacatctatatgaatatgagcaatgctaaaaaatcttataacctgaaacggaggtagtagtacttagaagaatactcttttcagacaaatttttaatcctaaaaagcattcatttttacaggacggaagaaaatttatattataggaagttcaaagcaataaattgctgctgcattttgtgtaacgtatatgcaatcatgcttgcctgccctacctcggtgggacgtaaagattgatgactgaatgtgaagatagagtccacaaacgcatccagcaatttcttggaagcactgcttcctgcagcagatgcctccctaagtttggttttcaatacttgctgaagctccttgaaacgaggtggctgtatgtatcaaatgaacgtattaaaatggaatcatatgatcatctcattgtacatatgcaatgcaacagtaaaatatacatttttttttggcccaaacagtaaaatatacaatctcaatctcgttgttgcatgcttatagcagtagagctagctagctctggaataattgatcagttcagttgttatatgcagagagacagaaaggagactagagaggctaactacggagggaggtgtggtttagtactgtgcgtacgatgtgcgcagaggaatcatgagtcgccaaaggcttagtcctggtgatcttggctggccttcctccggtgctgcacaggcgtggttgaagagagaagccatacatatgcatggatgctatggtcgccattgttgcaagcttgttgctcctaacaactcctccttttataaggctattccaagagatagatatagtactcgccttctgtcccagtatgacgttgttgactttcacgtaatgtttaaccattcattttatttaaaaagttatataaatattatttattttattatgacttattttatcaccaaaaaaactaaaatcctagcctgtacttttacatatttatactacatttataataaaacgaatagtcaaatgctatgcgaaaagtgaacgatgtgatctattttagctgggttttcgcaacagaacaaggacaatcctccaacataaggattctgacatattcacgtgtaaaaatatctagatatttatccaccctaagcttgggtatgttattattgcatatttattaattagagatgcatactactactccctccgttgtttataaccgatagtttggatagttccaaaatataagtattcgtggattgtttgggcgtttagcagagataagaaaaaagaactttgatatccttcattaaataagactttattaggttagattggtaattctatatattaaaaaataaaaagagaggtgattgattacacgggtataaagtaatacgaatagcacttaaattacttagatttcggtacaaatttcaattgttagaaccatttatattgtataaccgaccaagcaagcatattatattcaaaatagtggtactatagtacttcctctgttagtagaattacgtgaacaatgctataaagttttataatataaaacgttccatctccactctactcacatgaactacaataggcctagctaacaggtaccactggaccaagcagattgattggctcaacgaaattgccacgtgaatttttgtaccgtctggacgatgctttcaccaactttcactggccatctctctcactcaagagtcacggtcggcacatgctagaggccgagatcctggctaggagtctgtttcaggagttttttccaaacagtttaattaacttttcattcagattttgagaagctataattatagaattcagaaaattaattagaaaatataattaagttgagaaacttagtttctcagaagctgactaccaaccggctgtttcttaaaactttaaactacccaaacataccgtacgaccgaccaaggtttgaaatttcagtaatttcgaccccatcggcaaacacaaatctccccaaaagttccatttttttatcaaatatttctaaatctgttcaaattcagtcaaaatacgttacaaattcaaatcacttcggtctgaaaaatccagaaatcacgacatttccaaatttcggtaaccaccgaaatttcggtggggaccaaaattgaaaccttgagagtgacccggcctgacttgcgcacggggtaacatcgtcggatcgaacgacacgccaccacacaggatggataagctagcgtgcggcggcctcaaatatcatccgcgtcaacgtcgtcctcttcctcttcctcttcctctcggtgcctcaaatttcttccgcgactctcattagtcctcggatgccggccggtgtcgatcgatcggcaagctatagatagacagatgtggcacggtcgatcgacaagcaagcgggcgtcgctgtcgggctcgtgtcttttgtcacctggtaatattgtaccgatcgacgatcgagcttgctgccgaagtcgatgggcatttgaggggacgctctcttgtctccttgctctctctctctctcattccatgtacagggtaaacgatgaattggatggacactaatagttgccttatcgtacagcttccactgatgcagcttgatcctctgacctttctcctcacttaattaatgggtctgtctcctaaaataagtaataacaatttgtagagttaggtacagacattaaggaaatagttggaattaaatataggagaatatcgtgattttctattaaagaagacacggcaaaggaggtccccgttgttattgcatgctttatttaatatataaagaaaaatgtaattacaatagaaatattaaaaaacactgatccaatacatggctacatctttatctctctctctctctctgctagcttgaaaaggagtagaagatctccttttaagagacacctccaagacgacatggaaactggcttgctttcaaaaataaaaccatttctcactttccaaacttttcaagtcaccattaaaattttctcgataaagcatctttctcggtagcgaagatagacaccaaacattatattctccaaattgtctgatgttttccagaaaatcctaacaacggcccagcaaatcttgaaaaggggcactcaaaatttagatgcaacatggtctccacaattccatgtccacataaaacacacccgcggtcacaatcaggaggtgcatattttttatgatctagcatgtatcttttattcagtggatcctttaatgaaagccagccaaaagcttttatgttagacatacatttactcttcaagattcaacagcaaaaccatccacaacttatggatgtgcacaactcatgttctcactcgcaaaaaaggactagttcacagctacacatcttcaaagagaagattaattatgtacatgaacactacacgcattcagaagagaagaacaaagaaacatacaagagctcctggccgccgcgcacacgccgcggcgctgttcgtctccgccgtcgcgcggactgggcccggcgttcctcccttgagccgaggacgagtacgccgactccgacggtgacccggccgcctctcacccgtcggcggcagccgcctcccacccgctgccgacgccgtcgacggagaggggaaggggaggtggggaagagaggggaggtcgctgccgccgctcgccaccccaatactacataaacgatttttgtgtacgagacccttggtaggttgcaaacggaccataacttacagcatctggaaaaatcgagcggcattttcgcatatggctccttaagacgcctgtatggaaaaatttacatacgggcatcttaaggagccgtatgcgaaaatcgatttttccacaacaaaggtttctctttttaatctttgactaaaacttgtaactagtgtttttccctcatactaacttcaaatgtgttgattctttcctaaatgtttctaaaatcatgctctattatgttattgtgttcctactgctattagtttggccaacttttcatgtgactttgttttatcaattaaaaatttgaatttcaaaaaatggcaacttcaaataatattttgatgcagtaaatattttcagctgaaaaagtcatgaacataaaagttgtagaactcaattttttaaaaaaaagttgtagaactcatcaagatatacaacttttcttttagtcattttttcatccgataaagtgatagtaacattgttcacacaatttacatatctctcttacagtttataaaaccatatgagagatatgtgaaattcgtgaacaacattacttatctttttgttgatgaagaaatgataaaagtaaaagttatagatcttagtgagttatacaactttttcagttgaaatcatttagtttttgaaaattttgtttgaagttgtcatattttgatgtttaaattcaaactgttcaaacaaaatcatgtagaaaaatgattagaacaaaagttgtagatctttatgcgtttcacaaatttgttgttgacaatttttccagttgaaatcatttactaccataaaattatttgaatttcttatattttaaaatttaaattttatgtagttaaatcaaactcagatagagaaatgacgaaaataaaattggtagatctcaacaagttccacaactttgtttttgacaacgttttcacatgagtttatttagtatcacaaaattcgatttgaaattctcatattttcgcatgtggccccttaagaggtccgtatgcaaaaatagatttttgcatgcggacttcttaagtggttccatgcaaaaataccaccccttcacatatttttttcatctccctccactcttttttccctcccaccacttcaatttttttcaacccatctcctctctctctcccctcacctctcctactattatttactttcctctctctctctttttctctccctttctctcctctcccctctctctctctcttctctcctctccctctcagagcgggcacaggcggcctggagtaggggtggtgatggcgtcggtgggcggtggatccggcagcgctgccctagggagcggctgcagctgcggcggcgacagcgagcggcggatccggcggagcggagtattttctcacgtgggtcactaaagaggcccgtatatgaaaataggtttattttcagatgcaggctttttaagaggcccacatgtgaaaattcatttgcatgttaaggttacagttcgcgcctgcaacctacagggtcttcgtcccgaaaaatcttttctatagtagtgtcctccctccattgtttatagcaaatagtttggatagttctaaaatataagcatttgtaatttgtttaactgtttagctgagataaggttaaggataaaagattttgatgtctttcattaaacaagagattgttagtacaaatttcaattgttagatgtattcatattttagaactgagagagtgtatgtttgaattatataatagagccggccgcttccatctccacttaattcacataaactacattaggcctaataggtaccctgcagattgattgcctcaataaattgccagtgaagttacgaaaagtgggtccagataggacaataattgaccctgcagattgacaggctagtgaattattgtcctgtctggacccacttttcgtcacttcactggcgattttttatttcaaatattaataaaacagtatttttaattaccatacaatatttattttgtgaaattgtgcgttttatcatgctaatataattcacgtgacatttgattaatgtcacttcagtttgaattaatgacgtactccctccggttccataattcctgacattttggacaaggttgatgtcaaacttttgcaactttaattatcaataactttagaactattaagtttaaaggaactagaacaacatatatagattcgtctttcaaaataatgtaagaaaagtaaacatgcatttatttattgtatatattattttaggaaaacaaaatgaaatacatattttgaagaccgtgtcattatccaaaacgtcaagaattatggaaccggagggagtagcaaattctggtcaagttggcaagaatctacctatgtagtatagcattactccctccatcccaagatgtagcaatctaggatgggtgactatgaatctggacataagtcttaggacagaggttgctacattttcggacagatgcagtattaaactaggtgaaaccctacgtggtactgtgggagtttactatatgataacaataagtaattataatgtgtaaaataacttaaacaacataagtttatataaacataagtttatataaattgatgtaatttaaatttaaatagtatatacaatgatgactcaaatataaaagtaagatggtgtggccttatgagagaataaaagaaggaagataatttagactatacatataagggctaaaaaagttgagatgatatggcttaatgagagaagaaaaggatagagataatttgaaccacggattaatcgcataagcacaattcatctgatacgacttaacgagagaaaagaaaaatataatgacctaagtgaggatgaactatacataggtatatagtgtattataaaaaaatgatggagagatatattgaaatattatgtaaattatgtgggatgatttaacattattacattttaaatctttaaaatttaataaattattaaattatagataatatagcatgtttgcatgatacttaaatgtaatacttgttagtagatgatgatgtggtatttttacactttagaaattagtgtactttaactttatatatagtatatagtaagagaggattggttgttgtccacaccagtttaattggtgtggtaacctcgtgcaacaatgctaaactttatggcgtgacgacttcgtcgtgcatgcatgcatgtatttgtagacaatgtatatgtttactagatgaataccccattgtgttgctgcggagaattaagttgcataatatatacaaataaaatataatttgattatcaaaacgaaaacaatttgatataattttgagcctgaaaataaatgagattgcatgttttatgagagaagaaagaatagacaatttagaccatagatcttttatccaaaggctagaaataattgaggtggtgtggtttaataagagaagagagaaatatcatgaactacatttagtggggatgaactatataagtatatataagtatatatatatatatgattaccttggttattctaatttgcaaagaagaaccttgctttcacataattaacaacaatttgtcataatataattatttagataactttcaatatatgtactgtttttggtaaaaatatactgatatgtctttatatatagttgagttcgatataatgctgaatgttattggtgctcgtctatgttgacaccccgttcatgttgaataccacgttgattatattgcgtggatttttttttggtataggtgctcgtctatgttgacactccattcgtgttggcgtgacattagttaaataccatgttaattatattgcgtggattttttagagaagaatattttttacccgatcggatatatgcaatcttttaaattgggacttagcttctcaaacaatctaatctgaaattcgctcctataaagatgtgaagtcagtactactcaagtcactacaattaataggctatatgtccttttgctatattgcgtggatatgaggttccgttttgaaaatagaattttatatggtctgtcaataatatattattttagaaatgttgagaaaacaaagcgaaattcttcacaggctttttttgtcactgatcgatccagtagctgtcggtgggcggtggctacggctggtggccagttactatgatcctgattgaccatgagcaaatcgtgcaacacgcgtagggtaacgagagacgctagctccgcagcctcatcatcccccctctccatcgtgcgccacggatgtgtgctgctctgctcgggatcttcatctaccgtgtgcgggcgtagctaggtggtagtttcctgatatactcgaaactactcgctccgtttcacaatgtaaaattttctagcattacctacatatatatagatgttaataaatctaaacacatacacatatctaagattcattaacatctaaatggatacagacaatgctagaaagttttatagtgtgaaacggaggaagtaccaccgattttggcccaaggacccctacctcctaaattctgtctcaagagtaagcacaagaaatgaaaagaagccagcccaagaaagagaaagagaaaacatagcagaagccctaggctgatcggctgggacgcgaccctccactccttgcacgcccgtgagagagccgcaccaccactattctctggctctcgcctctctccactcctcacctcgccgcgccgccgttttcctgtatcgatttgcagagggtagaggagggcagacgggcgacgtggcataggcaaggaacttgctccccgcccagcgcccagctggcttccccctcatggtgccatggcgcccccaccggccccctgaggccctacttgatatctctctctaccaagtcctatcatcctatgctgtctggttgtttgttgttcgatcttggagcgtgcaatggaggaaaattttgatcttggaagagtgaaacaaaacaatgtagtttagctctgagtaatctgcgttcttgggttggtacaactggagaaggttcaaattttctcaacatatagaagatcatgtcttgattaattaccgatattcttcatcgctaacaggcctagtagtccggcctgattgagatataggatgtaatctcaatcgggcctaagggagagcccgacactgatgaatgtcatcggtgatgggctataggtatatacacctctattatgtctatataagtacatctacaacgatgttaatttaggcccgattgagatggcttcattttaacggcccatgttgcctaggcatatgagcggatttgtactagtggctcattttgcttcacttgttctgtgtggagatcagattctatcaacctaatcagctgtttgagagcaacagagctgagcgggagcaccatcagcatgaccgaaaaccagctactcaccttgattaggccaaacctggttcatctaatttgtcacattggaaaatatatggatcgtctgaaataaatgttactcatgtttctttatttgtaccatattctcaacgtattactacttgtatatatcattttaggtgtttgaaaattttgatgtgtaatatgaacttgtgaagtaggactacctatcgaaaaatttctaactacaccagccactctggctcattccggttctggcagcatgctaacctagctagcttagggcaccagcaatgtacaaggagagagagagagggggggggggacattggccatcacggacgggaatggagccaacgacgggggttgcggcagcatgtgcggtcatatgtggcagcatcgacggtgatcgttggttgatctcgcggcggcaacagtgatagcagttgcgaacgcgcgcacgggcgaattcgacggcggtcctggctggatctctggcggtgtcggcgacggtcgaggttggatgcagcgtcagcgatggtggtcgcgggcagatcccgcgacggtgcgaacgagcggatccagcggcggtcgtgggcagatcttcgacggtcgcgggtggatctccggttgcggagatggcagtcgcagggggatttctagtgatatccatgcaggtgcacccatgctctctcactctcccacggcggactacttgctgcttctcctcccttacgggggcaaccaaaagatttggagagagacaaagttggagcagagaagattgaattttttattctttatgagtggtccttttgtataatgcttacttaagtaaagaatagctataaggatcatctccacatacaacgtataagtagatatcataagcataatgccctttccgattttcatattgtggatgccctaactattgagttcggtgtgcgtcgtcctcaggcgtacgtgcgtgccgctgtcgggctcgtgccgcgtcacccggtaatgtgtgacactgatgagttagccgccgaagacgtacgactcgatcgatcgacactgagcggacactctcttgtccccttgtctccttgttctctcctgcacgcggaaacaatgatgaattggatggactataatagtagccgtacaatgttttaattatagtactttgtctaatgcagcttgatacttcgtggtggtactatatatccgttttaaaatatggcaatacagtatcagatggaacatatctcactaatataaataatatggcaatacagtatcagatggaacatatctcactaatataaattttggacagaccctttgtacagattaataatactaggatgcatctcatccgatgctatattgctatattttggaccgatgtagttcaatcaaagcatgcatctaaactattttacgattagaaaaatatctgaattacccactgaactatcacgacattatgaattgtcctctaaatcccaaaatcagacttttaaaccccgaactatttataccagacaaaataacccccgcgaatcaatccgatgcagttttgtcctacattacgtacgtacgcgtggcaatccagttagcatttttctttttaaaaataagtggggtggagcagttagactctcacctctctctttactctcttccccgaccattaacgacattgacgacggcgccgtcgtcgccactccctcttcctttcttcctcgctatcgaccacggtaggtgacggcattagcaggggagaggtgcttgcctgtttccgccgtgtcggtgatatgggcccgggggtacctatgctgaggggaagggatcctttcccgtcagccacgtggccgcgtggcccaggccccacatcggggggttggacgcacggacggtgaatagcccaggagcgtccgcgctcccccagggggctcggggtatctcgccatatccctcggccccgaggggctgccttacctcgaggccctcgctcggcgccacgtggtgaccgcgagggggatcgagcaggcgggaacgcggggactgccaggcgcatttatgggcagcgccccaaccgcccaccggaagacgtgcgtcaagcagccttgaccggtctgcgaccggcgtgcgatcggtgacagacggatgtgacaggcggcagcgcacccacgccctaccctgtatcaggcgacgtgggggcaggtataccccgtcccatcgacagcaggggatcgacgtgcaggtcggtgcaccccacgcgcgtgaacccacgaagtctccaaaaatgtatgagggaatgataggggatgtcccccgtgtcaggcgaaggacttcgctagggaccacctgaggacgagcgcacacttcacttccggccaaaggattgggaagctgttcaacccagaccgatgtgggcccctctccaaggtagggaccgtagcggcggtgtatgtggtatctccttgaactataaatggaggaccttgcccagcgagcaaaggacgactcttaagaactctagctctaggaagagactagaaaaaccctagttgttttccctgagatttggattccttgtaacttctcgaagatcaacccatatataggagtagggtattacgcttcatagcaacccaaacctggataatctctcgtccccgtctggattaccatccactttgcgagcttagccccgagcgaatccgattcgctaagtagagatagcgctcctgatcatcacgcctaatcctctggccgaactcacaaagggggggtctcacgtcctcccgctagagatggtcactcctcgacagctggcgcgcaaggtaggggaaatcccgcgcgtttgtgaaggagccgtttttcttccgccccaagtttccttccatcctcaacgaccatggtcgaggtagtggaggaagaagtggtggtgtacactcccactccgtccggaagtgaggacggtagcgggagtcgtaatccccgccaccaccgccgggactctccgacccctcctcgcgaagccccagacggcggaaggaccccaaccggttaggaggttcggccctttccctgccggctgatgggggaagggcgcgccgcgccggggtacaccgccgcctcacctacgacgacggcggcacgccccaaggcgcgctccaggccgtggaggctctcctacggcaccctcccgtcgttctagagccgaagaccccggtccagcggtggctggatgatgtggccaacttggtcgtagccgcacagcggcagctggccactaacggctggcccttaactgctggtacctcacgtacctctactgccctctcctcatcggcgaggaggagggcttgtcggtcagccatgatctcacggcgatcgacaaccccgacgtcgtcgaggccctcgaaaagccgagggcgttacgatagtctttacggggaacaggacgcccgaatcaacatcaagcgtcacagggatgagcgccgcgctccctgcgcgggggaaggcgcctccttatcaggagtgtcgcgccaccccgcgcgaggcggccggccccccacgcccccgtccggtggggctgggtgcaaggcctttgtggcgagtctccgaaacgtccggtggcccccgaagttccgccccaacctcaccgaggagggaggaggagggaggcaaagtagacttcgtgggccgagggcgtgggccgagggagagaggacagcccgaaaggaaggaggaaaggagggagggggaaacaagccaaggagagagagggagggatttgggccggtaggggcccaaaggaaggaggggaaatttaattggtttttcatttaatttaattgattaattgaattttgtgactttaaaaatttacttcttgagctccgaaaattcacgggaaatttcagagaatatattagggcacagagaatattacaaaaatatttccggccatgatttttaaggaaatttttttaattcccttaataattcacttgattaaattactttaacttttatttaacttctagaaaatgtactattaattgatttgtaatgccgaacgaaaatcggggtgttataaggacttccctaaaaaggaaaacaactgcggcaccgttctaggaaaggaaaggaaacggtcccgcgaacaaaaacggacacggttgatcatgcaaaatgaaaccgcggactgagaaggcagtgaattgggcacaattcatgaccaaaggcaaaaggaagaattattattaatgtgatcttgacatttttaaacttagcaacattacctccggtgctctatgaattccgctttaagtccggttagtcatttttagagcaaatagaatttgaaaaaaaatttcctctggcaattccgattattaaatatattgttaattagggttttctcctggttaaccaaagtaatttctatagactatttattagtgaattggaacctaaggaaagggaaaactctgggtgtgacattaacctgggaactagcttcacatgagtatgtgtttagagcatttgcgatgttgtagaactctagcttattttttcatgtctcttgagatgtgtaacctggtcgccaccttcgtgtggtttgacggttgactagcacgttgagtcctagtagtcctagtaatatctcctatgctctgtacttgaggcttcgggtttcataacgtgttagctttttgatttgatagggcatcgatgaagttggatggttaccattttatttagattttatcgagaccccatccaactaaatatttcacgatgtcatttgaaataagcttacataatatttaactcggggtgttatctatatttttttaaaaaaaatataatcatttcgttgaacaaaatgaggggatgttcattcgggtgattaaaagagtttgccattgttccaagtgctatcagccatcagtatcaggaaactcaggtggtcacgtacgacacaagggtttagaatcaacattcttgccccatgcatcaccagtgaagttgcttctgccatgccaagaccagttgactgataccttagtaacaacctaagtctgtgtggcctttaatcagtttaagaagcaaaaccaatttcaggcaagctagcatctgtcttgtgatagctaggtatgctcggcaatttacatccttaagctgtaactgtggtggtcttcgttttgtagttaattaagatttaagaacatacatcatgtagccttcacatgaagatttaagttgctgatcgaatcctacaaggcacatagagttaatttccaaatcctttttcctggcactgaaccggaagagctgctcctagctagcctcctagggctcatggaaaaaaagcgtgaaatttgcagttttgcactcgaacgacgtaagcattcaccacgctctgcacattattcctggcatttttcgtttctttatctaaggagtgtatctgtactttgcagagagtagtaatccaagaggctgtctcgttttatgtttaccactgcgttaaattgcattcgtttgaaatgctaatatgctaattaattaaaaacaaaagaacaacaaaaatatatagcgaaaaggagccgtaaggatgatagtgccgtcacgaattattgacttaaaataatcacagttgttgtatcttcgccggaccggctgaaagccggccagaatgtattaagacgcgggagcttacaattcttgtaccgtacatgtcacctcggcagtaaatatattatacaattcttatttatttcttgatatatgaatgttccatgaaaaccgtaggatactctttatgataatgttatctttaccaatttagtaaattgtgaaatctgtgcgcatcaaatatacttagggctcctttaaatcataggattgaaaaaatgtaggaacaaaaaaaaactcaggaatagtataggaaatcataggtaaaactaatggttgaaaaacatgggaaaattataggaacgatcgtttgattgatacaaaggaaaaacataggaatgttaagtattaagttaatagccatcaaaatttgaatggttttatgagggtaaacattgtctttcaatagtgttttgcctcgatcctactcataggaaaagaaaaatgagctcaaggtggatgttaattttcctatggaattcccttaaaatcatggtcataggaaattttcccatgcatttcctatattcaattcctacaaatcaaagggatgaacagtaccaaatcccataggattattgatcctatgtttttcctccattttttcctatgaatcgatggaggccttaatgtgctgaggccgtgggcgggtagcgcgctggctttgcttgcctgaatagcattgcgacgacgagcatgtgggcatgggtgcgaagcagcggcggcgagcgtggcggcgcgcagggcgtaggatgatcagatgacgctcggcccatgacatcgcgctgggatgacacgcgcgcagcgtgtgacgggcgcgcatggagcgcagctgcgctgccgtgtcgcgctttgcattggcgcgacgccgacgaagcgacgagctgcggagacgcgcgcgcgcgcggggcggcaggacagcgcgccgcgcggcgcggctccttgggaagacgtcgcgcgaggaaccaatcacagagcaggaatcatatcacaagtaaaaaaattattttcgcagagaatccttttactgcacatatgctacggtccataaggaaatctgccattgcagtaagtcaggagggacctgcatcacgaaaccaccggtggaacttacttttagaggcggtagtcgtaatccagacacctttgaaatttgtctgttttcacagtgcactaagattgttactgatattaggaagggtgtaatcctaatttattgcgtacaaagctacaaaacacttacagatgtagtaataaaggacacaagattaatcacagtatttgtaatatcataagccatatcgaattgtcagaaaatgtgcctataggtatggattatcgccaaaagtttggcagtaatttatatgcttatacaagagtcatgtcttcttgtatgtagttcttgggatgaatgtgccatgaaagccatagggtactctttgtggcaatgttatcttagcaattggtccattttcaaatctctgagcatcaatgacatgtgcctgtaaagttaaagaatcacagtttaatcattaataatatatacccgctgatgggttataagttattcttttaattttcttatcaagctttccggtttgtgagttggtgtcgtcggttgtcaaatctgacacctatgaaggattgccaatcggcatttactaggggttttgtactggtgagtagggagtaaaaatgattatatatgggaataacatgcattgtaatgtaatgtcaagaatataaagaatgttgtaattaacatgctagttcgaatatcaaaagtaattttgaattttattttatctaattttctagacagaacagtcacgatagtttagcacatataatagaagaaagatgattctagagagctcgcctgtgaagtgtttatttcctcgtcatgtacaaaggaaattatccatccatcatcttcatttgctccattgacctttggaacaaaagttgctcccgagcaaaactgatttttaccaagatgatgatactccacatttattagatctccaccaaactatctcaagagttgcaaaccatgatgttataagatatttcaaaaaagaaagcagcaagacaaagacattgttttcttatatatatatatatatatactaccttgttgttatcttgaagatgtagttttgcgaaacctccaaattttggtcgcactacataaaacgaaagtaaagttagcacatgatgaatagttgaatatatccttcttggtcagtttttttaatatacccttagatatggtagatccgacatgatatgcaatatttaggttatgcggcagaaatgttattgtacattttcattatattttccttgttgaaattttttatcctaatcagcaaataaactgtttaacttaattttgtcagttcaacttagtgctgaatatatttaagacaaatgcaatctttgctgagaaaatacctgttccacagccaccttccaggctcccttggacatcaatcacttgtgcatatgcatacttgtgatgcaggccagcatatttgttattgatcactgggaattccagagcaacatctgtcccagttaagtatttacctgtgacagccctgcttttcatgtttaatctccactcatataagcgaggaaaagatttctcactgggtccttgattagctggctcttcattagccgtgtgctcaagtgttatgccagtaattatggaacccggcactcgaaatcctctgatgacaacctaataataaaaaattaaacaacgccaaattatattttgaaagtgtttgcacatttactctacatggatttgatcttgaccaaatcattcaaacacttcagcaatttgattgtttcttcactgagtgtgacaaaaaggctcttgatttttaatgtgtattatgataaaaaaaaacataccacaaccacttgtttactgacaaaatggcctctatgatctaatcatccaattcaaataactgctaatctcttggagcatacattttagtgtagcagttcaattgtgcaacacagcttcatgtcgatagaaaaagcactatacaacaaccacttgatacgctacctcatgatcttcctcaaagcaattgatgagatgcaatgtgcaaaatggttctacatcgaaccatattactgaatctgcatctccatgacggggcatgactccaattcttgcataactttctgtttcaaaatcaatcaacctatagaatgttatataattaatatgttagaaacatggaagattgttgtctcaacaatagtatgtctaacataggtactcacggagctcctcttagaatcctagtaaggtccactgtaagaggcatatccatgataatattgtacctacatatggaagaacggattaatcatacttttgatgcaaatgtagttatcttattttgcatttccaaattgtttctacattgtattgtattgtattatgttgtattatattgtattgtattgtattgtattgtattgtattgcattgtattgtattgtatttgcagccactgtcaccaccgcctcatcaacctgctgactgctgtccatccaatgccactactgctgcgctgagttgctacttctttccaattcctctatatgttactgtgagccaatccaccaagcagagaagcacaggggaagaagaaaatgaagagaagaggagtagaggtagatagtttggagagttgtgttcaatataaggttttcggttgaaattaggctagatgtatcaattttaaatacaattcaagtttaatagtgggcgcttcaaatttaaccttttgattggtaagatgaaacaaaacattgtaatctgggattgatctatcaagaaataagttttatgttctaaataaaagttgtaggtatcagtcatatttttctaatggcacttgtttcatttattttagatcggttatttgtaagtaattgctaaaattttgctaacatggtaagaaaactggtgcagcaatccttttatttcattttgataattataaacacataactaggtcatttgcataacatgaaagttgcaggtactcttctatagatgctccagatgtacttaatgttttcttttgtttaatggtataaaagcaattgctagaatagcgagcaagcaagggtttaggtagttcataaataaatttctatgttttggggttttaaaaattatatcaagaaattagtgtgttgtttatttactagcattgcagttttttttttaatttagatgcatgttatttcgttctttttgtttggaggattctgataccaagttaccactaaggttaaggcaagtgcacggtaactatttgtatatgatgcgtgaactagtttaatttaattgtttcacttttattatgttgtaattattcatgtgattacgtgtaatcttgaatttggtttcatcttatcaatcatgttatatattcatgtttcatgattctgctctttttttggtttaatatcaagtgccacgcatagccacggaactgtaatttggttctttattcatgacacctgagttacattgaacctaatactcaggttaaccagtaaatgctaaaatgatattcgcgtaaaataaaaatagtttccgactcgctcttttttataaattattccgtacacattttctagttccatataatcttgctgagtattttatactcatctttgtgctttatttggtttttaggtatcacgtgacaccagcatgcaaggacgggaatagcacccaacatcgatacacttatgcacatatgaaaattaaacttagtttgtaagattagattaacttggtttcattatatttggatagtttacttcatgtttatgttattatggttgttcctgatacttctaggatgttgttgatggtaccatattcattgatgctggtgtgtttaaatattcttataattgctatcgtgcgtgtctataaatataaatagaactttgccatggtttttaatcaattttagattttagactaaaaaagtttttatgtgtggtgttgatatctaacactccagatgaatagacatagggcataaggcagttaattaatcaaattctcttagttacttaagaaatcaaatgacccattcattcctatgatgtttcacaagtgcatttgaaccatttaagatataggtctatctaaatggaagtcatgcactctgaaggacgggactacagagtgcatgtgcactaattagtgttaaccacatatcatcctcacaaatgctaaagttaatatgtactctcttgctataaagttttggcgtaaaccgccacatcggatccaggggtgtaaagttttggcgtgtcacatcagatatacggacacacatttgaagtattaaacgtagtctaataacaaaacaaattagagaatccgtccgtaaaccgtgagacgaatttattaagcctaattaatccatcatcattagcaaatgtttactttagtaccacattgtcaaatcatggcgtaattaggattaaaagattcgtctcgcaatttacacgcaatctgtgtaattagttttttttgtttatatttaatactccattcatgtgtctaaacatttgatgtgacagagtgtaaaattttgtcaggggatttaaacaggacctctatgttccatattgatcatcataaatgttaaagtcaatttacatgcataaatgcagtaatactacatgtgaagtgaaggggccaaggttatatgatgatcaatttggaatttttgagttttggttatatgatgatcaatatggaatggatggaatatatctttcctacgcaggaatatacattcttgtaataaggaaacgattcctaacacctaaactaaaacaaaattttctcttaagttacttttgtaatatatgcaaattatttttatactttattgaatttacttctagatgtctaaaaagtaatttaatggagtctaaaagtaactagatatgttatataattaatttgtaatttttcatcaaaatataatcatgtgatatcttttataaagatttaattgcaacgaacacaacagtgtaatcggatcttagaaaaaattgaagcttatgtggtaggaatatatatatattttacttgcttgatgaagtagaacagtgcactagttaagctagatttcccggaacaacatatatgcagacaacatatcatagctcgtaacgggatgctcgttaggtcaaaaatgtgcgtgcgtactaatttgattacacacactcttaaataagatagctttcaactaattctagttcatttattaacatatatcaagctgccatgttttgtttgtgcgaacgaaattattaccaagttactggtcactggcaaatgagttgttacttcctcgtttcaaattataaggcgcattttgttttgttaggatgagactttcactaacaactagccacccagtcacgcttcgcgtgactctgagcgctgtataggagttgacgaccgatcttgataattacggaataatttctatgagactattctctctgttctcaaatataaggatttctatattgtttaacaaagattatgtttgatcatataaaactttatatccctttaccgaggaatgataggagtttagaaaaaagttgagagtaggataaaaaaaattgaatggaaagtgagattgaaggtaagttaatctataaatccttatatttttgaataaattataaatatttgtgatgcttatatttgcagatagagagtagctacctttatgcttttttgaagggattaaggagagggcaataaaattaaatgcgagggttgtgttttatttttatttttgatagaaagtgtgaaggttatggttgattgagataaagaagtatatgaagaaattaaaaagataatggttgtagttaattgagatgaaggaatatgtaaagtaggataaattttatatactgtcgctgcgggtgaatgagacgagctgctggtgttctccatctgaaactatctgtatatgcaccggtgtgcaccgatggatgcacaggagctattcatctggaactttcctgatgtgtgattggtatacacaaatggatccaacggtccaattttattcctcctctcatcctaaggctattattcttcacatgacgtggcttattggttttagaaagcttgttgctttcacatatgtagattactatattatgatatcatttaaatgatacaaaagcataataataattaaatacttttgaatacaaatctaataataaatataattgtatcattaaaattatatcgtaatagaataattgttggtcaaagcctatcgtaagaaacaaaatatgtcttttattttaaaacggcgagattaatactttagtattagcaattattacttaacattaattaaatatgggctagtagcttttggagaagttttatctgtcatggtatactattttttcagagaagggtaatttttacccggcctttatttccaaccggatatatgcagccttttaaatttggaacttatcccctcaaacaagccaatataaaattcactcttacaaagatttgaactcaggaccttagggtgttactcagggcactgcaatcacttggctacatcatggtatatgatggtcaatatgcttttttatatgtttggtgaactattgtaatatagaactagtgccaaattttgatatagataaaacaagaaaacatgtttttttgtttgaaaaacagttggtagtggcattgaacttacattttagtgaccccaatttcatggcaatatgtacatctttctagcttgagatcaaccttccgttcaagtttctttccatcctctacagaatgtgtttggcgtgatcaaatgtacttagtacttttttttggtaaaaggatatgcagaaaaagaattgagattacagagctaccaaacctgagacaactccaatagttaggaagggcttcacaatgttaaacccatatatgactaactctcctgaccctggggctacctgcgcccatagaaaaattggatgcaataaggtaacatgaaatagaattaatgtacaaatcaaataattataattaagcatcccaacgtttcccatggtcactcatattcttagcacaagcatacattttatgctagatgttggcctaacatattaaatactccaagaactgctgaatttagcattaataaaatggtaaaaggtgacaaaactataagccagttctttaccatgtttgtcaaggtaggtcaatctgtgaatggcacttttcaagaaaaaacaagtgctgcactattgaccttttttccactagttgataagcttaaattatctctctaccttttttttcaaatttctttctctcctgctcttaagatagtaatgtgcttgtaaatttcatcaaaatggaagacaaacagatgttgagacttatagccaaaagcaacgcaaaacaaaactgaaaagagatagtagaaggcaagtcttctgtagaaaatgctggtgaatatggaacaattaaccaagaataaaacaaactgatacataatcttcatgtattcagattcacatgtttaagaggcagagaggcatatgcagagggaccaaccttggggtgtgctgtgaatggcatgttccactgaccatcgacgacccagctacacagtgtgccaagattgtccaagtcaatctcgtagggaatgtcattctctgccactgagaaaaccctctcggcgtgctcaaacacaccggtattactcatgtttctaaacaccttgccaaacctcagctacagcaagatatgcaattaatgatcagtgtcacttgaacactacgtaactacggtgccttagcatatgacactagaacagaagaaaatgctattatcaaatctttatgacccagagggtactatggttcactagagatgtgtggtagtggatcaagggcgaaaatcaaagaggacaaaattgaaattgtgaagttgcaaatgtttgtcaacatagaaaatactccgtgtttgtttttataagacctgtaattttttcaatcttcctgcaaaattgaagtcttgcaccatgagtttgttgaatatgttcaatgtttggacatggatattacatggcctctctcctgcatttatcagaagaatctcactaaccatgtcacttcagctatctataagaagtatgagaagcatggaagttttaactcatactccctgtggcatccctattttcaaaacagaaatcaacatttgaaaatatttttcttatgatgtcaactccgtccatacttgtttgtaatatattatgaaagaagccaatggtaaaactataatattgtataccgtgtagcaaactaatatgtattacttcctccgttctaaaatatgggatattcttgttttccataaagtcaacaattaaaattttgactaattattgagctaacaattaatatatctgtattgtgtcatgcatatagtgccattagatttgtatttgaatgtattttcatccgatgttaattttgttactattaataatatattataaacaaaattagtagttgaagaataagaataaggctggagaccgtgtaaaaggctgttacacataatattttcaaatagagggagtttctctttattgtaaactctatattcattctagctacttaaagtaataattatattttgatagagacaagagtagtaaaaagttccttgccgacaaaaacagagggtgcaagttatttacaaaccatgttcaaaatgctggctgcgattatggcaagagggtcacccttgattgctgagaggaagcatggtctctgacgatccctttcagtattaaaagtgtcagattgcacgtagcggttgttgtatgagactgaccaagtgtttccttctctgctcttggtgaagtagagggcatgcagcatgccttctccctcgacccagatgtcttcagactggccgaagattgagttcaccttgtgcaaggctccaaagagagggttggaacctgcattatattggttgagttttaatctattcagaactagagcaaattaagatcaaactttgcgaacctaataatagcattgtgaaaagtaatactgtgaactagcatctgagcacataactgacgtagcacaaaagtcaagagttaagggcttaaactacaatagttttcgctagcttgctagttgctaatgaaagattgaaagaaaattaccatttctgatataaacaccctcaggaaaatcatctgagatcgtcccttctatcctccatatctctgttcttccaccgatttcatcaactggtgcgaaattgctctgctcatggatagatccatcatataaattagcacttgcaattcagccatttttccgatagtccaaactacaccccttaactattggatttgtctaataatataagaaacatccattaactacaaaatcagatattttataacccctaggccttcaactattaaaacaagtcaaaattcaaccataaatgtaatgatattatacacccagttttagtagcggttttcatgattttcacaacaaaatatatattttttgacttatattaaaccactttctacctatctgtctaacttggtttttttatcgtactatttggatttcaaatcatgaatattaccattaaaatcaggttgtattctatttcatccggttatggtaatggaaagctgtaaaatatctatttttttagttgatgggtggttttctaagaaacagggagttcaaaagcatgtgatgaaaattaattggaatctgaagtgttctcccctctactatacctctaaattaaaaaaaaaaggttcaaaacaatttaatattatgatttcttttttcaggcggtgctcttcagcagccatcagcgaaaattggtttccatcgatgggaatataacaaacatgcttgtaaaaatagccctatatttataagtagaccccttaagtgacagccggcgataatcgattttcattggcggtaccactactgcagatttgattttttttctatacaaaacccacaataggttgtaggcagcccataagtgctcccgcatgcaaaaaccactctcgtgggggcgattgatgggcagcatgggataatccagatactgtgattatacgacaattccacaacacccccattctagacgaccatgcaagggtgcaggtagctaaggtccacgctgaacatgtcacgttcgagctagacatccctaaaccagaggggatcgaacttttgggagatgcaatgaaccagtttgtcttgtggcatcatcgagacatcatccttgccggacaaccaccatctgccctagctccatcccaaccaatgacagttgccgctcttgcaccgacctccccgctaggatcaccttccccacaagcttccttgcctctagtaaggtcaccacaccatccaccatccctaccagtttcgattcctccggtaacgtcaccacatcattcacgttctccacctacaccttctgctcaagtcccttgccctcccccttcgccacctaccgaacaaccatctcccattcaccaattaatctcctcctacaccacaatttgctctcgcccaacaagtcccacctcaccaagtaaatcaatctggccccatttctactacccttgaacatcgcaggctcatacgaaaattggtttccatgtacgaccacaaggaaatgtcaagagataaagagaggttcctgttttcaatcttcagtgggagaggttgggcaaagaagaagaaagaagatgttgctgagctgtaaaattcctagaagtcagtagtatgggccaaggatgagttgcaatcttggctatctgtagatgtgccccaagaatataaatatgacaagtcattcttaccatggtacattatgaataatctaccacgacagatgagggtgatgcatgaatggtacctcaaggtatctagaaaggccctaagcttcattagtgtcaaggtcccacgagacgatttcatgagtaaaaccaatgagatctttatcatcaatttccgggacctacacgccctcttcaagctcgataagatggacatcaatctcgttgttgcattttgcgtgtaagtgtttttacactagtttgttgtaagtgaaatgtgtgaaagaaacttccttttcaatcaagctgcattccataggtcacagttctacgacacagaaagagcgaggcaactcgttggctatatcgagccaacaaggatttgcaggccacacaacaaactgtacagcttcttgctaatagcccggaactaacagataagacaccggaggaacacaagcatatatcaagaaattgcacaaggaagaagattgaagtagcttgctacttgggaaccgcaattctcatgcactgagacaaaaacatcataatggtcccttacgctcttatataagcagcatctcttccatttgattattttttttcttgtaatacaagataactagcaaatgtcatctctaattcatctatcttgtttgcaggaccactatattttattcccggtatatccgagggaccacttggtcgtcgcgcttgatctggcacactatccaagaaagcctatatggagttcctcactatttcgaatttcaacgtagtaacataccacctcagtacctaattgccgttccgaaatttgaaagtaacacaaataaatgttttatcggcacagagcacgtaaattttatgtcaaacatcacaggccagtaaaggatgtgcagaggaaaaagcttcatgtgaagacggactggccggtatgtaatggcgtgtgccatgcacacaaattgttgtaatcattactatttttaaactgactggtgttattatcatgtttgttgtgtttcaagcaaccctaggcactaacctatgtggatattaagtgtgcaagatgcttagggtcaacaggagatgcacaacaaacaacaataacgtaagtccggagattgttctctacatagattatttagtcacatttcatttcctgactttcattgtcttcgttttttttcacagatccctcaaataatccttatgtagcaaaccggttcaacaaacaaacaatttcgaacatatgcgctgacctatgccacttcatatgtcgtgactgctgcaatgcattagggaatcctatcttaccataaaattataacccactaaatcctaaatcttaacatacaaagatatcacaacattatacaataatcttactataaagttataacccactaaatttaaaaacttaacatgtaaagatggcacatcatcatgcaataacaagatacaacatcatcatccactaacaattattatatttaaacatcatgcaagcatgctatattatctataattctatcattaattttattttagagttttaaaatgcaagcatgttaaagcatcatcccatatatttcacataatattttaatatatctcttcatcatttttgtaatatcatatatacctatatagttcatccttacttagttaattaatgttatttctctcttctctcattaagtaatatcacctcagttgtttttagccttagttgattaatctacagtccaaactatctccctcatttttttctctcataaagccacatcactttacttttacatttaaatcatcattctgtatactccttccgtcccaaaatataaacatttttgggtctcgacacggtctccgagatactactttgattaacaatatctatggaagtaaaatgttttaaataaaaagagttgcatattatgatagttcatttaatgataaatatagtaacatcaaatttatatgattaatctttttagtttttttgctattaatagtcaatatttaaaaagtttgacttggcactattctaaaaatgtttatattttgggacagagggagtattatttaaatttaaaatatcataaaccccatcaacttatgtaagtttatactatctagtcatcttacgcattattttgactcattgttattatagtaaattcccgtagcaatacccgggattcacctaatttctacgattatcagagcgaactgggcaaagaagacaaattcaagcccctgaaagagagtaggagaaagaacgtatacttataataattatacacacatatatatgtacctcggtgggacgcaaagattggtgactgaatgtgaaggtggagtccacaaacgcatccagcaatagactggaagccatggttactgccgcagatgcctccccaagtttggtggtaagctgctgctgaaactccttgaaatgtggctgcaagtatatatatcgacaacgcaattaaaataggatcaacattagaggaggggaggtcgttcttacattggatgtgatacatttggtgaaatgatcagtcgcattaggccttgtgattgatggtcttggtgttccagtagtgctgctccttctgcacaaccatggttggagagtgccgccatacatggatggagatgctgcggccaccatattgatcgtacgtacgttgtgcgcttccttgctatctaatttgtgtgacagctacaactattgtttcatccactctatttgtcagaggaattcggcaagagacgctcacttttatagtaacctagtagctaagtactaccgtcgaggcatgaggcatccatgcatgggcgcatgtgccgtatttaagacagctttgccccagtaatcaattgtatggtatttttaggacttataaatttgaccacgcggtctatgatattatcacatgtatttattagataaattttatgcatgcattctttcattttaaaacagtatttgaaagtttttttttttgagaagtatttgaaaaatattaatggttgaaatttcatgagtccattaactaagctttgtgtatgtcagatatatatatagttcgatcggatatacagtgtgattttgcaatgcgaacatgcatggtccattgactcatgatcgagttaatcaaagcagccacacagtaatgttgacttcgatcttggaagccacagtagtgtttttggtgtagaatctggcattagttcacccttcagcaaccaaatttgacgggggatctatggaatgattgtatataagacaacgcgcagggaggcggcgcctacgtacgtatggcgacgaccagggcacacgtacgcttatataatgtcacgcccggaaattcactagtaatttccgaacttattagtgcataaaatcctcgtccagaaatcagccgaggtatacaaactgacaatttaatatacaaatccatcataataataacgttacacacttacaaaagaaaagaaaacagcagcggaataacggtctagcgatagcttcagctccactcccacaggcagctcaactggggtataagtcaaacgtcttctccttctggatcctttttcttcaactgaggttgattgattattgcaagaatgagtataagccaaacgtcttctccttctggatcctttttcttcaactgaggttgattgattattgcaagaatgagcatatgacatactcaacaagctacacagcaaatatgcaagtgcacaaggataccaaaggatggcataatataggctcatttgcaaaagcagcatttagcaaaacatttaagagaagtaaaacagtggagtaattaatcagaaattttaatcaacactgaacaacacacccatgctacacaggcccaaccatcctgaacaaccatacccggctgtacagatctaactccaaaccaggagctaagcaaattattaccaggtataacatccataataattgtgagaggtgtgagactaatcacgaaaaacattgctcaacccgcccataaccgcgggtacggctattcgaatagttttactctggccagaggtgtaccactgtacccacaagacacagcctcaacatcatgtctaccatgcgtcgcgatactggaaagtacccgaatagaggctgtaacaataccctctgcacaacacaactcaccacagtgcaccattcctggatcataattacccccttataaaacagggcatggactccccagcgacccccgtgggcttatctccgccacttctcagtctggtgctccgcaatgaactatgctatacaaaaggtaaagccgttgcccacgctggcttgtggttggcacggttaatgtttcacaacagtagctcgcgaaccggtccttcattgccatgagcacgaccttcaaaaccatgtgcttacaacccaccattaatcatattttaattaccaattaattatcataacacgattaaccatcgtgagctaccattaaatataaccataaataataatgtagtatatatgattcatcccattagtgagctaatgtttctaagcatggctaagcaattatatctaacatctagttgaaccaatatatataaagctcaactagtcaaattataatatcccaaggtatcaaggaatagagtaatcaatgcaaacaggccataacaaaggaatagattcacaccacccagtgacattcgaaaataaatgcacagttgaaataaatagagaatttaaatataggatcaacatgctcaaaggattgtgtttaggatctgtgtgacttgccttgcaataatcggtcttcaattaatcttcttgaatacttccggcgcactcacgaaccttcgcaacgacggaaacgacaggctaacacgcaaaaccaagaaaaagactaataaaaaccaaataaacagtaaaaaacaagcataaacagtacatataaagtaaacaaacatgtagatcatgattttgattttagatgaatttagcaacttgaaccactcaaaaccgagttacgatgatttagttatgaatttccgaagatttaatctattagaaaaacaggaaaaagaaaaacgatgatgacgtcatgatgacctcatcaatggccggaccaagatggcgacctcgccggagattggatggtcggatgcgactttggaggacatgtacacgtagaggacgacgagacgaacccaacggtactcaccctcgaaccaaacgacgaacaacgacggccggcgacgaggtctagcggcggcgcggcttcggtcgacggcggcgacggggctccggtgaccggcgacagcgaggagggagcggccgagcttgcccacacctcggcgcaccttacggcggtgacggcgaccggcggcaacggcggaggcgacggcgcgacacggccgaagttcggccggcggcggcggcgaacttggcggcggcggcggagaggctacggggcacgggagaccacgggagtggggcaaacgaaagaggaggactagggggtcctatttatagccttggattgaagagatcggactcctcccgcaagaaatcgatccgggaaatcaaaaactcggttttggagataaactcgaaaacgagttcgattcggataagatactcaacgattagctccgatttttggggtaaagatagaggaggataagaggaatatttcccctcaactaaattggaaaaaggagcaacggggaggcgagatttggaaggaggaggcggcggcactgtgcacggcacggctggctcgggctctgcctgagttggaagatgaacagtagtgcagggaaggaaagtagacttcttgccgggcttttcttttctcagcctgattagaagagggagcaaaaccggactttggctgagagaagaagagaggatgcaggctcgggttgggccggcggaagagagaggaaggaaaggaatgggccgattcagcctaagacaagggaggagaattttattacttttccaattaaaataatcacttaaatgatctttgaattgttaaaaatacttccaatgctcaaataatttcaagaaaaatcctgaaaatactgggacactcaaagtacttaacaaaattataattagaccatttaatggttaatttaatatgtgggtaattactgaaatgctctttgtatgattaaaaattaggaattgagctccgaaaaatccgagaatattccagagagtataattaaccatggagaatttaataaaaattaaatccatccatgctttaggaaattttatctcccacatttaatttcacttgtaaattaatgaacatttaatataaattctaataataatttattaaataatttataaatcctgaaacaaaaatcaggatgtgacatataatgtaggatcgaatcacaacaactaagccaaccagaagggggtgaatggttgatatgcctaaaaaccaaaacttttagtggaaataaaagttaccctcaaattcgacggatcgcggtctgaccgaagtagttccaccggtctaaccgcctggaacacgccggtctgaccgagatcgaactccggtcgaaccgctgagatcgtctgccgctccctgtcgctgccgcccggtgtgaccgccttgtgcccgccggtcttaccgccatgatgccgccggtctgaccgccggtgcgccactggttagaccaccgaaacccggtgaaacataaatcgaagaactcttaaagtggatgacaattttattgattctctctgtgtttacaaagtgcaccaatagcactcattacaaaaatttcgactaaactcgaaaccctaactcaactatcaactcaattgctctcaaaagcgataccgggaagcctcacgctccccctctatttatacccgaggtaggcagcctaaagccacgaaccaaactcatgctagaagtcctaatcaccctaggaaaccctctagtacaagaaacaaactttacataaccaatcataccaaatttggactccttccaaattcgactccgcatcccatacgcacacaatacctccatcgtatgccatatggaatcttcaccaaccatgtgcattgaactctaaccttagtatcccgcatgatctctgaccaccacggacgtcgtcttatccccaagccgactcccggtccatcaccgcaaatactctcccagcatctcgagtcacctacacatagaacaaacaaagaaaccaaaccatattccgagaccaagctatccccaacatgactcattagtagcaaacggcagtattacatacgcatagtatccatctagaagtcataacaatgaaaaaatcacagatatctaaataaacaacccgaaaccgaaaccgacacagcgtcggccggtcagaccatgggctgcgccggtctgaccgcgtgatacacgccggtctgaccggcaacccatgcccggtttgaccggacccaaatccagcagtacctgtagatcacctatgaaatagaatcatctccaaaaccacttcgcaaataaattccaaatcacaaaaccaataatctccaataccaattgttcatcacagaataataatcaaaaacacttttgattttacaatctcccccttgataaacacattggcaaacttatcaaaaatgttttggtgtttggaaaaataaaaacaaaagtggtaaaaagcacacttcatacaaacgtacacatcgtgctcaaaaatccaaaagaaaacttccctcacttttgaaaagaaagaaatttctaatcgaaccaaaaacaacatgctcttctcaactcatttgcttctccaaaaattttcaccttgcttctcccccttttgacaatgatttcatcaagcataggaattatgttcattaatgtttaagagcttagcatacatatagcatatcaagtcatgtgttgcaataaagagaagatgaacccatctataatataacaagcatgcattaaccatgaaccaaagattttacaattaagcttgaatcaactatcaaaattcatgatttcatatgatttataatgcaacatcttaacaagcacataggttgaaaaataaacactaaacacatataccaattgcattaatcacactttctcagatgagcttttgcacaaaacaaccaagagaatttttttaacgttttctttttcttgagcctttttgcccatatttttctcttttattcggggtacgtccctgtcgtcaagactgtttccagggatttggtacccattattttgctcacatcgaatacgtccttatcgtcaagactgtttccaaggattcggtattcatttttttcatattttttattctctttgcacaacgagcaattaattcaataaagcatataagtagagcatttatagatcaaaccatatgctagcatcaacattgcatattagcttaattcaagtatagaattaaagtgtcatgcatcatctcccttaaaaacaaaatctaagtctcataaaaagactagaatacatacaagctatgctagagacaaataaaccttcaaagtattgctagcatgcacaagaaaataccatatgtatagatcaaagctctcttttctcaatttttctcattgtcatattgttgcttgataaaaccatgtgatacaaaactcccactcaaatcatgccaaaaggatgaattattcccaattcaccacgaagaaaagcaaaacgattagaatccaaaggtttagtgaaaatatcagcaagttgcaactttgtgtccaaaaactagaattcaacatctcccttgtcaacatgatccctcaaaaagtgaatacgaatatcaatgtgctttgtgcgtgaatgttgaacataattcttagcaatatttatagtactagtattatcacaaaagagaggtactttctcaaaagtaagaccataatctttcaaagtagattaaagccaaagaatatgggaacaacaactagcagcagcaacacattcagattcagcagttgattgagcaacactagattgtttcctagaagaccatgcaatcaatgatgtaccaagaaaatgacatgttccactagtacttttcctatcaattctacaaccgccaaaatcagcatcggaatatccacttaagcatatagaagatgaagtagaataccaaattccaaactcgagtgtatgattcaaatacctcattattcgtttgaccgcttgacgatgtgaagcatgaggagaagcttgaaagcgtgcagacaaacacacagcaaactgtatgtctagcctagaagcagttagatacaacaaaaagattcaatcatacttctatactccttttgatcaatagcttcaccatcttcatcaggatccaacacaactgtagaaccaattggtgttgaaattggcctgcaactctccatcttgaaccgtctcaaaagatcctttgtgtacttcgtttgatgcacaaatataccttgagatgtttgcttaatttgcaatcccaaaaaatacgataactcacccatcatgctcatctcaaattccctgcgcatagtctcagcaaacaccacaaccaaagcgtgagttgaacaaccaaagatgatatcatccacataaatctgaacgaacagttgattatcaccatgcttaagaacaaaaagcgttttgtcaatcattcccattgtaaaaccttacgcaagcaaaaagttcttaagcctatcataccatgctctaggtgcttgtttcaaactatacaaagctttagacaatttaaaaacatggttgggaaaatcaggattttcaaaacctgatgattgtttgacataaactt

SEQ ID NO: 4727 - DNA, 739 bp, Oryza sativa
catcgtgaggtgtgcaaaattaaggtgaaagattagtttttttaatcgatttggtatttatttatgtgttttggcttgcaccttaataatttttgtagcatcaaccttgtgtttgcattgtgttattcaacggattcgattatgtttttttttttaaaacaaaacaatggaaaactaattatggtaagtgtttatgtaagattggatgcttgggatttttgtccgtgtataataattataattaatgattgtttgaatggatttagattgatactttaattttgtgtcttgtaattcgtacataacgaaggctatcaccagggtcctgtttggatctcctggtaaaaattttcgccctgtcacatcgaatatttggatacatgcatgaagtattaaatataaacgaaaaaataactaattaggcatattgcatgtaaattgcgagacgaatcttttacgcctaattgctccatgatctgacaatgtggtgctacagtaaacatttgctaatgacggattaattaggcttaataaattcgtctcgcggtttacatgcggattctgtaatttgttttgttattagtctacatttaatactttaaatgtgtgtccatacatcagatgtgacacgccaaaactttacacagcctagatcggacggacgaaaagtggatgtgacagaaaaattactacaggcctgtttagattccctggcaaaattttacaccccatcacatcg

SEQ ID NO: 4728 - DNA, 6938 bp, Oryza sativa
cctgcagcccattcgagaaatacacgtaatcaaacgatttgtttaacctgacgattttctccttgacccatgaggacatgagtcacgtcgcaccattaagctccaaaaaatatgagacaaaattgctgacaggatcacaggattgggttcagtctcgatttgccgatcgaacccttggaagctgtgggctaatcacaggtgcatgtggcacacagtaaattgcactaaaacagagggctaacttgtcacgtatcgcaacttgcaacgtacagtacccttttgtcggaaaaagttaacctaaatttagatgcgatgtaaactaatacaataatctaaatatatatttttttaaattcattgtactctactgtgtcataacaaattctagtttatttgtttttcctttttgcgcaggaagtaagttctcagagcaagtttaacagatgaactcactatcacttatcagtctatcttagaggggcgaatgcctttttctcgtgaaagggagatgcctaatcgtatcggttactgtgtgatagtctgacaaccatatggcgtcccatgagaacaaggataaatcagctataaacttatcttaaaaaagagaaaaaatgcgttagctctcgtatagtaagagttaactctatacgtgttttaagataaacacattgaatgtataagtaagagaaatagtgaagagaagaaaatttaaaggtaacttaatctattatatatatatatatagtaaatttgtttggtgctccatggtgcccgggcaccattgttgaaattgagtatatacctaattcaaatgcaattaaaactttttcaattacttaggtattaacattaactactttactaacaagtttaaagcaagtttgaactgaatttgaacttgtttttgttagatgttgattctaggtatatagcatccatacatataattagttaggtatgtaatcatggattgtgaaataaagttaaatttgagttgttttgttgataagtataggtatgaatcaaattattataactaggtatatactcacaatttgaaaattttgaaaaatttgagtgattttgtgcattagataccatggtgcccgggcaccatggtgccccatatgagtgtcctatatatatatatatatatatatatatatatatatatatatatatatatatatatatatatatatacagtgactggaaagtatcaacggccaggcgataattacgataagttgatggctgcaagcagttggcctgctgccggattgctttcgatcaatgtcgctagacgctgcacctgattaagggtattcccaacccaattactatgatagtgtccaaagtattaaataagttgtcacctagaacaaaaaaaatgatgtggcaagtgaataaatgaagaaagagaaggaaaccatgtcttatgtaagacatggtttctacacaacattcaagatatcatgcgagataatagtgttgtttgcattgaaagagtagtctctagtactagtttcttgatgatgtggagtttatgaaaaccatgtctagtgttatgggttgggactgctctaatgacgtgtatagacgaaatctccgaaagcaaatgtatcatgacagttataaatatgagagttttcttgcaaaatcatgtaaagttataaatcctgcgaaattttcctcaactattaacaactgccatacgttgcaacaaacttatcatcttcgtttcaaaataaacttacagtacttaataaaaatgtgacacaatctagtacaacgaatctgagcatctctatccccatacaatgttagctataactacaagaggaggaccaagacaacggagagagatcccatatcaaaacttcaactcaatatccagttgaattagccagagaaaagctttcccaaatcttgtaactttgcaaataagagatccaaagatgaacacgacaggagtagaatgttacatttccgagcgatcgatctaaacctatatgaaccacatgtttcattatttttcttccaaccacggactcacatctgtacacatgctccctggctgaatccagaaaggggttggacatttctatgctattggaagtttggaactcaggctccggttgctcgatctcatcgtcgtgggcaatcaacgatgtttctctgtcagacatatagaagagaaagctctcatttttgcatgcacatttctcaagcgaccagacatcatgtttttttaaaaaatataaaaaatattttaaaatacatcaatttatattaaaatttaaaatagtaaaatacttcactaatcgtatgttacactgtaaacttagccaggtatcgtaagcgcgtggtaattggagttgagacctgagacgtggcatctggcacgcgaatgagtcacgtaaattggccttgtttagttggggaaaatttttaggtttggttatcacatcggatatacagacacacatttgaagtattaaatgttgtctaataacaaaacaaattacagattccgctagaaaaccgcgagatgaatttattaagcctaattattccatcattagcaaatgtttactgtagcatcacattgtcaaatcatgacgcaattagacttaaaagattcgtcttgcaatttacacgtaatttgtatattttttcctacatttaatcctctatgcatttgttcaaacgctcgatgttacagcgtgaatttttttattttggaaacttaaacagggccatacgagaaggaaaaaaaaaatccgcgacccatcggagcaaaaaccacaccggcaccggcaccgcgcgaacggccgcggctcgcgccacgccgacgctctcccgccacaaccgcgggattccccccccccccccccccaccgaacttacctaagcgtcgcctctcgtcttttttcccgtgcaacgttgcaagtgaaatcatcaatcgtgcgtgcgctgcgcccgaccatggagctcgcggtcagagcagccgccgcggcctcctgctcctccggcgcctcgctccagctcccgcgggcccgagccccgctccgcctccttggccaccgccgcctccccgctcgccgggtggctgtcgaggccgccgcgatcgccgtcgagccggtgagttttaagtcatttgatgttgccgcccctttgcctgacaggtgttcggcgttatgcggacctggcagcaggtcagctactaggtggtctggagctagtggaaatctcgcagcgattcttttttttttcttgcgcactgaggcgatttcttgcctctgctgtaaatggttagctgtttctatctcttctttgctataagtgcataggaggccatatatctgcaaagaagcttcgtagaatactgacaagatacattatctgtggatgatcagctgagaagttacatggacttatggacctataagttttttgagacttgagactagtgaccacttgggtaaattgggtttcgggtacatgctgatgatgactagcagtaacggggcacctacatataccatggtggttttgacttctgcttattcaaggtgcccacgtatgctggggcagagatgggcttgtcaataatcacattgcgtctgaatgtctgatgtttctcattagaccctgccctgctgtttgtgtgttatatcttggacttttggagttccaacctgacaataacgatagcctttttcgttctgtgtgaaactaaagaatttggctgtagcttctttgaagcaaaggctggaatgaattccattattaaaaaaaaaactgaagaattgattgtctctgtgttttacacttaataggaaaacaaagtaccgcagagtaacaattcagaagccgaggtgtttgcatgccctgtttgctatgagccattgataaggaaaggcccatcgggcataaacttgtacgtacaatttcatttctacattatgttttgcatgttttgttagattggcatttatgatatgttccttttatgcatgctccaggccatcaatttataggtctgggttcaaatgttcaaagtgcaacaagtcattcaccagcaaagatatcttcttggatctcactgtcacttctggaacaaaagaatatagtgaattgaagccagctagaactgagctgttcaggagcccactcgtctcatttctttatgaaagagggtggcgtcaaaatttcaatcgaagtggattccctggacttgacgaagaggttcatttctaggacattcccttcgttgtttgatatctcggcgttactaaataacaaagtctagccaacgtgacctgtggtgtaatatatttctgtttcaataagtaaagaagcaatgttaattcaccaagtgtttactatagaacataatcatttcttatgtatgtttttctgatctgttgttggtttcatcagtttcaaatggctcaagattatttccaatcagttgctggtggtgtacttcttgatgtaagctgtggcagtggcttgttcacaagaaaatttgcaaaatctggatcgtactcagctgtgattgctttggacttctccgagaatatgctttgccagtgttatgaatttattcagcaagatgatactcttgtaaacacgtgagctctcttcttcatgtctctgaatttcgttaatatcctttctgcttttcgtgtgagtacaaaaaattacagcatatgtcacacaaatgaaacaagacataaccttaaccacttctaacataaatatattatcaattaagcattttgcagagcatcactttgtctgtttgaagttactagtttatgtagtttaatttaatctatgcatcaattaccaggcaacacaaaaattacgtgattaacatccaaatgaactgcaattgacacagaattctattttctccatctggtgctttttaagacaaatactccaatctttatttagttcatgccaggtgcacaactaactgttttcctcttatgcttacacagaaatcttgctcttgtaagggcagatatttcgagactcccttttgcttcatcttcaattgatgccattcatgctggagctgctatccactgctggccctccccttcgaatgcggttagtatctgtccaatttgctctcatgattaaggtgactaatttggtctgtatagcagtattggagtctccagatttatgataatgaattgttctgtaaaactgtcatcactttaaactgctttcacctgaatctctgttcttctgctcctgtttaattatcaggtggctgaaataagtcgagtcctgaggcctggtggtgtctttgtagcaacaaccttcttatcttctcccaggaacaatcccttctctgttgaagcgttgcggccactgagacaggtaactttttctacttattttctgcttatctaaccctatgagcttatgcagtcatactcacattgctgctttatatactgcagattgttggaccagttaacaccagctacaattacttcaccgaaggagagctcgaagacttgtgcaaatcctgcggtcttgttaattacagcagcaaggtccagaggtcgttcatcatgttttctgggcagaagccgtagcctaaaattacatcaaaacctttgtagccaaagtatagctgtcaattctacaaaagtctttgtaaaatgccattcaccgatacctgcatagattagacccagcagaagtttttgcttggaattcctctccctgttatgaagatatagttgtcacatgtatactgtgcttcagtacagtgatgtaccacagccagggtgtatttcacacctggaagaaaaaaaaaacgttctagtactattttcccaacttgtatagggcctcttttggaatggaggattttttcaggaattgaactataattcctgtggaattcctataagattcctacgttcgaaagggccttaaatgatttatttaggcccataaactttcaatctagggtttataagtttgcaaaatttatattagtactacctccgtcccaaaataagtgcagacatgagtttccgcgcccaactttgatcgtctgtcttatttgaaatttttttataattaacaattttgttgttataagatgataaaatatgaatagtactttactcgtgacttatgtttttattttttttttcaaatttttttcaaataagacgaatggtcaaagttgggcgctgaaaattatggctacacttattttgggacagagggagtagttcactacaagtccaatctgccaaaaggttacatcaacatgttatgtgtgaatagcgaccagagttgagttgtgggactggggacaatcagaagacgggggcgtctaagtgtctactccctccgttcctacaatataaaggattttgagtttttgcttgtaacgtttgaccattcgtcttattctatttttttttcaaatataaaaaacgaaaagttgtgcttaaagtactgtggataataaagtaagtcacaaataaaataaataataatttcaaaattttttgaataaaacgagtggtcaaacgttacaagcaaaaaaaactttaaatcccttatattatgggacggagggagtaactattagccatgtttagatttggtgtttaactattagtcactcatatataaataacagctctcatgtgtctttgacataggggtccagtgacaagtgacagatagttaattgtcacaaagtggtaaatatttaaatctctcccagaaaagggctggagagaggtgatccgtccgcccatgggctgctataaaaagagtgacggcccatctagtgggaagattgggccctccaatctaacgtcggttcccaccgcgtaaacggcccagatctcacgccagcccggcccgcctgcgcccgcacc

SEQ ID NO: 4729 - DNA, 656 bp, Oryza sativa
ttcaggtttttgactgctggtttgagagtggttccatgccatatgcctacattcattatccatttgagaaccgtgaattgtttgagaagaacttttctggcaactttgtggcagagggattggatcaaacacgcggatggtttgtttcacttcatgaaatttcacagctgttttatacttgtgtctggtactaataattttagggtgcattttcttcttttgcagttcatttatgaccttggatgatatttcatgattatgtaccatgtattcttgtaacatacctatacagatcatgaatgatgaaagtggaacaattagttacacttaccttgaattcatttttgcttgttcagaaggcatgtgatgttattcatgaattattatggttgaccatggattgtctgtagtagttttgatagcagttttttctttcttcaataatattttacactttttgggagaaaaaacagtatcctatgctattttatgttttatctgggttaactggtagcaatgatctggtgttgattaaaagaattctgtaatgcttgtgcttttatcacgtttactttatgagattttggtgggcaaaaactaaattcagttcctgctaatgatattagtggaatccttgtgtattgtgttctaaaatg

SEQ ID NO: 4730 - DNA, 7501 bp, Oryza sativa
cggcagtggcattctctttttttttaatttgtgatgattcactgagatgtatttgactgagaagttacaaatttgtgattcattgtttggatctgtgatgtatttgagtaatttcttaggatattgtgatgtatttatttgtgtgtataagtaactttgatttgtgatgtagatttgagatgttacttcgatttgtggattgggggtttgatttggaatatgtatcccacgtgatttgggagaaaataaaaaagaaaaaaaaagaaaaaggggatcatctcactgccgtaaccctctctttagtcccggttggtgttactaacagggactaaagatctatttttagtcccgggtatttgaactgggactaaagatagcgatctttagtcccggattggtagtcccagtttgaaaaccgggactacatggggttgcgaaccgtgactaaaaagcatttctccaccagtgcttcctcctactctgaaaattcaaatatatattctcgactattctagaaacaaaagttaataagaggctgtgcctctgtggtggtactatgctgctgtgaaacatgtggaaattagtcaaacaatagtcttattatgtgtgacttctagtattcttatgcgtttggattagggcataaactgcagaggagccacagtgaagttgcattaggcccatctctacaccattagatgaaactccgtgaaagtccaatggtccagatcaggttctacagtaaaatacgctacagtacaccatctgacctgtcatactgagggttactgtttctacggtaattaggtggtaccccgcgctttgctgcggattcatagatgagtatatgttaaatattgtcgaaatgatgaaagttgaaatgttgagaaaatagtgcgaggaagatgatttgacacatacttgttgatctctatgatataatattatatatgacgtgtcatgtttgcatgggaattaaaataagctggaatagtaattgctagtgagtgaagatgtgtcatgcgtgcatggaattttaaatgggctagaatagtactagtgggtgatgatgtggcatgcttgcatgttgagctttagcttctaataattgttagtgggtaccaattatatagaaagtatagatctactgcagactagtatggctaaagactcaagacactgttgtaatagtgtctttctgctgttacaacaaagactagggctgtcaacgagcgagctcggctcctaagcacaagctcgagtcaagcctattgcaccttcgagcttttaggcaagctcggctcgagctcgttcgagctcgagctaagctaccgagctcagtaataagtagtgtaagatatattttagtgataatccattgataagtataattattttctaattaattaataaaagagtaaaaaatgattaaaataaatatattgtgctaacacatgctaatttattgtgtaaatagatactaattaatatatatatatatatatatatatatatatatatatatatatatatatatatatatatatatatatatccattagtttattaaatcaataaggtaaacaaacaatataaactatacgctatgtataagctcggtaaactcagtagaagctcaagctcggctcgataaagctcgcaagtttttgctcaagctcgggtttggctcgtttggagctcgaatcgagcctagaattagccaagctcgagctacttgcaagcttcgaccttttttgacagccctaacagagactattattatacaagttctccctcgtaatttactccattcaaattcatattactaacatatgtctaatttatactctctctccgtcctaaaatataagcatttgtaggatagtattaagtcaaacatttttaacttttaataattaataaaaaagattaatcatgtaaaatcgatgttactagatttatcattaaacgaattatcataatatgtaactctttttatttaaaacatcttatttttatagatattatatattgatcaaaatagtatctctaagactatatcgaagtctaaaatacttatattttagtacagaggagtttcgtatattttcagacggagagtaccagatgcgttcaggaagtcttgacattgcattgcatgtcgatagcatcgcatgtcgatagcagcttataaataggcaaccacggacaagacgagcttgcagctatctactgtagcaaccactgtaacgtgcaacacttcagttcagcagcaaagcaaataaaaacaacacaaagcttctctgttctttctctcctcacgatcgaacaccatggcggcggagctcgttcacctcctccgctatctgttctcggtacccatgctgttcttcatcgtccccctcctcttcctcgtctgttcgccgcggcgccgccgtggccgcggcagctgcaggctcccgccgtcgccgtgggcgctcccggtggtcggtcacctccaccacctggcgggcgcgctccagcaccgcgccatgcgcgacatcgcgcggcgccacggcccgctcgtgctgctccggctcggcaggctccccgtcgtcgtcgcctcctccgcggacgccgcgcgcgaggtcatgaggacgagcgacgtcgccttcgcggcgcgccccgtcaaccggatgatccgggtggtcttcccggagggatccgagggggtcatcttcgcgccctacggcgagacgtggaggcagctccgcaagatctgcaccgccgagcttctcagcgccaggcgcgtccattccttccggtccgtccgcgaggaggaggctggccggatgctccgggcggtggcgtcggcggcggcgcagacgacggtgaacctcagcgagctgatgtcggcctacgccgccgactcgtcggcgcgcgccatgatcgggcggcggctcaaggacagggacacgttcttggcgatggtggagcgcgggatcaagctgttcggcgagcagagcttgccgaacctgtacccgtcatcgcgcctcgccgtgctcctcagcacaatgcctcgccggatgaaacggcaccgcgagagaatgacggcctacctggacgccatcatcgaggagcaccaagagagcagagcgtcccgggaagacgacgaggacttgctcgacgtgcttctcaggatccagagagaaggtgacctggaggtatccagagaaagcatcagatcaacgatcggagtaagtaccctgaatccataaataaagcgtttaagaaaatttcaagtgttgcaaacatatataaatttcaagtgttgcaaatagacacaaataatggaatttcgcgacttcatgtgttttttttaacagtgatgtcaattaattaaactagggtattgctctgcagtttgcacgaatctagataattcacgtagagttagatataatatatagctctgaaattttatttctatatatactagaaaaaatacccgtgcgttgtaacgggtgaagtctattttaatcttattattgttatatggtttagttaagataaaattcgttatgagagtttgcttggatatatatatatatatatatatatatatatatatatatatagaaaatcatgagctgcaggtaggagcaggggaggatccaacatgggtgcagggggacttgagtcccccaacacccaccagacccatggatacccccctgagttcctcctaaaattttttcgtcgtggttgataagataggaggtgctaaaggtctcttaataacattttagcatagtttaatactgagattatgtgtttatatcggtgtacacggtatgttgagtcccccaactttttgttcctggatccacccctggttaggagtccgatcgtctcaggttagcatgtgagtttttttaaacagatttcttatatgattccttctgtattatcaaaagtgaatgatcttaaaaatgactcaaatgcggatatgtattttcaaaagcaaacaaagttaaaaacagactcatacacggatggcgtaccatacaactcttacattctatttctataggcttaaatttcatatacaacccttaacttatatttctatagatgtaattatattttgtatacaactatatcagtcaaactataccattataattaatctgaaaccaacaaaatcgggtagttaagatcattttttttattaatgaggaagtttctagcatttacaacagacgtgatgcctcacttcaaaactgttttaataatataatagattgaaaaaattgttgccattgcattttccatgaatatatgcttacaagtaatgaaattttggctttgtatcgtgtaggacatgttcattgggggcagtgagccaccggccataacactgcaatggattatggctgaactcatcagaaacccagaagtgatgcaaaaggtacaagatgaggttcgacaattgcttgttggacagcacagagtcacagaggaaagcctaagcaaactgggttacatgaacttagtcatcaaggagacgctacggttgcaccctccaggaccacgactactattgcgagtgtgccgaaccacttgccaagtgttaggatttgacgttcctaaaggaacaatggtgctggtaaatatgtgggctataaacagggaccctaaatattggagccaagcagaagagtttattccagagagatttgagaatgctggtattaatttcaaaggaacaaactttgagtatatgccatttggagcagggcgacgcatgtgtcctgggatggcgtttggtctagcaacgttagagctcgcacttgcgagtctcttgtaccattttgactggaagctacccgacggggtagagattgacatgaaggagcaaagtggggtcacaacacggcgagtacacgaccttatgcttgttcctatcatccgagtgccattaccagtgtagacgcacgtagctgctatctacgagttattgaaggggaaaatatatagtgcaaacctaaaaactagcataggatccaaaaatagacgtctaagatttgtctacatcacacggagtaaaattttcactccaaattttaaccatgagtaaaagttttactcatggtgatgtatatggataaatcccaaacatccattttttctattgtacggtaattttcaggtttgcactgtatatagagtttgcgctacatatttggatattccccctagtgaagcaccccaacatctttgggcactactgttcatataataagagtttgaacccaaacaattaattatttttggaaccagttcaattggctgtgcaacttacatgtgtaggccccattatgtatttgaatatatagttctatttgctattcatccttatcatttgtttatatatagttttattatcgtctcttttccatacggttctaatggtttgggactcttttcgagtgcacttatatttttcatacggttgtaatgtttcgaaaaactatctaatacatacaacaaatcaatctacatatgcaattcataattatacttccttctaattaatgtggtagtttctatcgccttgtgtgtaatttgcggagcccaaatagctagctgatacatgcaggggatcatgtagttcggttgagctgctaaccacagatcttagatctgtctaaacgttccgttcgaacttgcgatgaatgaacattaagtacgagcatacaaaacgataaatgcattagctcatgattaattgagctttttatttaaaacctaaaaatagatttatctgatattttaaaaaaaaatttatatagaaagtttttgtatgaaatatattgttttatcagtttaaaaagagtgataaaaaatcaagataaaatttgtatcttaacgcgtaaaaaaaagacataagtccgctaaactttgtcgcgaagtttgaaggaactctgaactctggagtcccctaaactttggttagtgaatggaatggcagaaatggagggattgctagtggatggtagatggagcatcaagaaattacttgaagcgttcaggtttgcatattttaatggtagaatgtaattgatcatgcatacatccacagtcaaatggactgagaacccaaacaacggttttcattattattattattattattattattattattattattattattattattattatcattattattattattattattacaaatggaagtataactttcggtctatgcatcaaccaagaatacacacagccatatttcggtaggatttcaacttggtaaataaagtcaccacatcgatggtagatttgcaaatttcaatcagtcaagagcggatctagcgtgggacggtgggggctcgagactcctactggcaataaaaccatgagagctcccataaaaccctcactaatttttttttatcatagggtctgttcactttgccaccatcactttcagccctaccatttcttttgttactaaaatttggtaaggtaacaaactaaacaaactcttgccatcatcactttactaaaatttggcatttcctaaaacttcttctcatacaaacactagtttagtaagaacacatccatcatatatagtcaaaatttgagaacgccaaagtgtgccaaaaatttaacattgtctagcttattcaaatccctagctcactattttttcttggatctgtcactagtcacatctaaatctgcagcctgcaaaattctgcaataaaaacggtcacgtttttaagtgttctgctatgcagaacaattctccgagaatactgggtgaaagcgtatatgcaccaattacggatgcaagctggaagatactccaaaaacagatctgggcgtcttccatagtttcagaactgaaacatgaattcgatcagacatgtcatgcccagtctctgaattctgatgcctcaaatcactcactacatccccgagactaaaatctgccgcagtgctgccccgttggcccaatcctgtgcaggcccaaaaactttgggctgtaaatcttggtctccatggaccaacgagaccaccgtgcggtgcgcccatgcgaaaattaaggagccatatagaactactacgtcggcagcgataactgcacgtttgtggcagatccagcggcggccctcctccacgcggatctagcggcggctgcgctcccccgcaccgatccgacggcggccgccctcccccacaaggatccggccctccaccgtcctccctggcgcggatccggtgacagagggtgacattggtggtagggtggcgaggcgaagctcgttgactgctatagcgacgacagactacggcttgtgagcacgacgacagcattggtggcggcgacaaagagctagggattgggctagcggcgggctatggtttctgccggtggcaggctagggctcagggatgaatcgaggagctaggggtttcaaatttgattttt

SEQ ID NO: 4731 - DNA, 3678 bp, Oryza sativa
tgtccccgccgccatcgcgctttgagattcgtgcgactgacgttggaggcccgtacgtggcgcggatcgaggggaatcgcccccccccccggtccctggctggactccacctctccgcgacgcgctcctctcctggcgaattttttgtttatttatatttgggagtaattggctgcgctcagctccggtccagcgcccggcgaattccaccgttagcgtcgctagggtttcggtggcctgcgcgcccggcggtgggggggggggggtctggcggtctagggtttgcggccgcggcttgcgccgtcgcggcgcggaggcgtcctcgtcgttgttgttggtggggcggtggcggaagccatgggcgacggcgagcgccgcgaggacgagaacccgaccaccagtgccgcaggtaagctcgattccacggagcttgttgccttttggtttggtttctgtggtcccgcgacgcgagcttcgatccccgggtgggactgtctagggttgtgaattgctgcgacgaggaggcagggttttgatgcgattcggtccgcgcgcttgtgtacttttgtgttttttctgtggccaggcttacacattacgctgtaaattcggtgcctggtaatgaaggttggatttgatgagctgcagatttgctgtctggtgtcctatatatatatgattagatgatcatttttttttgaaagtttaggaggggtttggacaaaagctgtttctttcagcaagctccccgtgctgtcttatcaattgtcatgaactttctaagccctgaaggaataccagcatgctagtatcttttactatataaatagttatgtattctttccgttttgaattgtgactggatagccaaccaatctgggtaaaacgagatgcccaagatcatgcaactattgccacaactgattactatatatatatattcattttagagagcagaattccatgtccagttgtactccagtttcctcatctaaatatggaattcataatacatatagtaatgatgaattaaaaaagatcctttagctggataagggcatactttagccaagtgaattttcaatgcagcatgcatggtgctcattcctgtgtctactagggaagtgaagctgtagaatgaaacaacggactgtctaagattctcaattgccaaaagatcacatgaaccctctgagaatcgtttatggctgcaaagcaacattcttctgtttatacatgttgcattacaagagtttagcatcattctgcgagccttttttatcagtctttctaagttccgaatttgactttgttgatgagatgtcaattctttaaaatctgaattcataataacaccatctgtttttgtggacaataattttaggatgtgagttgcagtgtggggatggacaaaattgcttttaagttttaattgttttgtccttttcttctacaatctggattattgatttgccataataattgatgagtgttgattagacttgatcaattagtactgagttaattgatccaaccagttatgctgttgctatttttgttatcctttgcagatgacgatgatgatgaggattatgatgaacctggtggagggaatcacttcttgggcttcatgttcggcaatgttgatgattctggtgacttggatgctgactatctcgacgaggtagttgaacaatttttgaaatggtggaatatcctttttttgttacatgtttttttaataaaaaaatatcatgctgcctctagcagatatactgcagaatatgcatgttagttagcatttctgtgtggataccctgtgatttctcctagatgatatagtccagtaaagaacttgttaggtgggaggcaattttttatttgccactgaatgattcacacaattcctttacactgagatgtggacagagtgtgcaaattaaaggattgggtaaatttacagcagtgtaggaggaatatatgcaaaataaaaagtttgctcaatgtaatattgatgtactccctccgtcccaaattataaggcctatatttttttacacggtctacaatgacatactctgaccattaatttatttcatattatgttatcaaacaactataaaataagtatcacaataaagtattttaaaatacaaatataatgatataacatgcatcatacttagcatagatatagctagtgtaattattagtcaaaatttattgagtttgattttccttgatacaaggacgccctataatttgggacgtagggattattgttttggcagtatggatgtagtcctttcatctcaccactcaccatcataagttaatttcttggcactacagcagcatggacctacctctaatggcggtccattcactacattttatttaacatgagtcctttatttttttccctgaacatttaacttttatatatttttctaattagagttaccaatttcttgataggatccaacataagtactgagcatcttataccccacaaactaataatgtgtcagtattgattttgttaccacacgtccacaccattggatagagttagtattgtatacaatgaaataagttatagccgcatttctgttgtatcacttctattttccttgatttaccaggatgcaaaggagcacctttttgcactggcggacaagcttggcccatctttgaaagacattgatgtatgctatcttataatcattgttaagttaatttgacttatattttccttgtcaaacaagttaatactgtcgttttcttatatagctgatcaagccttctgcagcaccaactgatccttctgagcaaggtaaatcgcaagttcgtaactctataatgcatatttttattgtttcttcgcctaaccctgtttataacaattcattattttctgccctttctggcagctccagtttctgttctataccaaatcatataaaataattgatgcctgatccttttactgtcctgtagactatgatgcaaaagcagaagatgctgttgattatgaagatattgatgaagaatatgatggacctgaagttgaagcagctacagaggaggaccatttgctatccaaaaaagattacttctcttcaaatgcagtttatgcttcggtcaatagtaaagtttcagtgtttgatgaggagaactacgatgaggatgaagaaccaccaaatgataatgatttgcctagtgataatattgtgcaaaactgcacttcaggtaataatggagtgcatccctaactgtactttaccttcattgttctggtattagaacttgttccacttcttctctctcctttcactgacacttctctccctttatctatttaattgtagcttcagctgagcaactggatatggcaccgtcaaatgacaaccttgctgttgaaaagatgtctagttcgttatcagaaccagaagaaagttttgaaagtgaagcttttcaggtatttttgctgttttttctttttgtagaactgtttccatccctcttgaacaaaactggatagccgcatggcatgtatagttggaattattgtcaaaccagaatttagttcatggttaattgtttttgagtatctctcctgtcacataaaaaaatcagtttaggtttgggaaatgtttgatgagacaggagttttct

SEQ ID NO: 4732 - DNA, 71099 bp, Oryza sativa
  unsure (1)..(71099): unsure at all n locations
tgaaacaaattacaagaccaagggtatttgtttctaatgcccccaaaacatgaggttttgtgaaatttgctctataacaaaagttgttggtgtagttttgggtttctctagcaaatcttggattctagcggggtggctttttataagtttcaatagcctatagttattatttgatggttttgcatgttctattttgagaatctttgattcaaaggaactactttccgtagaagttggaacttcttattgtaatttaattatttctaccatgacattcttgtataataaatgtcactagtgtggttcgggtttctctagcgaatcttaggatttgagcagaatgattttctatatgtttttcaatagtctggtgttatttttttacagttgtgcacattttgtagtgaatctatcattcgggcagcattactttccatagaagtaggaggatgtggttgatatttaatggttttgggatgagtttgttgtataataaacgttgctactgtggttttagatttctattggaatcatggattcgagtagaatgactttccataggttgcagtaggttatcaatgtttgtttttgaacttttctttagtgaatatcaactccaagtggaatgactttagttaatgcacaattcgtttttcgcttttccttcaaacggttgcctctctgtggtggcctggtgggggtccaccaacaactaaacttaaacaaatcttattctattttgatcctcccttatttcaatgttattaatcaattgctatatgcatggaagtcaataaaaatgtatgtgcataccacatatgcagattgaggacatgatagactataacctaaccgtgtcataactcaatttgtcaccagtgtggattgccaacggggtggcattgtttagctaggaattgtgtgtatggaatttgagcgcatggagtactaaaatatggattgccacaattgcaacaactaatcaaacactaactcagtagatttgggcaatgggtggcgccatgccgccatacaaccaaacaaaccaataaataaacggtcttcttgctaaattaaaaaaaaatacatagatgtcactttggcatcgtgtgaacgagtcaataaataaacggtctccttgctaaattaagcaaaagatgtttattttatagtccaaaaaatgcttagatgtccatttaggtgagttcgcagtttcacacagaagagctcaaataaacgacttttttcacttcttaagcctgcacatattacttaatgcaaattaaatcagatgctattagtcacaggtataatgggagacgccttgcatagtcaaccactcatgttcttactccttaatagttgctttcattatcagttggaattttctttgtcaaaaggggaaaaaggacttgtaaataactagctcgtgcaagtgcaactcatttttgaacatgttggcatgaataattgtttgtgcttgcttggtatgacttgggaccttggtattcagaaaagaaatacaaagaagatacacaaaattacaatttgatgaaacgaaacagaagcatgtttgcaagacctaggagatctcattctgcattcctgttcactttgaggtagggcagtgcgcccgtcacgttgttgtagtcgctcttgttaacttggatctgcgagaaagataacaatgttctcttagagggcggtagacaatgacaagttttagacttccagtgaagttgtccttgatttatgatgacacttttaggacttcagaagctactaaaatagactacacccccagcaaatcattgttattttcttattgtaataatgtttcttttcagccgcttaattaccaaacattggtgatacaagtagaacagatgttgggcctacaagaaagcttcctatctcaaatttagtgtagggtgtgctttactttaaggatccgagaggtaagaaatgggaagactgaacttcaggggggaaagaccaaacctctataaaataatatggagactcagttacagaagaagtgtacaaaaatagtggacttcatttcgacaaaacactccaatgcaaaatgtgtatgatgcatttgcacattattattagaacagaaaaatgtaaaggacacataccaatcatggattgatatcaaggggagattgggatagatgagcaattaaattatcaattgctggtatgtacttttgcgtgtgcacactaattataacactcaacctactgagcttctaatattacaacaaagtttatggctgttaattatgttgtcagatccccaataatcaaatggataagacattcgacaatcttttaacttcccaaaaaatactcaaagagcatggcatattattattcagcaatttaaaaatatgctaatattaagtaggacttagcacaatagcacatagacataaagaagtggcttctaaaaatattttttgttgtaagaactaatagtggaccatgaactctgaaaaaaaatgagtgaaattactaattagttatcgcgaacagcagagctgaacacatcaaagtttagaaagaagctacaaatgccactcatttgattcccatacaatctagaatgcacagatatgtgacccacaatcagattcagccacataggtactaggagacagctatgcatattgccccgaaattcacaaatagaacatcccaaattcggcgcattccatagcaccatgagctgaaccacactcactcagtcactctcacagtctcacttagcaatttagcattccacagctcacattgcaatccaatccaaaattaagcataggaacaccagcaaattccatggctagataagctggacaactagtagaccagaatttgagctgcactgtatctggattgcagggtggtggggggagaagagaagaagaagaagcataccatcttggatagcctcttcctgcgcttggtgttcttcttgctgagaaggtgctgcttcccggcgcgccgccgcacgatcttccccctccccgtcacccggaaccgcttcgccgacgcctgaaaaaaaattcccacagaaatcaatcagccccagcagcagcaatccacaccagaacagcaccaaccaagccgcgccgtaccttgtgggtcttcatcttgtaccccttccccgccgcgacgacggcggaggcggacgacggcctgcgacggagcggcgacgccgccgccgccgacgcgggggagaccgcgacggccgccagcggcgcgccgaagaacgacttggcggggaacgcgagggcgccggggtggagcttcctgggggcgcccccctgctgctgcagcagaggcgggagcgcgacgcgcgcgagggagagggacatggccatggctcgagggcactttgctcacgcttcggcttgcggtggattggatgggcgagcgcgagccgcgagcggatggagaggatagcgtcgccactgcccactggggggtagcgcgggaggtgggccgtgtaggctgtgggccgcgcgcgctacgggagaaaaaggaataagttcatctggtgtctcttaacttgtcaaccaatgcgtcgtttaattgtcaaaaccggtggtttggttttagcttgcgtggtttatttgactggtttttcatataacgtggtatttacgtggcaatttgatctgaaaaaaaaaacctataaaacccacatgtcagcttcacacacacaataataaaaaagaatagtggggcccacataaacccctggtctcaatcccttcctcttcttcctcctctctccccatctcccatgtcttcatctctctcccctctcatccctcctcttgccggcggagaaacggacggcttgaagacgcagcctcctccactctcgccccccatgggcctactacaggcatccgccacccctctcctcgtcgcccgccacgcctgcctccaccgcctccggatgttcctgccgtcgccgccgcttccccctcgcctcgacctccggtggccgttctccagcaccgccttttgcccccgcgccttcctcagaaacggttgccgctcttgccttcgccgggcccccgtcctcctcagtgacacgcggccacctccccgtctccgttgcttcctccaacacacgcgccacgtgactgcaagggtatcgcccatgagctgcacgtcggcagcagcttagagccattccctagccatgtagctgcatccatggcgctgacagtctggtcccgcatgtggctcctcttgctcagatgcacctgcgaccagcggcagaggaagcaggcacggtggctgtcggcggtaagcccatggggacgggagtggaggaggtcgcgcctccacgccgtccgcatctccgtcggtgagaggagggaggagaggggagagaggtgaagataggtgagatgggggagagaggaggtcaggaggaagaagaggaggggattgagaataacatgcagggcccacatgggtcccaccattttttattattgtgtatgtgaagctaacatatggttcccacgggttttactattttttcggatcaaattgccacgtaagggccacgtcaatgccgcgttagatgaagaccgagtcaaattagccacgtaggcaccacgtcagctaaaaccgccgtccaaacctccttatgacctatattgcaccggttttgataattaagggacctattatatctgattttctggttgaaagacgaaaatcggattcgtcgataagttaagggacctcagatgaacttattccgggagaaaacgagaaagaaacaagtccacatatcgcctctcagttttcgtggagtttaattgacatccctaaaccgtaataccaaaaatcttcaccccttatacagacgaaaccggccaagccaagttccatgacagtacggatggttggttttgggctgacgtcatatcttagtcagcaaaaagaaaattaaaaaacatgtggtccacatgtaagtggacctcctcctctcctcaactatcccctctcttccccatctctccacctctcccctctctttcccaggagctcaatggaggagagagtggcagcgactggcaagcccgtccgcgggagacagcgcggcggtgggaggtcggtgatgagagggctcttgtggaccatggcagcaaaaggagaagaggagggagatgagggagtcggcgagctctagctcaccgacagtccatgggaaggtggcggtgagcagtcgaagaggatagagggcaatggtagtctgcgatgacggaggagaggacccgatgccccggtaactccgcctcgggtgctcctgtacgtggtcctgtgacactggggatgggctcttccctaccgctaggagtggggcttaccgtcgctgcctgattatgtcgagagtgagaggaggagccgctaggttgaggaagggatgccacggtggtggcgatggaaatcaagctcgagcggtggtgtcgttgccatgtcctagttccagccccaagccactcacgctgcccgactcgctaggtaactcctatcatgcctcctgcggcaggaagcgctccacatcgagtcagcaacggtagctcagcccgattcctttttgtcgcttctcgcctacccgacagctcgacggaggcggcgagctgatgaggttgaaggtgaaaggggaagagccaacctggatgacgagctcctcctcctattcggaagctgaggaagtccctgctctatacggatgtttctacttcggtttggcctctgtcaccaccatggcagacccatcgccgcactagacctcctcgccttgagctgcttcctcatcaccgctcctggttagcccccacttctcaatcaccgctctctagcaacgtgctcgatgcatcaagctccaagaaccaaagggagatggagagaaaatggagatgagggagggagaaaatgggaggagagcgaggattatatgtgggggctcacttttattttttttcacgtatacgcctagtcagcatgagtggaccgagtcaacttgttatgtcaatgaaaccaaccatctatactgacggatgatcttaattaatccggttttgcaagttggggttgaagatttctagtattgcagtctaaggatgccgtttaaactcgacgtgaaggtgatggatggcaagcaaacttattccaaacgagaaccaaaattgctaaaaaaaaaactgtcgcaagttttataggaaaaaactttcaagtgtaactatagtatagttatagtgtaactataatgtaaattcactatagttacattgtactccctccgtcccataaaacaaatctaggactagatgtgacatattttagtacgatgaatctggacagatatatatccagattcatagtactaggatatgtcacatccggtattaggttggttttttatgggacggatggagtaatttgtaactacaatataactgtaactacattgtaatctctatataagttagatataaagttgcgtatattattttaatacttatatacaagttaatattatagttacagtggaattatattacaattgtagtatagttagatttgaaagtttttcctaaataacttgcggcggttttttagacgcgcgttttcgcggcccaatgggctgactgcccggctaactcccgtggaccatggcctggtttccaacgcgtgagttgtagtgcagcacaggcaggcggcgtgggatagctgcctgcctgcgtcgtcatcactgctggctgatgcgcagtgcggctagcatagctggttcggttacatgcacgccatgcatgcgtgcattaatcagcagcagaaaagcttgcgtcccccaactcatcgatccccactccacacatctcccttccatcgatcgatagatcagctaatccctcgcataaatcctcgatccggccggccggcggcttaattcctaggttttcctcctcttcagttcttcctcatctagtccgtccgtccgttgtcttcttccaagatcccagacgatgcaagcctcatcggcggcggcggcggcggcgtgctcggctatcaagccggcggcgcatcagcacaccgtgcaagtccaggaaggtaaccggccgccgccagctgacacacaactcttttatactgtcttttgttagtcttgttctttgattacttcggtttgatttgaggattttctttaacttgggtgctgcagataagaggggatcggaattcagggctcggtttggaacgaggaaactgtcctggggaggtatacagagattcgtgttttcgttctatatttagtatgttttttcaataaaaatcaacattccaggcatccgggttgggttgttcgtagatcaaatccagctagcctagatgcaccacaaatagaagaagatgggggataaagcataaaaccttaaaacatttgaactgcatgcgcatgataattgcaggatcaaacatgtattcaagtttttcactatgaagaaaaagattgtacatttgggttcctagttctccggaagagtttcaggatcttgcgatccttttaattgtatagggcggatctagcatgaaggcggtagagtctcgagcctccactacttacgtgaggaccatgggagcccctgcgaagcccccactaaaattattgggtttgttggaaccatgacaccctatatttgcaaaatttgagatatgccacccgtatctcaatgacatgtaagacccacatgagtcaatgacatgtgggtcagggtggcatatcacaaattttgtaaaatttgtgtggcatggttcaaattgtcccaaaatttgcaaatatagggcattactgattaatatgtcctcaatttttcagccactaagttttagaagaattcgaaggtgcatatttctgaaatgaagtttatcctaattaacaaattcatagttgtgtccttttcagtaactgtattttttttcctcttcttttaggagaaataaaataccttgttgataaaatggatgaataatttagagatgttagtgtgcactttcccccatgaaacataagttgttaaaatataattttgtccaaagtgactaatgtactaaacacttgtcctcaattacacattacaggtaaattgtcggtggaaaattctgctctacaccagtgtcaaaggcaagcactctcgtaaatctggggttaatattttcgatagcccactatgacaacttcacaagtaaaactaagtgcaattttaaatgctaccagtctcacaagaagcataaggaggcaaaaaagacaacattctccagtcctccaagtgagatgctatgccattgctggtgatcagcacgaatccatcgccactgagtttgaagaaatttgcaaagaagttccccagaaactgggagctttttatcggttttgccgaccccacacaatttttggcactgtgagtttcattcaattttgtatggcagtttcggatgcatgttgtctagctactgcttattgttcttggattgtttgtcagataataggaatcacttcagtttctctcctgccaatgaggagcctagatgattttactatgaaagcattatggggatttcttgaggtatcatacataaattttgtaatgaatgctgtgctcaagagatgttttaaattaaattcctgatgaaccctgtgctcaacagatgcttaaagttatcttcttaatggtctatagatatacaacagccatttatttttccttatgtgcaggctttatcctcttctttatgtatgaatatctatgttgtaggcctgaatcaactatatgacatccagattgataaggtgattttttacttgctgtttgaaaacattttcttctatcatgtgatatgtagtatcattgtgattaaatcatacttctttttggaggtcaataagcccagccttccgttggcgtcaggagaattttcagtggcaactggagcagtgttagtactcacgtccttgatcatggtatattaggttcaacgccaggaataaagaatcaattattctagtttgaataaaacaggttttatgtcaatacaccttcctcacattttgtttccttttgctagagcattgccattggaatcagatccaaatcagctcctttgttatgtgctttgtttatcagtttctttcttggaagtgcatactctgttgatgtaagtagtttttaccgagctttgtaagtacaaatggtgttccatgatcccatctaacatataaatacttgtattttcaatccatcatactctttttttcaggctccgttactccggtggaaaaggaacgcgtttctcgctgcatcttgtatactatttgtaagagctgtcttagttcagctagctttctttgcacatatgcaggtagtacaaaacattgtttacatctcaagttcaaattccttatttccctttggttagtattgaattcttcttgtaacagcaacatgttctgaagaggcccttggcaccaacaaagtcggtggttttcgcaacattattcatgtgttgcttttcttcagttatagctttattcaaggtaaatgcccaattatgttgactatatgttcacgtgagatcacaatggcttttcttcagtcatagccttatttcatccatctcttcaaatatcatcactgggaccttttctgaattttcaggatattccagatattgatggtgacagacattttggcgtcgaatccctgagcgtacgtttgggtccagaaagagtaagaacatatccaattctaccactggaaaacaaaataatggttctacatgtcattccagatttaaaaatggtgtaaaatcctatttttatctgatttaggtgtattggctctgcataaacatactattaacagcatatggggctgccattttggctggagcatcatctacaaatctatgtcaaatgattatcaccgtgagtgaattcttcacttctgaaaagaagaagaaaaattgttcatttcaaaaaaaaatttccccagtttgaaagttgagaagtccttttgctgttgcattgataatccaggttttcggccatggcctgcttgcctttgcactttggcagagagcacagcactgtgacgttgaaaacaaggcgtggatcacatcattttacatgttcatttggaaggtgattaatgatagtgttctagtttatacgatgaattttgttaaccaattaaacattggtaatgttaatcatttgcattgtttgtattccttgcagttgttctacgctgagtatttccttataccatttgtgcagtgagcactatatacacaagggcaagaaatttttgaccatgcacatgagcaattatatgaaacttgctactgtgatggcagtctgtatccaatgctttggagtgtgctgcaatatatgcaaatgtggataaaggcaattaggagcatacagtttagagcatatactgtacctatgtagctgctgacctttgagtaactgttgtttggagaagccatctcgtatcattgggttttttttctttgttgggctatctggctggtgagctgcatgtcaaagaggaagaaatactgacggtgggtgatttgaaatgcttcccagtattcatgtgtcaaaagatatcacaatggcaaattgtcaagcctgagggaggtggctcaagagatactactccatcccaaaatatagggtgtgtttagttcacgctaaaattgaaagtttgattgaaattagaatgatgtgatgaaaaagttagaagtttatgtgtgtaggaaagttttgatgtgatgaaaaagttggaagtttgaagaaaaagttgggaattaaaccaggccatacttttgtagttttttaacaaatattaaggaaagtggtaatgggggaattttgaacatttcattgctacaaacttaaaatttaagtgttagaaatagctatattttggagaggatggagtagtacttattagtggatatgtgcaaattggaattagcatctcgaattgatcataagttggatgactttttcaactattcggtgtaaaaaatttgaagggaaaagttttgttggttttaactcggaaacagtaagtgacttgaaaaacaaaactactagaaagatgtaaccaatcaagttctttcatttgaatctaaggccgtgtttagttccaaaacaattcttcaaacttccaattttttcatcacatcaaaattttcctacacacaaactttcaactttttcatcacatcattccaattttaactaaacttctaattttagtgtgaactaaacacagcctaagaaataagggtgcgctagttccagtgggcaacttctcccgccacatcgtttttcacgcgcacgtttcccaagctgttaaatggtgtgtttttttaaaaaaaatttataaataaaagttgcttaaaaaattcatattgatccattttttgaaaaaaatagctaatacttaattaatcacgtgctaatggcctgctccgttttccatgccggagggattattccccgtccctcactctcgatcggggcctaagagcaactccaacagagtggctaaatggctctccaagctaaattatagctaagatagaaaaaaaaaatctccaacagactctccaattgactagccaagccatccggctggctaaaaatcctatggaactggccaaatgtggccagccacacccgctagctaactgtgggccccacgcactatccctcccacatgtctcgctctcctcttccttcgctctcgcctcccgcacagcccatcgccactgcctccgtccccggccacaaccgccgccgtcgcctccgtccgtgtccacatccggcaccgccgcctccgtccccggccacaaccggcaccgccgcgtccactgccgcctccgtccccagccacaaccggcgtcgccgcctccgtccccgaccaagtccggcgccgctgcatccacccccgcctccgtcccagccacaaccggcgtcaccgcttccgtccccggccacatgcggcaccgccgtccgccgccgcctccgtccccagccacaaccggcgtcgccgcctctgtccctgaccaagtccggcgctgccgcatccaccgcggcctccgtccccaaccacaaccggcgtcgctccctccgtcgcgtccctccgccggcgctgcccctccgccgcgtcgtcgtccactgccgaggccgccgtgtcgtcatccccctcccctctcctctcctctcgcctcgcctccccacccatggtggccacgctcctccgccgtgcgctccacctccaccgcgtgctcccctgtcccctccccttcctgcgccggtgccctcctactccccgtcagcgtcctcccccgcctggccgcccaccgatcgattgatatgtgcctccgttgctctgcctcctccagggccgccgcgctctcgccatccacccagccaccgccgccgccgccgacgagctcgcctgctccgccctccgctgctggcccgcttggcctaccaaatacacgcccaggcatgccgacgcggcctgcctgcaacctgttcgacgaaatggcgcacaaggatgccgcctcctacacagccatgagtaatagaggctgacgtgcgggtcccagtgtcataggctcataatggggagtgtagatggagaggttgttggagtgaggaataagtttggcttgccaaatcaattggagagctagctatatagatgtttggagagtccaatttagagagactgttggagatgctctaagtaagttggtgtgaaatggaatggagaaggcccaaggttctgaagttggttctgatttctgagaatcaggcttatgccattctggttgggattacccacaaaacaagtatacagtcccttctgttgtccgggcatacgtccctctcaatagagtggaccaacaacatacacaccggttttagggcatgtttggagcagcttctagcagccgcagcttctcacataatctccagcttctctaaacagtttagattgtcacctagattcttagaatctgtagttgtataatacagaaaatgtactagaatccaaaagctggaaaacccagcttcttcaaattctcaaaagctgactaccaacgagcatattctcaaaatcttaaactcccttaagcagcgccttagactggcaggaaggcttttgcctcatctcaaatttcaacttggccaaccttggaaacaaaaaaacatggcgtaaaatgcaactaccttgattatatatactccctccgtcccaaaataagtatagttttgcactattcacgtttaacgtttgaccgttcgtcttgtttgaaatttttttatgattagtatttttattgctattaaataataaaacatgaataatactttatgtgtgactaaatatttttaaattttttataaatttttcaaataaaacggacggtcaaatgttgggcatggatatccatggctacacttattttgggacagaggtagtagtatcttgtcaagtggcaatattttttagataaagaaatagttcggaattagtactatcacagtcacaataagtcataatgacatcgtgtcaaaaaaaaagtcacagtaatgacatttgcccggcatgcaccaatcctcctatacatgtaaatatttttctttccttagtcattcgtttttcactttcgccgttgtacaggagtaaatatcacgtacgggaagctggtgcatttattagtggccatccaatcaatcagccaagtttttttcaaaaattacaactgacggtatcttatgtcatttccaacccaataattaagatgatgtccatagcattagctgccacctagaatgaaaaataatgtggcaagtgaataaatgaggaaagagaatgaaatcatgtcttgcataagacatggtttttacacaacatccaagacatcatctgagataggtggtattaaatttaagtatgaaataatggtgtttgtattggaagagaattgtctaatactagttttttttttgatgatatgaaatttatggaaactatttatagtatctttgattagaaatggccatagatttgccgatcactgttctttagagtatgcacgtacgtacacaaaagcacatgcgtggtcatgatgcatggctcccacaattttcaaacattgtcttgtacaataatattccgagattgtgaagtggtcgttgattgtgtacacgacgatctctcggtggccataaaaattttaaattaatccagatgtttttattattgctttctatattcaatcttagcttttaaaccactcagtataaaagttactccatccttcacataatataagaagttttaagattgaacacggttactaataaagtaggtagaagtaagtggtggagggttgtgatactggagatatgtgagaaaagtgaatggtggagggttatgattggttgtgaagagaatgttggtgaagaagttatattttgggataaatcctgagggctaaaaattgttatatttaggacggagggagtactattttgtcctaaaaagacaaatcctaactatgaacctagatatacttgtctaagttcgtagttagagatataggacaaagagatatatatgctaggaatacttttagttgcattgtttttattctttttaatggtagagaccctaaacacggccccaaacaattcttttagggtagaggttaaaacttcaaatccaacaagatccctattagacataagggaggcacccaaatcactcacccaaaatccctaataagtcttaggggccaactccagccccggccccatccacaattggaaggaacggtgtaatatcccaccaagcgagagtttgatggtggtgatgatagtaatggtgaagtttgagctctcggatgctttttttttattttgatggaatacgttggattctataagttatttgttatttaggatatgccatttccacggttaaaaaatttggcatttggagcctctatgtgttagtaattctcactctgctgtttaatgtgtcttctaccagtaggagtgtaggacagtaggatcactacggtttaattttagttgtggtgttttagggcatgttcgatagagctccaactcctaaattttatctgaagtggagttgtggagctatctaaacccaattccatttctttagtttattttgtgagagctacacctagctccgctcctattttaggtggagctagagctggagctatgctgaacaggctctcggtataagcagttcaccgcggttcagtgatacggttgtattctttttgtttagttttcgatcggacttcatgtttagtccagaatcttggtgaatgctttgatctgttaaatagtataatcttgattatgcactacattaaacattaaattttgaatttgaatttaaattgtgaatttaaatactgttgaattatatgaattagaaatatttatttttgaattgttgtgggctaaactaatcataaatatagagtgtatattgaaataaatgagaaaataaataggggctaataaatggagactactgccactgttgggaacccatctttgtcaccggttgggaacctactgttgtcccggttggtatctttagtcccgggtgaaataaccgggactaaagatccggttggtaactccaaccgggactaaagaggaaaacaacggcaatctcggttgccaccttttcttttcttttttcattgttttttgctagatgatttttccttcaattttctcccaaatcggatgggatgcatatcccaatcaaaccccaaatcctcaaatcaaagcataacatctcaaatcatatattcacatcataaatcctaaaaatatagcacaaatcaaatatatctcagattgaatccatacactgaatcataaattctcaaaaaaagaaattatacatctcaaacgagtccacggccgccgccgcctgcagccagtagtgtgcacaagttgaggacattgtttggaccgaagaaatgagagcagccctatttaaattataggagttttaaaatagaaattatcgctgaagatactctaatactgtacaaacatgatcaatttttttttaaaaaaaatacagctccacacgcctaatttcagggcaaacggcaagtcctgaaccataataacagtcgcttcgaccggcaactatccggagttagctgtgcggggagaataccctccacgtacatacgcgagagtcgcgtcgagaccgctctgcagtgctggacaccacacactagcactgtcacgacaacacggcatgcacagtggggtacatcaccaagctatagtacttagtactactagtagtagaaagtatcaaaaagctaaaaatcgagaactggagaagaagccgctcaaatcgtatgtaccacacgtactgtatgataggccacccgtttttaaatattcggtccgttttcaagtatttatcattgttcgtatttagattttatcacttgccattttgttcaagaaattataaatacttgaaagacatggtatcatcgaagtgttgcattctaaacatgagttttaagctttccttaatcgtagtttaattagtttaaaacattggtggttaagcttaaaatcgtggtgcccaaccgtgacatgtatttgggaatagtgggagtaattgtcagggaagccttttattttcaaacattgactactcgtcttttttaaaaatatatatatgcttaaaagatgacaaattactgcatcaaatagtattgtaagcatgaaactttggtgaattatattcatgaatcaaaaaaaacgcgaatattaggaaaatatctaatatcaaataattagaaggagtgaggcttcgaatccaggtcgtctagcccaccaccttttggagctagacggaagacccctgggcgtttctcatagtcatgaatcctatatcacatctatctgtcccacggcataaaggattttggcaatacaaatagatagccaaaataccttatatttcataacgaagttaataattgctagtttgtctaacagtattgtgttactatctttgtctcaacatattatcattcaaattttgtttcaaaatatgacaacttccccatctactcgttgacattcgcaactatatcttatttaatttctttacctacttattcattaaaaccaatcacaaccatacatcatttaatttcacctctccttttaactaatgtaaaaaagtatgtaaattttttgaagtgcttatatagttatattttaggatgggcggaatggtttatagctataaactccacaaaaaatacataggagtagcaacaaacacacacgtttaatcagccgaaatcccacatgaaaacagagcgtcttatcttatctgcatccaactgtactccagcatgatccacaacaccactcacctcatgattttcgttgtattcgttccagtcccaaaaccagcgagatggatgcacaagcaaccggtcactggttggtctctaccgtaccgaagtcgacaggaacagaagcagttattatatccaagagaaagagaaaaataaaatcttgacacgaacaaaaacccgactcgccgcacgtctccggaaaacgatttttttttcgaaacaaagaaaaaatggggaaacaaatccagtggcatttttcttttttttttttcgccgccaccggcagccgcttttatagcacacacccgtcaccacacggaaaccccagccaaggctactgccaccttaccttgcgtactacgcctcacttttaccaaactgacccctgcacctccactcaccgacagatgggacccactaaaggatagaaacgtcctttcctatccggcacagtgcgcgaaagggcggaaagggttcactgggccccactgcgtccaaggtttggcgtcccgccaccacccacgcacgcggggtacccggtcactgacgtatggggcccggctggtgggccccacgtgtaagtgggggtgggatgggagaggaaggaagggtctcgcggcgcgtcgtgtgccatgtacaggtggtggtgagtagtactagtggtgggaatggattattttattggccatatgtgggcttttattccgcgcgtttaaaaacccggacgccacgccgtgggctcggttcgcctccacgcccccctcatttcctcctcgctcctcccccaccattcccacatctctccctcgccttcctcctctctctctctccacatctccctctcgcttccacgcctcctccgctttggcggcttcttctctagggttcgtctcgactcgactcgtcgaagggaagctgctcccatgaccgcggccgacgctgaggcgtgcgcggtggccgcggcggcggacatcatctgctcgctccgcggggccgacctcgccgggtggacgccgccgtgggggacggctgccgcgaaggggaaggaggtggtggtggaggaggaggaggaggagctggcgtggccgacggtggcacgggggaagcggtcgcggtcgtcgcggcgccgctcgccgtcggggtcggggtcggcggcgaccaaggggaggtgggccaggggtagcccggcgtctcccctcgactacagcggcggctccggctccggctccggctccgccgcgtcgacgagcggcggcgaggacggggccttctgctctccaccgccaccaccgccgccggtggtgacggcggcggcggcgactacgcccacggccgcgcccaccccttctccggccaaggtacgtactcccagccgcgcgcgcgtgcatccctatctctctctcctgtttgttccttcccccgcacagctcgcgctcgcggttgggctgcttcgctttccgttcctcgtctgggttttttttgacgaaactacccctccgtgtcagcaacgagaggaggatgatggatggatgacttctcgatgaaacatcgcttttcctctctctcccactagtcccaccggcttttcgttcgcgtgaccttttttcttaatcccaccttcgcagcttcgctgcctacccattctttcacctccaaccttttcacccaggtcatttcggtaaaaactccatggctattagtacttcacccacctcgcagatctcctcgtcctcttcttctccgaacaatttcgggatctccacctccgtgctactactgctactctcgagctctgcgttgtaccagtagcactatgactctacgggtgcttgtacagttcacactttgaattcggggaattttttttcttttggggtggatttgtactaccatgtcatagcgtgtctgtttggtgcggttgactcctaccttgcggaggggggcagccgcggcaattcacaagggtaggtgggttccggttcggctcccactcccaagtctccaaccacgagccgcggcttaccgcttttgcccaatctgcccattcgcctcgagcctaacttccgggggcaatccggtcatttcgcccgcccttatcctggacctgacctcctctatcgcgttcgttgccgtgggaagtgaggagtcaaaccgacgcggcgctctccgttggaagagaaagagagaggggtggggtggcgccgccacgtggcggctgcccattggccgcctcgcgcgcgccgtgtgggcgcggcgcgggacacgcatgcatgcgtgggtgtgcgaatgcgaatgcgaaacacgtcgtggccacttggctggcgccacgtgggcgcgtggcgtttcaggttcttttctctctctttgctcgcggacgtgtcctggtgggatgggccccacctcacactgtggtgggatttccgatcctagcgggaaaaggaggcaaacggatactcaattttaagtgagtaaactgaatttcatatgggcttatttctttattctttttccctgcgagggaaggaacctcgtgcggggcccacctgtcatcgtcatgtacaggtgaggtgagagcccatgcttccattactggacaataggtgcagaaattaggagcacacgcaccgttggttaattaatcgtggataagatggcaagatgagcagtttgtttgtttgtgcgtgcgtgttgttgatctctcctatcatgtcgaaatgtgcttcatgcgggtagggcaacaatgaggggcagttttgtgggatcttggtaggagttagttaggtgatgttttcccccattagagccaagcttaagctaagctagactctctcatctaattcccttcctaccacctggaaaacaatattcttttgggtggaacatgcgttgcctgttgctttctttttctacggtcgcctccttaatgcagcagcagcagcagcgttggttggactgtagttggttggctctagtggcccgtgttgtgttgtttgatcctaccagcagcgcgttactagctacttccagtacagtattcgctgggtgtgtgatgatgagtgctagtagtagtagtataactgtataactaatggcgtgcgtgctcttctctcgcttacaggtgggccctgccggacggcgccagctgatcctaccgaccccgcctccccggcccgccggacagcgaccacggaagaagatggtaagctactgcagtcactcactcagtgtcacacatatgacccggcacttagcacaggaaaagcgcattttgtttagtgacgagtggtacaagaaagcagtcaggttttgttttgtttcacctttgcatttttctgcagtaaaagcacggtagatagatagagcagcagctttgggtctgggctttgatgaatgaagttactacgagtactcccaagttacagcttactactagcagtacacccccatcatttgcgcgattgcacaggtccggcacaggtccggcaaaagaaagtctttggcctacacagtagtctcagagcagtagagtcagtgactcagccagtcgcgtgcaggagatggtaggctgttcaaatggccggagtttttctttttaaaaaaatgttttctagttgcggagtcggtcacccagtctagaataaagcggcagctggtgcggccactgccaccggaaagagagcgtggtgagggaggcaaaagtggtatcctaaggacaaaggctgcctgcccgaaaagatccacgctcatcatcaccagatggtcctgtgacgaaacgagatcgaattttgatggcagtagtagaaaaagaaggatcgcgtttgtttcttggcttttattacggcttgatttggcctaaacttggttttcttgtcggtatggtgtgcagaggctgccggagattcagcagctggtgcggtcgctgacggtggagaacgatggccttcgcgaggttgattagttcttctttcccctttacgtgattttcacttctcacttggattatgctgttaatttagctcgaattcttatccgtttcttgtttatattctcgtccgaaaacaggagatggtggcgttgcagagagcttgcacggcgttgtccaaggaaaactgcaagctagaggtcagtggcatatgctgctatctaaccaaatcttctcctctttctcttttgtgcacatgtggcgtgcaatcgcttccaggttggggcgctgagtgcgcaatcatcataaaacccaaataaaaattctgcatgtttgatcagttggtatagcttaaagcataagtgatagaactttccaacttgctaaaagtagagttcccctgagcctcccaatggagaactagtggtcccctggcattgtgaatgcatgctgtccttcgatattttctctctcttccttggtgtgtgctttacttcgtcgtcctaggctcttcctggcttcctaggagaagagtgctatgtgtgtggcttggtttggtttggtggcgatcttcactccacatccctctcaaccaccgtttgtcctttgaaaacggatgacaaccggtgctgatgataagcctttcgcaggtttagatgtcgatttccatgctttctttttttgaccatacacgaactgcccggggttagctttgccgcatgagcacgtatttgttttgcgcggtgaaaggtgcggtgtcactgcatgtgtggccggagtgccggacaggatcactggcacacttgcagtatctctcttctcttgagctgcttagaagatagtggtagtaccacggtagtggcaagtagccaaggaccagtgaaagaaatatagtacgggatataaatgacacatcctatactggacagatcagactagatttttttattttggggcgagagaagtaaatactagggctattgttagtccgcaggacgcgtgtcgtgttgtgaaagggtgtcattctgaggagagtgacaccttagccaaatggtcacacggtatgggacctggaggtggcgatagacgttcgttatcttatctgaaactgaaccgtggatcgtccggacttggccatgcgtctcagcgtctgtcgtgttaatttagggtaagttggatttttctagtcttataggaagctctttgtcagttaggctgggtggagcctgcatgtggccgctgcttgcttctggagctgtctcaacacatgcgctgcttagctcctcctatctcgatgtatggaagctccggttagcttctactaatacaatattgtttgtaccttctactagtactgcatctcaagagtcatggttagtgacaagttcgtgtactatatatagttagtaacttataacaatagtttgccactgtgaggtggtagccgagctgtcaattttacggtaaaggtataggagtgtcagtgaggattttagttgattgccttcttgactttcgcattcgggatgaagtgcaagcaagtgggaggagctcgaattcttatcctgtttatccatctcaataatctcaagttctcaaccacctcttcacccatcaagctgcttgcacgtttggaagggctaggaaagtgacgtcccccaaaaaaaccctttggcattggcaaggtagagttggtgatagatgcagttcagctactgcactttgtctgcgcaattgatgcagttacaaggtgttctactgactgttcatgcatgcttcgttttcaaccagccgtacatgtctggaatctttcccccaataaagaacgccatgttgccaggccatgaccttaatctatgcacaccaacccggatcctggacatggtaatcccgtggccttctttaatgcccttagttcttgcgtgccacactgccactgcactggttctgtgctccacaatcacattaaaaatacagacagtgtactaaccagccagaatggttgggcaaagctctccccatttcatttggtccggttaacctgtactgcaccgttgttgtgcagtgtcatctctagagcctcgtggtggctgagtggtccatgcatgttttctctctctcccgtgtgtctttcgtctcctctggcataaagcacatctagctaggtccagccatggtaatggccaacattttggatcttcttagtcctgtttcaggttgtttatgcttggtcatggactcatggtggttgttcattgtccattttctcttatgcctcccatttcacctccacagagatgtctcttttaccaaaatataagaactacgctaggtagattgtgactacaacccaaatttcctttccaagtctactctgttgggctcatggattcataagagatttgccttctgcagtcatctgaaattatgtttcataaaaccttttttttctgaaatgtataataacaatcttttcctctattttgcagacaaggttagagaaatcaagcaaacgaaacggaacgaaatccgaggggcagcaagcaaggccgcagcctgatgagcccgcagccaagcaggaatctcaaaacggcttcgtgctgcctgacctcaacctcccagtggaggacatggctgctgatggatcagctccttgatgcatgaacggctccagattattaccgcggcgtcgctaaccagacaaaagaattttaattgtatatagaggaagctgggctacaaggggctctgatcgctcgctcactcaagatgaagctaaaggagataattaaggaccataccttatgcttgtttgataagttgttcagatttactagagtttagcaccagtgtcatatgatcctccaatcttactaatgccattttaggagcagaaaggaggatcggtttaccttgctttgtctgatagagttatagtagtttttatttaccctggccttgtgtgtcgatgaggcagagggaagattttactttagtagtacaagctccggacagtgtagcttggttgttcatctaagcactgtaagttagggaagaactatctcaatgttcttttgtttattctgttcaatgttggtgtgaatctttggctgtttgtagagtcctactgtcttgttcacggctgattacaaaacgggttgcatctgtcacattagctgcacagctcagctcatggtactctcggaaatgtccctagcactactccattcatcctaaagtaagtgcactcgaaatgtccctagcactcctgagacactactccattcatcctaaaggaagtgcagggagtgagtagataagtgtttgtctctcctaaactagaggagtgtattttgggacgaagtagataagtgtttgcccagatatatggctaaaaataattatattttagactgaaatatattattattattttatatgagcacggtttcaccattggtgtattggtgataagtgcataactacactccaaattttaatccacaatatttttagttaggccgagtttagttctaaatttttttttcaaacttccaacttttctatcacatcaaaacttttctacacacacaaacttttaacttttctgtcacatcgttccaatttcaaccaaaatttcaattttagcgtgaactaaacacactcttagttaaagttatactttcttttccaagaaaaaaagagcatggtcaggtgcaaatcattgtgaacgttgaattcaactgttcactgattccaactgcagatgtgaacgtgtcgcttgatctaatatagtaggagggggaaaaaagaggaaaacttgtatttgcgctaaaaggaaagaaaaaaaatgatgttgattaaggcaaatctccgatgtagcctccatatccatatcctggctactgacggtcaagtgaactgtgagcttactgcatcactctcaaaaagacaaaaagaaaaacgagccaaggcccatatccactcaaccgggtgaaggccaaaaatggaaatgaacaagtttactgtacatccctcatttgccgtcgagtttgcaattcatccctgcaacgcaataccaaatagaatgtgtccctcaacttctaaaaccagtgcaaatacgatccgaagatggttttgatgatggtttcagctgacgtgacaactacgtggtgttgacgtggcacttaaagtcagaaaaaaaatccgtgaggcaacatgtaagcaccccttctctttcccctttcttctctcttctggtcttccctttcttctcatcgcacgaacgcccacttggaccctatccgtcgttcgtgcggtgagaagaaaggtaaaaccaggagggagaagaaagggaaagagaaggggtggttagtagggctgtcaacgagccgagcttgagcgagctcgcttgcctaggctcgagctcaatacaagctagagccgagcctataaaatgttcgagcttttaaacaggctcggttcgagctagatcaagctcgagctcgactaccgagcttgatttttaattagaacaatgtatattttaaagaatattcttttaaaaataattaatttatggtttatcatattagtagaagaggaaaaggaataaaataaatatatgatgccaatacaaggcatacaaataacatatttcatctaccaatttattaaatagcaataaaaaatcatatattactagggcttattagaagctcgagctcggctcgacaaagctcgcgagctttgggacaggctcaggctcggctcgtttggagctcgagccgagctcaaatcgagcataggacgagtcgagctcgagcagctcgcgagcctcgagctttttttaacagccctagtagttagatgtggtcccacgatatttttcttactttaagtgtcacatcagctgaaaccaccgtccaaatggccttaagatcttgtttgcacattggttttaagagttaagaaacacattatatctggtattgcgatgcagggactgatttcagattcggcgataaattgagagatctaaagtgaacttatattccaaacgaaaaagggaacaacttaaggccgtcatagcacaccaggcctatgaagaaggcatgcatgttatgtgggccatgtaagcgacgggatacagattcatggtccggcccatttacaccccgcctaggctgattggcatttcagtccaagtatactaatcccctcccaacccctctctcccgttttccgcgtacacgcttttttaattgttaaacggtactctctccgaccccctaatataagagattttgacattttgtttgcactgtttgatcactcgtcttattcaaaaaaattgtgcaaatataaaaaataaaaagttgtgcttaaagtactttagacaataaaataagtcaaaaaaataaataataattctaaaatttttcgaataagacgaatggttaaacagtgcaagcaaaatgtcccttatattaagggatggagggagtaagttttttttgcaaaaaaaattctatatgaaagttgcttaaaacaatcaaactaatcctttttaaaaaaaatagctaatacttaattaagcacgtgttaatggaccgctccgttttctgtgcagactgttccaagttcccaaccgggaatagcgaacacagcctaaagcctaaatggtattaacatggaagctttaggcgttcgtgaaatttgtttaaaaaaagtacatgcccgaaatactgataaagatggtttttctttaaaaatatgcttggaattgtacccatgataatccatactcccttcgttccactccatgcatgctgcaaatcattctagttgtcataacttaaacttctttagctacgactgagtttagagaaaaaatacagtgacatctacaataacaaataaatacactatcaagttagaaatttgtaaggtgtgtttaataaaaaaattcttcattaaactcgatcgaagttagaaatttataacttatgaaaaaaactaaaatgacttccaatgtgaaatggaggggtagattctaatttagtaacaatgtgccgctcctttcacagtgtgaaattcacactagatataataaaaataatggcttcgttgtctcgtaactaattattagatttgttttttccaataatagtgtcacgttcttacgatatcataagtgaagatcacaaagtgtaggtgtcctatagtaaattttatttgctaagattgtaatctactgatagtgtacccttaggctcatttgaaacaaagtaattttgtgattggattcgaagaacttttttatggtcctttgaacaaaggaatgtctctctcaaatttatttgaaaattcttaggtttcataaatcaatacaatcttttagagggaaaatcctttatgtaatctctttttttcttatattcatatatattccctcgctccatctagatcctattattttcatgtatttttatatccataggatttcaagtgacaaggcacccgaatcatatgttttctctgcatgtttgcaaatcaaaagtcttccgctaccaactgttacggtataccccctccgtcccattttaagtgcaaccataaatttctatgcccaactttgatcgtctatcttatttaaaaaaaaataaacttagcatttttgttgttatgagatgataaaatatgaatagtattttatacgtgacttaagttttaaatttttttaaaaaaaatttaaataagacaggcggtcgaaactgtgcacgaaaaattatggctgcacattaacgtgacggagggagtactagttcttatcggtatatttgcaaatccacccctatatacgacatatacttaattataaaatccggccaaatggctcatcattaaggacatcaccaatgtatatggcaaaagtggtctatatagatgggacccatataaataaactttaactatagcaatcctcacaatgtatatggatacaatgtaatattaggagaagagagagaagtagagatagataatattatttatgtcatatgggtagtccatatgcatatggataccttttgctattttctttatatggactagttgcataatgttactaagtggctgaataaaatagtttattccctatagaccacttctgtagtacattgtggatgtcctaagcatcatggcatggcgatctccacagaaatcggcggtgacgcgtccatgtcctattggacaggcagggcgtttattgtgcgagaggtggggcccactcgcgtggtccatctttcgttcctcgtcgctgtccctgctttttccttccggtcacggaaaatatcacatttccattcccactgccatccactgtgctttttaccctcaagtagatagcggcaaagattcagaccaacttgttaaaagaaacaaaagtggacaagtccactgtatgaaaagtttgttagttcttattccctccgttttataatagataatgccgttgactttttctcacatatttgaccattcattttattcaaaaattttatgcaaatgtataagatataaatcacatttaaagtactataagtaataaaacaactcataacaaaataaattataattacgtaaattttttgaataagacgaatggtcaaacatgtgataaaaagtcaacagcgtcatctattaaaaacggagatagtattattgtctattagtacttgttagccacatctaaaatttaaattgtgattttggttttaaagctgattttgagttttctcgtcttaccatatttttcagccttaggttttgtcccgaaaaattgtttgttggtttattagtcacatcgaaaaaaaacttagagctattgttttcatcatctgattgttggtttattagtcacatccaaatattaaattttgaatttaattttacagttgattttgaattttattatcatggtatatttcctagcctcaacttttatggcataaataatactgtacatgtataagggttatattcataattttagttgctttgtttatcttcttttcagtcttatcaactgtggctcaacagatcatatatcaacatatcttgccccagtgtttacacatgtttaataatcttgaaatcataagctgttatttttcaaagaagaaaacacaagctgttggagcttgggttaatttgtgcaggtgttcaggcacatctctgatctatatactgaagagctgtgtttgtgagatgtggacgccactattaagtttgagaaggaaataaaataagtctgatgataccgtagtgccctaacgcccagcaaccatgaatcatcaatcggttggttaactggaaatttcagcgcttaattgggaatcatcatcgtcgtactatacagttcattctctgtattatttattgagaaaatgatgcgtccttcgctgatgtgagagattttactatagaaaccaccttcacgttcaaagtcactgcagagggtacgatagtttataatttttatatgaataagtgcaattccaatatttatttattttctcaaaataacaccgttgcaaagtccttacagcgccgaaataaattttggagaaatcacgtacaccgtgcacgcgaatttattttgaaaccgtcttagttttaccataaaatctcttaggagtactacataaaatgcataccagcgaagtaagcatagttaaactgattagatttttaggttggaatatgtctaatcagattgtgctcgtattaactattaattattctttcagtggtagaggataacaaaacattcatggtaacttcatcaataccaggatatcccagtccagctattcaaatgtactctctccgtccaaaaaaaagcgaatataggactgaatgtgatacattctagtacggacataaataaatccaaatttgtagtactaggtcgtatctaatactagttgattttttacgagaatggtgagtacttataggagagtaggatgtaatatgtgacttcgtgaaggtgggtgcccgcgctgtgagcgtctaatgcacaccttcactccgtggggtaatagttccaatcccgttcaagcatgagctactagaacatatccccgtaaatacgtgtgagtgtggtgtgtgcacgcctgatcctatactcgaaataaaggattttttcaatttctaggcacaactaagtagtactagtaacgctaataaaacgaactacaactcatatgtcgcttgactttttttttttgtcaaacttttttatatttgatcaaatatatagaaaaaatatagtagcattttcaacacaaaacaaatatattatcaaactatattcaatgttaatttaacaaaactaaatttacattttagatattgttaaatccttcaacaaatttaagcaaacttaatgaagtttataacttagaaaaaaaaatcaaacaacttatattaagaaaccgatcgagtaatttacacggagtctagattcctcccccaaaatttgatttttgatttttttttctttatttttctgatagagggaggagtacggtgcaatttactcctgcgatttgcaaatgagtcacgtgcacgcgcaaaactgaaatgggctcctcctattcccatcgctcctctacggtcccctcccactcccgaagaagatcctctgacttacttccctctaactctgagtcaccgatatatgggcccattaaatagagggcccatatgttagtgacacaagttagaggagcctcccgactcactccctccctccctcccaactgctacaacaacaagtcctcgtcctcgtcctcgtcttcgtcttcctcctccacctcgcgcgctgcagcagcagcagcggtgcgcgtgatggcgttccactaccaggaccacgcgctggcgatggacgccgcggctgcggcggcggagacgggcggccaccaccaccctgggttcgtcggggcgggaggagttgtggggggaggaggaggaggagggtgggagcgggagaaggccgccatcgcggcgcacccgctgtacgagcggctgctggaggcgcacgtcgcgtgcctccgcgtcgccacccccgtcgaccagctgccccgcatcgacgcgcagattgcggcgcgccccccgccgctggccgccgccacggccgcagcggcggccgcggcggccggaggggcgccgtccggcggcgaggagctcgacctcttcatggtgagggctaaattattattagtagtagtagtagtagtagcgccaatcaaatccccccctctctttctccagggcgttttactcttatttttgccaagctatgaggtttgcgtggtgtgtctctgtatcgcttttgcgatcaaattctcctcgcgtgagagtttcttgtacgattggtatgtgaaatattattctggatgagcgatatcgaaaattggggctggaaagggaaatgaaattggctttttttttttgaaaccgaagccaggataagctggtgttatattaaggaggagagagtatttacaagaaattggctagtggaattaggagtgaaatttggaaggaaaaaaataattctcgaaaactcaagcttcatttcattaagaagcagcagaagtatgtacagtacaagtgtacaacagagcggtccacaaagaaggaaccctgtagaaaaaacatcaccaaaattttgacttttggaagggttggattgattttgtcggagtagcaatggttccgaccatcgtttttgaaatatagtcctttgaattgaatatgctaaaattcatcacttatttctcattccttggtgtttgtttgcatccctagttggctagttgttgaagaagctctaagttatacttccattatctagtccttgtttgatttagattattgagtgtattattgctgtggattatgtccttcgtcatagggatacattaaatatttcaataaataaacttaacaaataggttaaaacaagtggtctaagtaagtaatatactagaagaaagattttttgagaaaatacttcttttgaagcatggagcaaataatccgttttcagtaatccggtgaataagctaaagggaacatggtatcaattaatattgtttcttgcatacaatttctgttagctaagtttatgatcagttgcctcttttttaaaaagtcattttgtttatcaggtactcttctttgcttggaaatgacaatcttcctaaggcaattttttttacttaataaaaaaatgtttttttttcttgcagacccattatgtattgctcctttgttcgttcaaggaacaactacagcaacatgtgcgtgttcatgcaatggaagcagtaatggcttgctgggaacttgaacaaactttacagagccttacaggtagcacaaaaaaatctagttgatattattcaacatgagaatagtggactcctgattttaggaagagaaacttaaagttattatttctctctgtttaattcatgctgatgtgcaccattgtgctacctttcgtccatttttttccttctccgatataaacttgacctcaaagtttactcctttgtaggtacaaaaaagtacaaactaattccaccttttcaaccatcataatcacatagcatttaactagcttccttcactctaccaaatatagtttacattcttcaatcggaattgagatatacctgtggttgaacctgcagaaaataatgagtgttctgtttgggagaactttagtgatggacataggactactctcctaatggcaaaagggaatacagaagtaaaatttgaccaataatctggtgttttgccaatcctcagttgtgactcttactgcaggggcatctcctcgtgaaggttctggagcaactatgtctgatgacgaagacaatcaggttgatagtgagagcaacatgtttgatggaaatgatggatcagatggtatgggctttggccccttaatgctgacggagggcgagagatcattagttgagcgtgtacggcaagagctgaaacatgagcttaaacaggtaagattatggcctgaatttttagtcgtttgtatgttgttgtataaactttaaacgaaatttcaaatttccaggggtacagagaaaagcttgtggacattagggaagagatactccgaaagcgaagagctggaaaactcccaggagatacagcgtctactttgaaagcatggtggcaggctcactctaaatggccatacccaactgtatgtcagctcacagataccattatcaggccttcctgcatttccttttctaccactgatgctcatgtttcttaacctttataggaggaggacaaggctcgcttggtgcaggaaacagggttgcaactaaaacagatcaataattggtttatcaaccaacgtaaacggaactggcacagcaatcctgcttcatcctcatcagacaaaagcaagagaaaaaggtatcgtgtcgtggacttctaacagaaattccttttacatatttttggtttccattttcctgtctctgtctgtttatgcctagaaaaagaagcaatgcaggtgatggcaaggccgagcaatcttggtagaacgtggttggagaagaagtatatatatgtaaataatgcatccattgtgaagaatgccagtatatttattgctcccaagatggcgattcggacagaagcttcctggggctaatttatacgaaagaaattatgtcatgttataattttagtcatgtgaagctatagtgcgtatatatagtgacttaccagagagtagtttttatgtttgctgttggctagtgtgcatttgtagttgggacgtgctggctgtctctctacagctcggtacaaccatgtatttataacgtgttgtgaagcatatgttgtaaaatcgtggaatgggagtgttctgcgatccccatatgttgttgtaatgttgtatattgatgaccatgctgcaacggcagcatgtttgtaactcgttatatcctcaggctcttgtgttgttacaaattacagaactatattgtctttaacgagcatctcctgttgaattaataatagccagacagtcagatttttgttggatatttggataggaactttcttaaattgagattcctcgtccttttcatttctgtgatgatcctgaggtcgaaccggttgatgattgctgttcagaagattttttttttcattttgcaagtgtgaactgcaactgtgagcgtggaatggcgagtagccatcaccgagggcgacttgtatttaaattgggttcagagaagttttcaaccaaaatctttgtagtaatatcgaattttcggtgatgttatcgattgaggttatctgtagtctgaaagtcccatgttcactttgaaaattagggtctttgaaaggcaagtatatgccatgataaacttccaatatggttggtggtaatcttcaatggcagttttatgtttaacatgtactgttgaggcacactcgagactcctgaactgcgctcagagaagtccagaacacaagcaacagagagagcgtttgggttggttttgatgtgaatcggtagagagccgtgtgttattttggacaatagttattgcaggactttccagtctcatcgaaaggccgttctcgcatggaaaatgacaaggaaaatatttcggccttttacatgttctgtgattatataaggaacatggcactgcacgaactaaacagaataatgccaatcacttgaaaattacaaacttcacagaatttcccttcattttggtgcataactttcttagtagcaaagaaattgacataaaattgttcagcaggcttctggcacacaaaacaagataaaacagagtgttgttctcttgtaaacgaagatttatttcaagaccatatcaaagtaacagacatgaggatgccttcagcagcaaaacaactgcatctttcgatccaaaaggcagttagatatcaaggggttgcctcaagaacatctccatttgcttcgccctagtcttgatcgacatatcaaacaccttctgcccaaattgaataactagccctcccatgatgctgtagtcaatctgcaggcaacaaataattgagtgcatgtcctttgaatatcacttgacagactataggcaactgatgaaccaaggaattaccttctgttcaatcaagatagttttgttcttcccaagaatatcttgcaaggtctccttaagttccttctcctctttttcggggagtggctaacagcagaaaaccagaaagtcagcaagagaaaccagctaactacagtacaaggaactataatagaagctgcagtacgtacaaatccataaatatcttgaccaattgatgtaagctagcataaagaattctagaagctgattcttcaacattttgtagagtgattacgatagcaacagttgctcagtattgtatgttgtatctccatgaggtatatcctcattggaaaaaagaaggggttatttttcatgtgacaatttatttaacgagaaggaaaagaggagtgaaaagtgtctcgaatttctagtgtggcttatatttgggaaagcgttgaaaggttaaaatacatatatttgaaatcagagggtataatataacaaccagacactgtcaggaaaaaagaaaggagatcaaaggcttcagacatcaacttacaataactgtcctgacaaggaccttcacctcccccttatgtgccatggtcaaatcaacaaatctctcagcaatgcgatcaatgtgcttcagtctgccattgtcggcgagcacagcttcacaggaaggaaaaaaaaccttaggtgctaaccaaaagagtacatatggaaaaagaactccgtgtcatctattaatgatactgagtacatgaattaaaaacaaggttctaggaaagcgttgatcagatagttagccctttcaaaataaaaaactgtaattattgtagcagatcaaactaaaactacaaatattgttggctcacattgaaattataataactgaaggtagcaaaccgttgatatacaaaatggcattggaataaaaatttctgaaaataatcagatgcatttggggtttgggcttgtcctcaagctacctctataacgagttggtttactatcaactgcaacaaagttatcataaacaaatacaataaacttcattagacataacatgtgtggaccagaagtatacccaagaaattctttgtgacatctgaaaaaccagcttcagcgaaaatttcagttattgccttcaccctggtctctttgggcactgacaagtccttaatgaattgagaaaacaatggactcttcttggatgcctctacaacatcgcgaatctcagtttcaactttgtccagcaagttagctttggccgctgtaaggaacagagcactagcatagttgccggtgccaccatacagagcttctggaacctattgtggcaaaacaaacacaacaaataagattaacatgagtatctcagggcaaaataagaactactcaaactgccaaaagtaacccataaactgaaatggaaaagcactaatcgaaaacaggcagaaatcatgttgagataataaaaaacaagaacaatgcatatacaaaatcatctaccagttgaatataccgcgagcaaattttccttcgatgaaacacagtctctaccagtattgcatcatcacatttcctaacagggagaggattcatagccataacaccacaacggcacaaaaataaaagacacgaatcattttccacaggcagcagtacaaacaaattgcacattttctcatgtcacagaaccaggctaaccagagaagctttcaccaatgacgtgtataactattaacattcccccctgttccctagcagtatcaaaactacatcggcatcacacgaaaaaatgtgagcaatccaacgagatgcccgttccaggttaccttgatatccttcccggtcggctttgccacctgcgacgcgaagccccttgagccctcctgcatcatcacaaccaatcacatcaatctcaacaacaacaaccaaccaacgcgatccaggcaggcgccgcatagccaacaaaaaaaataaaaaaaatcccccacaaaaaaaacaccgaaaatcccagcgagaaatggatgacctagatcgagcgtgggattcatgcgccacgcatctaaatcgaagggggggggcggggggctcccctaaactggaatgaaatcgaagggtgcgaagagggggaggggaagacctgggagaggtgggcgcggaggagggggaggccggatctgaggtgccgcgccgccattcctgcccctcggttcgtcccctctgcggcagcggtggaaggcggaggcgaaaccctcggtgcggcggaggaggaggaggaggagatcgaggtgaggagaggaggggaaagaaaattatggaggcgatgcggaagaggagagacggagctagctaggggtcgcaacttgcaaccactacggaagagagtggttcttgggccgtttaggcccagtgtcgcaattgagagaaactgttatgggcctcatttgggtgggccagaatccccgtttggtcgttgtacccatcgatcgcccccaagaatcttgggctggtttcagctctcacctgtccatttacggccagtttggttatggaattattttcgaggatcaccaacagtatacctatctcaatcccaaaactgattttgaagaattttagtctaaaaaccagctataacagatcccctactttcctacctgagttttggtgttcccttctcccgattactcgctccgtttatatgcgggcgcgaaactcgctcacaatctcgcactcccacctctctcctcccgttgccgcgcgtgggagatagcgatctttctacgcgtgaaaggaaaaaaaaaacggaatttactgttggtagtttaacagaatggcccacttttaagctttggggattgaatttaaagctatctgttggagggaggagttttttcacttactattttcagtttaggaaacctataaacaattttttggagaaatattataggtaatctgttggtgatatgtctattatttgcttggataatgtgggagttttagaagggattggaaaggagagtttaagggtgaactcccaccttttcaataactgtgtagggtagttaattgggagataattatactttctaagtatgacaagataaatatgagtcgtgcatcatcacttaaaatttaattcttatccatactccccattatttccacctctactactaaacaaaggactgggagtaaaaatgaaactcccatgatcaatctcttttagagctttagtagacctaactcgtatagttaaatttaatcgttggagttctgtcaaatagatccaaacaattttagatccacctaaaaagggagtggagcttactagagtgctctcataaaatgaactagagagatggagttaggtttagtctgctccacaactgtagatctaactcctaaagttaaatttagcagttggagcaatggtaaacacacctgaaatggtttctgaactccacctcaaaagaaaacagagcaggctgcagtgatatgagaaaacaaactagaagtgtggagcgatggttcgagctgctcaacaactacactatagactcttcttagagttatatttagtaattggattcctaccaaacaagctcatggttcacaccttcatttaaaatttcgtaatctaaaattgagaactctcctaaactagtttttttatcgataaatttgtcatcttgcttagaggcttgtttgttttggccccccaaaataaaataaaattgcaaatatcaggttagccactgttattacaaatttaggaatggattattatgtgaaattttgtaaactttgacatgagtgcttttatttatacttatatattatttatgtggtgtaccggtaaacggcaaatatatggctaatatgatgtacatttgtgtgtttataatgataagtgtgtatgtgtacatacgagcgtatgtttttatgctacggttcaggggggaaaaagaagtggaatggcatgtactatgaatttccatacagcatatgcacctccatttttcctaaccatgcgtagggaaagcgctagttttatgtgcataatgtacaccgagaaaaacaaaagggggtcaaatcaattgcagaaagatgaaagaacacatgcttcggcgctgatccgatcgatcgattgatcgatcggtctgggggattgggatggatcatggatatatgcatgaacaagggaccccgatgggtgtttgcggcggtttagctggacaggatcccggcttgccgggaagatcgataaaatacaagagggagaggattgcaactagtgcaacaaccaacgtagatcaattggacgactgcttcgttgcgagtcgcgagactggatctcggcctctccattcgttcccgatcctactgatctactcactgctagtactactactatggcgtcgttgagattggagggtaaagtgtacaacccacgtcgccgtggagatcggtgagcaaagtgtggagacctatttggtttgttgtgttctggaggggtcacatgttttaccctacagcgtatatgtctatgctaaaatttaggaatagatctttaaaacttgaatttaaaatcgattttaaggttttaatcatagttctttttcaatattgatattgaaaccattaagaacaaatatataaaaatcattttatcgttaatagatcgtttgtggtattatcggcaattagcccactgatcgatgacagccggagattcttttcggctaactgttgtgcgtgatggcgcacgcgtcgtgcacatacgcgttccatgcccgattcggggagcgaaatcgaccgccgcttcagtcacgacgggcgcgccgcgtccaccgaatttgccatcacgtgtcgccgtcagtcaccacatggccaatccgtcatctataccctctgtacgtgccgcgccaacagagagatgaagtccacagcgcaaacagtatccagatgatccactagacgacaaccatggcagattcaggtaacgaataaatcgcaaccatgaatccagaaacaaccatggcggattctaggtaacgagagattgttgccacgaatccaaaaccagctctttcttctaatatttctaatattttgacgtgcaatcttttcacgtgttcgcgaaaggaaatatccaaaaccagctcatttcaagcatagaagcagcggcaaaactctggcaagagagcaataaatctctgcaacaatagtcttataactatcttcagcaaaactgcaacacatcatacatgatgacttgtgactgttacaagagtacttaacaaatcggtatatctcacaaaccacaaaaaagaaaaacagacatcttattacaagcaaggacctcactctgtgttccaagacttgcaaagaccaaccaagcttaattacccttcaacatcagtttacattccgaccgaccgaccgattgactcccaaataactcaattattacccaggaaaagggggagaaaaagaaaaaaggaaaacatattgggctccctataactgactctagactaataacttattaaacgcacctctaagcaaaaggtataaatgaaagaatatggatctgagaccgtccattgcgatgcttctggacacacggctggtaactttttttgattacaagatatgaaacaatgaagaggtatgaacagatagatcctagggacataaatgaaggcatatttatatcagtgctgaattcctaaatacgcgatctggcagtagagaacttgtccaccgatgccccagaagtttgttgccggccattctgttacaatatcccatcccaggttgttcacctcagggttgcaccttatgggatgcagccatggagcgtaacctaccagcaatctccgtaaaggttggccgttcggatggttctgtcgaccaacattgctccattagtgatctccactctggatcacaagagtcaggtactgctggtcgtagagtgttgctcacaatgccacctgccaagagtagaaaattttacaccaagcttggcaatcaaatcatctttgtccatctatattgcacgtataattcctacgacagtatcagataaggatcatgtaaaatctgaaatgggaaatcaagaccaacctataataacaccataatgcagatctgcgtatggttcttctcctgttaagagttcccagagaacaatcccaaaggagaacacatcaacctgaggcaccaaggcaacgttaatgttagtttaatatggacatgaatgtagcaggtcaaatgataatatgacacaatcaatatgtagaccttttcggagaccaagctgctacttccattcagaagttctggagccatccatggaagagtccccctcacaccaccagagatgagggtctgacattttacttttgaaagtccaagatcaccaacctacatcatcgaagaaaattattacaaaatagctaaatatataggggaaaggacaccagtcacctaattatattttcaaaaggtcactttgttggcacaagtaaaatgaaatttgctggaagtttgcatcagcaatatatcagtccagccacatttgcaaatgcctggtgacatttcaaggtgttaaaagcaaatgctgctaagtgtttcatagaaaattcaacaaagaacgctagtcgatcaactaaaagaatactccctccgtcccaatataagtgcaaacctagtactgatgtgacatatcctagggctaggaatctggatagacaatgatgtgacatatcctaggattacgaatctggacagttgcctatccagattcctagtcatagggtatgtcacatccgtactaggttgcaattatattgggacggagggagtacaaactaagatgacaaacaagcaggctcaagaatttgtacagagaggtctttgctagaaagcagatgtttataatctcaagttatatcaagtagttaaacttttagaaacttcctcttatcagatcgtgtacccatgccaccatttgtgtcttactaacatataataaaacaaatatcagagctgctccatcatcctatcatacatatgtcatgctccatgaagctgcagcggaagatgcccaagcggcagcaggttccaaccaagcagatataatcattcagtactaacagcaattctgtaccaggcaaactagatatctatctggatcagaacagcggacaccatatgctcctaagaagtaaatttacaagaatgtgggataataatgctaaaaattaccatgagtacccagtttaaaaggacaatataggacatactgcctaaattacctaatatcaagtaccacaaatattacagataagggaaatcataataatttagcaacacgatgtagcaatctaataaaaacaaatggagcctgctgcttaccttgcatattggacgctgaggatcccttaaattaacaagcaaattgtcacttttcaggtcaaagtgcactatgtttttgttatgcaaatattccattccgaaagcagtatccatggcaattatcaatctcttacgcttatccagggtcctgcacagataatttgattcaatcaacaccatgcaagaccaccaattttatgtgcattagacattaggatgtaacagatcaaagcagaagataactctgggtgtaaagggacatacttggcattcttcagcaaagctgttctgagtgaaccattaaccatgtattcagtaacagtggcaattgatcccccaggtccatcaagaacaacaccataaaaggccacgacatttgggtggtgtagatcagcaagtttagatgcttcattccaaaagtcattccgctgcagtaatccaggatatatcaatgcaaagacagcatagccaaacataacaatctgaagtgtgagaactaaccatcttgtcttgctctgatggcttcccagcaaaacatctgtcattgattcttttaatagcaacatcagatcccctccatttaccatgatatacggttccaaaagttccagaaccaagttcttggagctcttcaaggtcattattctttataatctgcaacataaacatttgattggtaacagaactaactatcaaagatttgcacgattaaaaagctatagttcacgaaagtaacctgcagacgtccaagatcatcagtagctggaaaacctgaaatccaatctgctggtctgctcttgttaacctgcatgattctcttgcttagcattaaggatgacatgaataaggacacatctgagaaagtaagaaattatatattaacctcattggcgtgtgcttcagcatctactttaccagtgacagcaccaactccatcattcaccacaggaggctgaggctctgatgactttgtattagatgtaggtaaactgtcctcgacacttaccaaatctgggctggtcatatcatcacctggattgatgcgatatgcagaaataagattcacaacttacaagtacatatattgacaaggttttatcaggaaatatggttaagcagacaacctttgatgaatcgaccatgctctgtatgggcgtccttgtgatctgattgttggnnnnnnnnnnnnnnnnnnnncggaatattcagatctggccctttgcaatttaataaagagttgtgagaatgtggatccttcgggctgatgttttccctgcttgctaccctcttaggtctcggtggcaaagcatgtgtatttgtcactactttccaggggtcgtcattgccaaattgctggccttgtaagccagactcttggatttggtccacattgggagcatgatttaccaatgctgctgcaggtacctgagcattagcatttggagctacttcatgtggaacatccttgcgctcacttaatggatttacagcagaatttgcatagacaagatcaacaccataagccgatggaggcactccaccaggcccaaccgtagctacaacataactcgagtagggacccccgatgctcatcatatgtggcatatggctcacattggtgtgctgaacattgtgcaaataagagctggcaatggaaggtgatggtgctggttcagttggaaggactaccttaggttcactgacatcaaaaaaggtgttggtgttgctctgactaacttctcttgctcgagtatctgggaacccctgagagttttctggtatggcattctggggtacaccattctcaggaggcatcactggctttctttgttcagtagaggcagaactggcctcactagggctcaagcggagcgaatccatcatcctgtccacattagccatataagtcggcacagcagcaggtgccactggggacacattatcacggcgcgtcagtccatcctcacgatgccttgcattgccacttaggctaccctcacctgtaagctgattgtttggactattttgcttgacgggatattgtgccattccttggcctgaaggcaattgctgctgctgcggtggcagcggctgctgcataatgtgttgatgagagcttgagatatcagaatgagccgaacctggagaaactactctgtccttctcatttggaatcacagggatctggttaaatccataggttgaaggcaactgctgtggtggaacttgctgctgctgatgaacatacacatgctgatgcaagccagatgggtcaatgagcactgtgttcggaatcccttcaacctgctgcgcatacatcatctccctctcatgcggcacgggatgcatatgggtgtacccataagcccccatcggaactggcaccgccctctccggcatcataatccttgccacgtcttctggccgcaggctcatgtataccggcaccgtctcggggccaggccctccatgcatatcgctaccgtagtcattcaccactggatctgagtgagcatgaggaagtgccttcaagcacatattgcagtcttccagccttcccccatttcctggcatcgcctgattcagaccctgcatggcctccctatgatcgttcatgaacacaggcggcaacggtggtagctgcgacagcggctgccggtacctcgctgcttccggctgtggattcgcctgcggtggagccctcacttcagcagcaatctcctgtggcttcacagggacaggagccggagcagcggcattgctgaacacatcgacaagcggtggcggcgccgccacaccaaacgccgatctcgcggcatcattcgagcaagtagaggtgggggagagcgcggtcggagaaccgccgccgccgccaccacccgaagtcggcgccggcggaggcggcccgccatcggagttctgcgtcgacgagaggctcgcgacgctgtccttgcgcacaataccgttcaccgcctccagataccggagcccggcatcgaatcccccgccctccgcctcctccccgccgccaccgcccgccgcgtcggagatggggaagatgaacaccctcagcttggggctcgcgccggccagcttgtcatactcctcgatcatgttgtcgagatcctccggcgaggacacggagatgagcgcgtcgaggccctcgtcggggagctggtacttcaccgcgaagctcgcccccgtggcgcccccgtacgcctcggcgagcctcccgaacagctccccgagcgccaccccgcgcggcaccgacacgatccgggtgtcgccgccggcgtaccgcagcgtcccgtcgcccgggcgcgggaggatgcggccgccgaggctgcacagcagcttcatcctctcccccgcgccgccgcccgcgtcctcggcggccatcggcggcgggcgcggggccgtccagtccgtcccaccaccaccacctcctccccctcctcctcctcctcctcgggctggatctagcctagggttttggagggggcgaatcgggggagggagaagcccacgcgattgcgggcgagcggatccgagaggggggaggggagcgagctgctcgatgctctcctcctcctcggcggagtcgctgctgctgcttgcgaggttagggaatttttttgcgtagtagtatttgttgttgcggaggtggaggcgaaggggggagaggagtggagggagggagggaagggggaaggggaggggaggagtagactagactgggggacggtgcgtttgtactcaaaaacccttggctcgcttcggttgctcgttttctttgttatattattttattatttttggaaaaaaaatgggttgtcacttatcggcgtcggtttttcttaggttaatttggaggtttctatttggttgtttgggggttttcttagcttgattttttgcttttggatggctggagaagattggtttttcgtttaaaagttgggaaaattttgtgtgtatgggttataggttattgtagaagaaggtatgtgttacggttggtatttgggttaaaacagatatgtgctacaacagagagctttatgtttctggtaaaaaaacagagagctttatgtggtaagacagtaatagtgatctttatctggcaagatgttattgtctatcgtcaatgcctcaatagcgatttaatgttatgcaatatcttagtaatggcgtaataaacatatctacaagatatggtttacgtgtgtactcgaaaagataagcatccaatgcatatcgtatagatagaatcaacggatacggccaagactataagtcaatgtttctacgcactaaaccatgatatgagcgtcaaagatatctgacgtcaacaagattgttgtgagataatagctcttctcgggaatatcgaaagatatagcatcatgatccgtgtattctatactttcggttggtttttacatactaatgatttgaatctattcttcattaatatttaagatcagtgacagacaattatgcattcatgggtaagaaaaatatttttactaccataaagagagacctaaaatgagccacttcgtcgcctcttttgaagtcttgaaattattgtgtttgtcatataagaaaaaaaggtacaccatctattttggtgggatgaaattttaatggcctagcttactgcaaatacatatggacaacaattgtatatttataaatagtcatagagttgtatggtgaatataactcaatttcaaataacttgttgaattgcatgtgaaatttgatctatttatttgggggaaaaaaactgtacccttgagggaagaagtccatcataatcatgaatgcgtctatctaaacctactgtggccagagtatttagcatcgtcatgtaaagataaaattgataacaacttataagtcttccttttaggcaactttgcttgtctcaatgtgtttccaacttgtacatttttattgtttccttttccacaatatatttcagtggagtgcatggacaacccatcaccacttccatgctggtagtattatcagattcttgcattgcttatgcatttgctcaaacacagtcccatgcattcttacacacaaagccactacttactagtttggcaccactacacccaacatttaccaaggttgaaagttaaaaactctagaaaatcagagtggtgttgctaaaaacacaaagagagcaactatacatgattatacatatattattgttttttactggcatacaggtattattttactcagccatagtggtggctgcctgtctataacaaaaaccacagatctactccagtcacacaagaacaaaattgaagagcctcgacctgaccttaggtggcatacatttactggcaccccctcattaaaaggacaactgggcctacaggaatgcaccccagcagaatcttaaagtagttcagttcattaataggatgctttaggttgtaattggagcacctgatccctcctagtaccatgacagaagggggagtgctttgctttagcctttagcatcatcctcctgcagaagtagcatcctaggagagtatgccatcctcttttcatccatagaacacatgattctccaagctttccatagaagtggaactatttcttactaatatttatgcattttgcgactaaaatgaaaaaggaaaacgaacgcgaaatacttataagttcattataaaaatgatcgcgtcttcgctcttataggtatttcttttatgtgctaaaactaagtgtttttttatgtgaaaagaaggcagttccaagcattatggtggattaatcttgctggtcccgacagaagaaagatgaaacctaagaaactgtccaactaggacggcaaagcgagtgttaaacaaaatggaagaagatgggagaaggacgtcgccatgggtggcacagcgtggggcctccggagctcgtgtccccaatcaggggtgttggtgtccgccccaacatctccattgggcaagaggatactccactttatcaagtcctttgccagcttcctcacaggtggtgtaatcatcagcattgatcatctttaaccaccacctagtagccaatactcaaatacagtacctgctatctgtgtggagagatgggtgagtggtagtaggagaaatttgagcaagctgcagttagatgtaggacagagtacagtagctatctactatgtggacagatgaatgagagtagtaggataaatttgaggaataagcggttatctatagtatttgtcatgaatttcctttgattaacgtgtaacgcgcaaaaaaaatcagctgaaaatgacggaggtagtaaaattttagagttcagataaatctaactatggtgatgatttaatatgaaaattctattttgaatctccatgatttcaataaaattgtaccgtaggtttttcaaagaacctgaacaactgaccgggttgctgtactataaatcccatgctggtcattttaaaatatccatagtttataacaagatgattgagttaagctccgatggaatctcctttgtattagagttgtttgcatgcatatctcgattaattagaaatgaatcttgtaacttaacgtaaggtaaggttattctacatacaggggagattgtcaccaggtgattccaagtaatctactccctccgtcctataatataagggattttgagtttttcttgtattgcttgatcactcgtcttatttaaaaaattttagaattattattttttttgacttactttattatccaaattactttaagcataacttttcgttttttatattagcacaaattttttgaataagacgagtggtcaaacaatgcagaccggtcatcttacctgtcgtgaactgtgatctgacatctatttcaaagaggacaataatttccatgttctaggtatgggccaagaaaaaaaacacgcacacttttgattactgaataattaaaccacctcgcaagtgagatattttagctttatgagatactagtttgctgtcgtgcatggaataaagagggatgtgattgtgaaagagtgaagcaaggatttcgtccccacgttgaacccttaatcaagggcaagagggtgtccaaattagttgatgatctgatcccggggaaaagttcatccttaaaccgtgattattttagcatggtttaagactttaagctaattggagacgaatgctgatgaaaagaaaagaaatactatacctaagcgtcttgatgcattcagttttggatgcaccctgtactttttttttttactcgtctccgacgcacacggcaagctgtttctgcgtgttcttcttgtcacatagcctgggatttgctgtgaccaggagggagcatagtcaccaccagccagcctcactgtcacacactgttttgcttaagattccttgtaccctgcactttattggaatccaggtccagttaagtgacagtcaaaatggtaacagtgttgagctgcctgaccacctgccagcaaacacaccttgatcctgtcacacagcaaaacggcttccgaagaggcatcctttgtaggattccaatcgtacataaaacaaattatttgacatttcgaaacagaggattggagctttctacatttcgaaacagaaaattctttagaaatggcttaatgcatgtatatcttagaaaaaaaatcagtagaaaacatatcctatgtagacaaacttatatgtgtatcgtgcatatcagtaacaaatatcaccaaaacttttagacaaaaacttccaataatattttacctacatgtatgtaaagttttaacttaaattcattatattttagtagcacctcaaaattacagttgtaatagtataaatctattagaattttattttttttatctctctatgtataaatttgaaggcgagactttacacatagacgtaacatgattttaagtacatgttcactttttctttactatttcggtaatatttgttagttagtttgaacggtatgcatacgaaagcttatgtgcatgacataagttcctaagttagtaagagctagctctaacctctttaaagtttctctaactctatctctcctctcatacaaatttttatgtttcttctattgtctgtctaaatgattattttcgtgttttaaaatattttatgttacacaagtacttttattaaaatcctatatttttttcatttttctgtgtttttcaccattccattatttaaaagggatctcagtgtgctcttcgattcttcgagaaacgcacatgggtcttccggctagctccacaaggtggtgggctagacgacctggtttcgaagcctcaccccttctaattattgattaggtccttccctgatgtacgtgttttctgtgctcttcgattcttctgttatcccatttaccactttcggtcgtctgaatttacaccctcaactgttttcagtgggtatgtcgtcgtaaaagatcgtgttaatctaggggaaaaaacatctttcacgcataacctactaataaagaagattagtagtagtaaagaagattactggttcactcccaaagcacatggccccaaatccccagcctgtggggaagcaagagggcacagatatcctcaagctcagtcacaggatcacagacagactcacagtgttagcctcctctccgtagcagattggcagatgagcaggacgataggactagcagtagctagtgcaggtggtgtttggttctcggagaaggtgggtgggatgcagggggcgagaccactccctagtttgattcatgggtgggatgatcctagtttttatttggtgcaagcgataaggaagaaaagggttggatgttgcctgaagccatcgtcaacccatcgtcaaagtgcttgacacaccccatacatcgaacaaaataatgatataaccgtgaattcataactggtagtaggttattatatttaggataatatgagtattttagcggtaaaaaattaccttttataagtaatagtattagattattatatttaggataacttattctattttggaacaaatgcttaagagcttacgatgcatgcccattataataacatactatcttcgtcccaaaataagtttatttttcacgcatctcatacatactaatacaaaaccagaatactagaatactgtcacgccctgaagtttccctctttgctttaaaattcataaaataaatcgtccgaagaaatgatttaatttaacctagagatgaatccctaaattaataaatgcaaataataattggaatcggtatgtggaatttttcttgagttctacatgtcgaaatgtgctaacaagatttttaatggaattttcagagctctagaaataattttaaccaattaaaatcgagcacaagcaatatttaaatccctggaaaatcccctttttccttttctcttctttttcttcctttttccttcctttttttcctcttattgggccgtaggcccacttcctcccgcgcccttcctccttgctgggctggcccactccctccctcctctctccgggtcaccgacaggtggggcccacctgtcggccccttcttccacctccagccgacggtggcaatcaccgccgaaaccgccgcgccgccgccgctttccccgctcctcccgcacccactccgtgccccacgcccctccccacattgtcgcgacgccgccctcgccttcccgcccgcgccgcgcgcccacaaggggcggattcgaattttgaatccccccagctctctctccccactcccccacgtcggtgagaaatccggccgcctcccagcctcgtccgtccctcccgagcccatataaaccatccccgcattctcctcctcatttttcctttttccatcggccgctcccgagctctccaccgcgcccgcaccgtgcgcccacccgcagccgccatctccactgctccggccgcctctagcagccgctagggccgccgccgcaccacgccgccactgtcgtcgggttcgcgcggccgaggtccgcctcgtccacccctcatccgtcacaatccgtcgccgaagatcatccgtcacaatccgtcgccgaggtttccgcttgccgtggactccctctctccctctaacctctctcttttcctctcttagggtgtcccggagctcggccgctgttcgccgtcgccctccggtcgctcgccgtcgccgttcgtcgtcgcctcctcccgcgccgtccgaaccccggtgaggcacccctcccccgtttttccccttcctctccctcctagcgccgagccggcgccgccgtcgcgccgccgcgtcgccggtcgccgccgtcggtggccgcttgccgccgcccctccatggccagccggcttggagccaagccgagcccggcagacaccacccccccctttggagccgctgccggtggggtccgcctgccaaccactccctctctctctcccattgagtcactgacccgtgggtcccgtttgtcggcgccgccccacccccccccctcgatgatgtcagcatggacctttattgcgcaataaaatccgttaaggccttttcttttatagtaaaaacacatttaatcttctaaaattcatatctaattcatccgaactccgtttaagtccattcaagtctcagtaaattcataaaaatgcatagaatccattaaaaatggttttgtttcctgtttcagtagtcttatagcatgttttgcttgtgtgctttgtttgtcgcgtagatctcggccgtttcgtcgctctacggtttctcgaagacgttgttgtggtctcatcagtgtgagaacaaggcaagtcatgcattacaattgatcatattgtacccaatttataaatgtcccgcatttctattaaatgttgcattcttttacaatatcatgtgggatgggtcttactactcagccatatattgtttacttcctccggttccatattaattgacgttttggagaaggttgaggtcaaacttttataaatttgaccatcaataactttaaaaatatttagtttgaaggaactagaacaacatatatagatttgtcttttaaagtactataataaaataaaagtaaacatgcatttatttattatatatattataatagaaaaataagatcaaatatgtatttgtagaccgtgtcattgtccaaaacgtcaactaaaatggaaccggagagagtatcatctattttcatcaactccgatgtaataagtgcgcatgtattatgagtgtgtatttggattgtgttttaaaataattcttaaaaataaatttattttaaataaacaagaggagaaaatgattttattattgtgagacggagggaataaccgcgagaaattcaggtgttttatccagttggaagcgagagggggagagaggccacatgggccacatgcccaggaatccagctagccggacacccaggtggcttgcaccctcttgcagtcgcgcggccttctgcttctttacaggttttgccggtactcgcgcgcgccccggaactcgcgtcgcgtcgcgtcgcccaccacttcttccccccgtctcgcctcgcggcgcgtcaccacctcgccaccaccaccgcgtcgcgtcgcgtactactcgcgtggcgcgcctcttattctatgcgtataagagcaagtattagtacagtggactactcatagcaagtttaataatagtatagcccactactaactccaaatcatttatagacaatataatagtcaattcatgcaatatttgcttattatactattaatatctagtcccacctatcatacgcacattacgtattgcagtccgtgctacagatggctacagatatgtaacttgctgctcttctctcttcctttatctttttaaaatatgtttatagttggcttatagcctgctattgtacctgctctaacttcaaatcatctatagccaagttaatagttgattcatataatatataatagttacatataaatatatattacactattaatatatagtcccacctttttatacacataaaacattttgaaatccgtgttgcagctagctacaaatttgtaacctaatttccttcttagggcacccgcaatggttatctataggctctctacaagagatccatgtcaacatattttcttacttggaagatattaaatgaagagagagagcaaaactatctactaacctggagatagtctatagagaaaaacgaggcaatgcattagagagctatagataccgatgtagacatactattgaggtgatttactattaatctagtctattgctgagatgtacatgttttatagagagcaacttactttaccattgcgggtgctcttactcttctctaaggccctcttatcacattcacttgtatttatagctaacttgtagtctgttattgtactcgttctaaggccatgtttagatcccactctaaattttttcaccctgtcacatcgaacatttaaacacctgcatgaagtattaattataggctaaaaaataattgcacgtattgcgactaatttgtgagacggatcttttaaacctaattgctccatcatttgataatatggtgctacagtaaacatttgctaatgacagattaattagacttaataaattcgtctcgcggtttactgacggattatatataattagtttttttattagtgtccgaacaccccatacgatacgctatataatatctaatatgacacgttaaaacttttacacctgatctaaacaccccctaaatcacctcacctatgtaccactgtactatccaccgctcccatgtcggcattccgttctttcagctgcgatttcctctctctttttttgttatcttctccgtgggtttctccgctcttctcacatggatctttgaccggggaaaagtgatggatggatgctgtgcattttgtttggtcacttgtccattcaggttttgtttggatctagtcttagatcgtggagatcatccagtggcagtactagtactttgttactgtatgtattattcaggatggattgcacatttgattagtatttgcatgggcagaaggaatcaggcaacagtttaagaacacaggatgcaatcacatttggcaaaggctttttagctgaagattggatactcctctcaatctgtcgcctcaaacaagcagcaatgtatgcatcgcacgtgaggtcaatgggaggggagattgatgtcacgtggcaagccagaaaagaatgggcatgttcactttgatttcattttcaaccttaccaaattttaggaaagttgctaaaaaaagtgactacatttagtttgctgtcaaattttagtaactatataagaaattttggcaaactatgttaaaattttggtaatgccaaaatttagtaaggttttttttttgcaacaaagtgaacaggcccaaagaaaacgtcttcgtacatttcgcttggtcgacatggcgagcacaggagcgaaacttcagtaaattcattatccatcatagcacaagtatcaataaaaaaaataactaaaataactttttttatcaaattccagtgtagatattacttattttttctacttttaatgtacttgtttcatactgccacaaacttcaatataataattatttaaaaataaatttactttagaacaaatcagagaagaaaaatggtgttattttaggaccaagtatgtccgatgtggttaggcagctgtgacacatacggatgtttctagctgcaaccatgactgtatttaattggaccagtggctcagtactcctcccatacctgccacaccagacatttccgcacctaatttgcttttggttactagggctacatttgctgcaaccttttcttcaatcttgtctctttgcttgccttgcgtacttggctagtagttggtcgtcttctgtttttttatgggagaaaagaggcccatgaatgttcttggatcacgataggccgttctaagtctacaagcctggtagtgaggctggtaggcccaataaattcggcccattgaatggcccaatcctgacatgaaggcgagaatcagtgggctccgtgtgcaggtaatcagattctggaagtgagcctcaccatcaaaggccgtgtgtctgtggcccttttaagctgttgctggtttgcgacgggaaaaagtccacttagactcccttaattgttcaccgaatctaattcatgagccttaactgaaaaaacgggtagaacgactccccgaattatagaaacgagtgtattttcactcctccagaggttttggagggcggtttttactgacgtggtggtgctaacccgatttttattacacatggcgcttatgtggcattagaatttaaaaaatatccgtgggacccatatgtcattcaaacacaaaatatattgtgggacctaccaacatgtggggcccacatgtaatcctttctccttcctttcttcctcctcccttcctcctcccttctctctcttttctctcccccttttttcttcccccttcgaatgagcagcagcagcaggttcagcccaccaccacccaccacattacccgcaatgtctcctgccgcgcccgccccagcgagctcctcgccatcgtcgaccccagcggcgccgccaaagtccacccttctcaagatcctcaccggccgcctccacccctccccgcctcccgacctgctcctcctcaacggcgtccccgccaccaccgccaaccaccgcccccgtcacccggcgcgacgtcctcttcccgctcctcaccatccgcgacacgctctgcttcagctccagcacccgcctctcccccaagcacatcgacgcctgcgtcgacactggagctgacatgggtggaggcggaggagaaagaggcgcactcgcctcgacaccgtgccgcctcggcgtcgtccgccgtgcaccgccgctcggtcgtgccgccccttccgccgccgctgcacgcagtcgtgtgccgtcgtcggcctttctctctcaaatcccgtcgccgtcgcccttcccgtgtccctagcgactgccccgagtcgccgccctagccgctcgtgccttcttcccccctttcaccgcaccgcttcttccgccgcgctaccgtcgccggtgactctcggtcttcacgccgtcgtgtgtgcgtcgcagtggtggagtggctcgaccaaaccaaccgtgcgagccgcgtatcgctccttgcgcgcagccatgtcggcactccggcgagcttcgccgccgccgccggtcgccatcgtgtctcctctccccaatccaagccggtgaatggattgcccatcttctcctctaccctccagtgctagcactttcccccggatcgccgccgtgagccgtccgatccggcgccccctccttctctcctctcgtcttgccaccgtggctgcccacgtggcgttgaccgaccctgcccatgtccagtcagccggtcagccctcctctctctctctctcccgtgcttgtgggctctccacgtaagcggcacgtcgacgacacatgggacgaaaaccgggtcaacaccaccacgtaactgtcacgtcagccaaaaccgcttgcaaaatcacccagtaagttaaattacacctgttttaatagtttaaggaatcatcttatctggttttctggttaagggtacaaattagattcgctcgatatttaagggagtcaattggacttttttcctttgcgacgctgctaggcccgtaaggctatacgacatcaaaagttacagtacgcattgcgctttaggactttctttcttcatcttaaaaatcgaattattgacatatattatatgtttcatgcttcgaaacatatattttcttaaagaaaatttttctactacattactacattaactatcactattgcctctttctcctagtagttgtaagtagtagtgctagttatttttggctattatctaaaaaaaagttatttttggctgccctggcggcctgttttttctttcctgttttgttccagaacatgaacaatgttagttagatcatgttttgtcacttgaaagcttccgatagctggagttatatattacttcctccatttcacaatgtaaaactttgaagcattgcttatattaatatagatattaatgaatctagatatatatagtgtttagattcattaatatctatatgaatatggacaatgctagaaaatcttacattatgaaatgaagggagtatatcagaagcttttcaaatataactagtgtctacatacccacaaatccattggtcatactcgtgacaaaatgcagaatgcaatcttttattgatcggtggagctgaagaagcaaagcaaacaccttgtgacgagttagatgggatcaaattgcacacggaccgcaccgggtacttcgggtacttctatagttaggacttgttctttcctccaataaaagttggacaaaaatttagatatccgtgacacgtttcatgtgaaactttctatataaaaattactctaaaatatcagataaatataatatcagataaatatatgttttaagtttgtaatagataaaactcaattaaccctatgttaatagcatatcgttttatgtaaaatacttaatctccatctgcatgagtttcaaaaaccaccttagtccaatgtagcagcagcagctcgcgcacacgtgcacgcgccaattcgagtggcgagtactgcgcatttgaccgtccaaaagcgtccgctagcttgatccacgcacaacagtcacgttacaaaaggggtggcactcgtagactggacagtgcaagtgtggaccagaccgtgtggtggcaatggcatattggcatctgcaacgggcaagacggcgaggcaaacggctacctccactcaactcgcctcctcgccttccccatcgcatcggatccaccaaatccttctcggtttgacccagcacgcgcatccggtccaagtccaaccaactggctgcgcagcctgcaacgcagcaacgtccatttctctctttttttctcataaatccccttaatttttcccctttctccaaaggcgccaaattttgcagaaaaatccaaaccccggctcaatccccaaatttcgtcgtcatatcccccggcgaaaaagaccaatgcgcacgcgggaatgggagtacactcctactgcgccaccaaactcgcctcgcacacgcgcgggcccacatgtcattcaccgattcacgagtccaaaactaccgcggtaaaaggagggagagattttttttcaagactaaaatcgccccaattctgggatacatcaccaatttttcacaaacatctcgatatgtatcgaattacataggaaaccatgtgtcgaaaccatgggaacatttcctctaagctaatagtgtagtaataatctcacaatttttgatgctgtagtttaatcatgagtacacagtttaatctctctatagtgaagaagagttagggcgtggaggaggagacaggtggggtacagttcatgagatggcgatggccgtcgaccgccgcgccggcgccgccaccggcgagggcgggagccgggaggagaagttcttgtaccggaaggccgcggcggcgtcgtctgcggcgtcgtcgtcgccgtcgccatcgtcgaagttgagcgcgtagctgagcgggtcgtacccgaactcccccgcggccacccgccgcctccacctcagcttctccccgctccgccgctcccccggcgagccgaagcagcagcacaccgtcgtcctcagtctgtgccttagcgacgacggcgacgtcggcggcgatgcctccatcgagctagctctcgccgtagtagtggattgggatcactggtgattttttgagatgaattttccgatgatgagatggtggttttggtttgggtggagagacgaagggtgcggctaaatagggacgggcctctgacggcgtgaactgggaagtgacggcggctagctactactccctccgtctccgtcccaaaataagtgcagttttacactattcacgtttaacatttgaccgttcatcttatttgaaaattttttatgattaatatttttattgctattaaatgataaaacatgaatagtactttatacgtgactaaatattttcaaatttttcataaatgttttaaataagacggatggtcaaatgttggacacagatatctacggctacacttggtttgagacggaggtagtacggagtacgcggtgggggaagcgccgttacgcgtgcagttagacgtgggggccgtttggggattttgcttagcgtaggcgggttgcggatgacgacgtggggcccacggctcagcgggaccagcaacggatcgatgatgattgatgataacggtcggtcgtgcaggcagcctgtcgcggatgacaggtcagggctaatacgatcattatgctgttgcagattagcatgagcacatatgtgatgaactattagggcacccagaattgttatctatagactctctacaatatatctatgtcagcatattttcttaattggaaaagattaaatgaagagggagagcaacgctatctactaatctttagatagtctatagagaaaaacgaggcaatggattagagagctatagatatacatgtaaacataccattgaagtggtttactattaatctagtctattgctgagatatacatgttttatagatagcacattattttactgttgccggtgctcttagcgattctacaaatctgtaaatacaatgaactgattgtgaaaattcaggctacttctaagatgtgaagaagattgtactggcctactgctattaattactctctccatttcaaaagaaattaatctaagatgagccacatttttatataggttgattttgattttttttggaacgaaacaagtaaacttattttttccattggcagtcacaccagtttgcaatcttggtctcctcctgggctacgcaatcgcgtcaaacgtattagactccgtaccaccttaattaagaccccttccccaaataggagtataataataccccaactaatcatcgccatatctccgtgcaaaaccggataagaattccacacagccgaaagagcaaaataagctcacatggcggccgatggcgtgcgttcgtccagctcctccaaagacccacagatacgcatagaacgcgatagccgactgattaagattctcttcagtcaaatgaacaaatgcacagtaactttgtcatatgaacttaaatattatcgggtttatatatcaataataaagtcacgtgacttcgattacagaggatcctcgtcctaagcgacaccccgaaagcggccccctccgcccgggccgcgttaaggcgaaaaaaaagcaagcaaaaaagagattagaaaaacgtttatgaacgcgaggcgaacccgatgctagcccgaagatatcggcgggcggcggcagcacgggcggacgagaaggcgaggggatcaaaggggaaaagcctggatagcctctccacgtctgcttttcgcgacggcgaccgccgccagctcgagtggtagctagtggtcggctcggacgaaaggatcggaatcagctgctgctttgttggctgtttgctcgtcaagtggcctcgctgaggtgcggggtgcagtggatcggagtggatagggcgaaatgtcctgcggttactgtcggttttggttcccgcgatgcagggatgcaggctgtttcgagcgcacgtagcacaccggatttgtatggctgcaacggatggtctttggattaggtagagggaaaaaagcaaaccgagtccctttgtagtgttttgtgtaattaaatttctcgatcgatatgttcatgattgtaacattgttgacgagtaatccaatagagctcgtttatatgcttatatgttaaattttataaattttaattttatagttgattttgtggatttttattatggtttattttacaataatcgctaataacatgtatatactaattttactaaattaattttaacttactaataaacggtggtttatataagcataaatataagggaaacaataaagccgatatttttatttgggtgcagccgtggaggcatctttgataatcggaccgatgaatggccaaatgaacaattgaagatacctctgagaacgaccaaataggttatgatcccgtcagctctccatgaaatgagagctctgactgcagagtcttaacgaaaataataatgctactaattcgcagatggagtaaagcctgacgcctaagggggagtttggatgggttaatccgtcacatcggatgtttaatattaattataagtattaaacgtaaactaatgataaaatctattttataaccctagactaattcgcaaaataaatctattgagcctaattaattcatgattagcctatgtgatgctacagtaaacattctctaattatagattatttagacttaaaacatttgtctcgtggattagctcttatttattatgcaattagttttgtaagtagtttatgtttaatactgtaaattagtgtccaaacattcaatgtgacatagactaaagtttggtccctgaatcaaaacacccctctaagatagtgtcatagtgcactagtgctacatgaccgaattatctactacgaagtacaagcgagagataaggatcagattcacaatcaatcacttttctcctgcgagataagctactataagttgcgccacatctcgatgccaaaacgaacggtggatgatgtcgtagccacgcatgctatatgaatggatagatatataccttcccttcctcccgcaggaaagaactagcatcactggttcactgtctcactcatcaaaagcttaattatgtaacactcaaaagtgcccattcgagaaatacacgtaatcaaacgatttgtttaacctgacgattttctccttgacccatgaggacatgagtcacgtcgcaccattaagctccaaaaaatatgagacaaaattgctgacaggatcacaggattgggttcagtctcgatttgccgatcgaacccttggaagctgtgggctaatcacaggtgcatgtggcacacagtaaattgcactaaaacagagggctaacttgtcacgtatcgcaacttgcaacgtacagtacccttttgtcggaaaaagttaacctaaatttagatgcgatgtaaactaatacaataatctaaatatatatttttttaaattcattgtactctactgtgtcataacaaattctagtttatttgtttttcctttttgcgcaggaagtaagttctcagagcaagtttaacagatgaactcactatcacttatcagtctatcttagaggggcgaatgcctttttctcgtgaaagggagatgcctaatcgtatcggttactgtgtgatagtctgacaaccatatggcgtcccatgagaacaaggataaatcagctataaacttatcttaaaaaagagaaaaaatgcgttagctctcgtatagtaagagttaactctatacgtgttttaagataaacacattgaatgtataagtaagagaaatagtgaagagaagaaaatttaaaggtaacttaatctattatatatatatatatagtaaatttgtttggtgctccatggtgcccgggcaccattgttgaaattgagtatatacctaattcaaatgcaattaaaactttttcaattacttaggtattaacattaactactttactaacaagtttaaagcaagtttgaactgaatttgaacttgtttttgttagatgttgattctaggtatatagcatccatacatataattagttaggtatgtaatcatggattgtgaaataaagttaaatttgagttgttttgttgataagtataggtatgaatcaaattattataactaggtatatactcacaatttgaaaattttgaaaaatttgagtgattttgtgcattagataccatggtgcccgggcaccatggtgccccatatgagtgtcctatatatatatatatatatatatatatatatatatacagtgactggaaagtatcaacggccaggcgataattacgataagttgatggctgcaagcagttggcctgctgccggattgctttcgatcaatgtcgctagacgctgcacctgattaagggtattcccaacccaattactatgatagtgtccaaagtattaaataagttgtcacctagaacaaaaaaaatgatgtggcaagtgaataaatgaagaaagagaaggaaaccatgtcttatgtaagacatggtttctacacaacattcaagatatcatgcgagataatagtgttgtttgcattgaaagagtagtctctagtactagtttcttgatgatgtggagtttatgaaaaccatgtctagtgttatgggttgggactgctctaatgacgtgtatagacgaaatctccgaaagcaaatgtatcatgacagttataaatatgagagttttcttgcaaaatcatgtaaagttataaatcctgcgaaattttcctcaactattaacaactgccatacgttgcaacaaacttatcatcttcgtttcaaaataaacttacagtacttaataaaaatgtgacacaatctagtacaacgaatctgagcatctctatccccatacaatgttagctataactacaagaggaggaccaagacaacggagagagatcccatatcaaaacttcaactcaatatccagttgaattagccagagaaaagctttcccaaatcttgtaactttgcaaataagagatccaaagatgaacacgacaggagtagaatgttacatttccgagcgatcgatctaaacctatatgaaccacatgtttcattatttttcttccaaccacggactcacatctgtacacatgctccctggctgaatccagaaaggggttggacatttctatgctattggaagtttggaactcaggctccggttgctcgatctcatcgtcgtgggcaatcaacgatgtttctctgtcagacatatagaagagaaagctctcatttttgcatgcacatttctcaagcgaccagacatcatgtttttttaaaaaatataaaaaatattttaaaatacatcaatttatattaaaatttaaaatagtaaaatacttcactaatcgtatgttacactgtaaacttagccaggtatcgtaagcgcgtggtaattggagttgagacctgagacgtggcatctggcacgcgaatgagtcacgtaaattggccttgtttagttggggaaaatttttaggtttggttatcacatcggatatacagacacacatttgaagtattaaatgttgtctaataacaaaacaaattacagattccgctagaaaaccgcgagatgaatttattaagcctaattattccatcattagcaaatgtttactgtagcatcacattgtcaaatcatgacgcaattagacttaaaagattcgtcttgcaatttacacgtaatttgtatattttttcctacatttaatcctctatgcatttgttcaaacgctcgatgttacagcgtgaatttttttattttggaaacttaaacagggccatacgagaaggaaaaaaaaaatccgcgacccatcggagcaaaaaccacaccggcaccggcaccgcgcgaacggccgcggctcgcgccacgccgacgctctcccgccacaaccgcgggattcccccccccccccccccccaccgaacttacctaagcgtcgcctctcgtcttttttcccgtgcaacgttgcaagtgaaatcatcaatcgtgcgtgcgctgcgcccgaccatggagctcgcggtcagagcagccgccgcggcctcctgctcctccggcgcctcgctccagctcccgcgggcccgagccccgctccgcctccttggccaccgccgcctccccgctcgccgggtggctgtcgaggccgccgcgatcgccgtcgagccggtgagttttaagtcatttgatgttgccgcccctttgcctgacaggtgttcggcgttatgcggacctggcagcaggtcagctactaggtggtctggagctagtggaaatctcgcagcgattcttttttttttcttgcgcactgaggcgatttcttgcctctgctgtaaatggttagctgtttctatctcttctttgctataagtgcataggaggccatatatctgcaaagaagcttcgtagaatactgacaagatacattatctgtggatgatcagctgagaagttacatggacttatggacctataagttttttgagacttgagactagtgaccacttgggtaaattgggtttcgggtacatgctgatgatgactagcagtaacggggcacctacatataccatggtggttttgacttctgcttattcaaggtgcccacgtatgctggggcagagatgggcttgtcaataatcacattgcgtctgaatgtctgatgtttctcattagaccctgccctgctgtttgtgtgttatatcttggacttttggagttccaacctgacaataacgatagcctttttcgttctgtgtgaaactaaagaatttggctgtagcttctttgaagcaaaggctggaatgaattccattattaaaaaaaaaactgaagaattgattgtctctgtgttttacacttaataggaaaacaaagtaccgcagagtaacaattcagaagccgaggtgtttgcatgccctgtttgctatgagccattgataaggaaaggcccatcgggcataaacttgtacgtacaatttcatttctacattatgttttgcatgttttgttagattggcatttatgatatgttccttttatgcatgctccaggccatcaatttataggtctgggttcaaatgttcaaagtgcaacaagtcattcaccagcaaagatatcttcttggatctcactgtcacttctggaacaaaagaatatagtgaattgaagccagctagaactgagctgttcaggagcccactcgtctcatttctttatgaaagagggtggcgtcaaaatttcaatcgaagtggattccctggacttgacgaagaggttcatttctaggacattcccttcgttgtttgatatctcggcgttactaaataacaaagtctagccaacgtgacctgtggtgtaatatatttctgtttcaataagtaaagaagcaatgttaattcaccaagtgtttactatagaacataatcatttcttatgtatgtttttctgatctgttgttggtttcatcagtttcaaatggctcaagattatttccaatcagttgctggtggtgtacttcttgatgtaagctgtggcagtggcttgttcacaagaaaatttgcaaaatctggatcgtactcagctgtgattgctttggacttctccgagaatatgctttgccagtgttatgaatttattcagcaagatgatactcttgtaaacacgtgagctctcttcttcatgtctctgaatttcgttaatatcctttctgcttttcgtgtgagtacaaaaaattacagcatatgtcacacaaatgaaacaagacataaccttaaccacttctaacataaatatattatcaattaagcattttgcagagcatcactttgtctgtttgaagttactagtttatgtagtttaatttaatctatgcatcaattaccaggcaacacaaaaattacgtgattaacatccaaatgaactgcaattgacacagaattctattttctccatctggtgctttttaagacaaatactccaatctttatttagttcatgccaggtgcacaactaactgttttcctcttatgcttacacagaaatcttgctcttgtaagggcagatatttcgagactcccttttgcttcatcttcaattgatgccattcatgctggagctgctatccactgctggccctccccttcgaatgcggttagtatctgtccaatttgctctcatgattaaggtgactaatttggtctgtatagcagtattggagtctccagatttatgataatgaattgttctgtaaaactgtcatcactttaaactgctttcacctgaatctctgttcttctgctcctgtttaattatcaggtggctgaaataagtcgagtcctgaggcctggtggtgtctttgtagcaacaaccttcttatcttctcccaggaacaatcccttctctgttgaagcgttgcggccactgagacaggtaactttttctacttattttctgcttatctaaccctatgagcttatgcagtcatactcacattgctgctttatatactgcagattgttggaccagttaacaccagctacaattacttcaccgaaggagagctcgaagacttgtgcaaatcctgcggtcttgttaattacagcagcaaggtccagaggtcgttcatcatgttttctgggcagaagccgtagcctaaaattacatcaaaacctttgtagccaaagtatagctgtcaattctacaaaagtctttgtaaaatgccattcaccgatacctgcatagattagacccagcagaagtttttgcttggaattcctctccctgttatgaagatatagttgtcacatgtatactgtgcttcagtacagtgatgtaccacagccagggtgtatttcacacctggaagaaaaaaaaaacgttctagtactattttcccaacttgtatagggcctcttttggaatggaggattttttcaggaattgaactataattcctgtggaattcctataagattcctacgttcgaaagggccttaaatgatttatttaggcccataaactttcaatctagggtttataagtttgcaaaatttatattagtactacctccgtcccaaaataagtgcagacatgagtttccgcgcccaactttgatcgtctgtcttatttgaaatttttttataattaacaattttgttgttataagatgataaaatatgaatagtactttactcgtgacttatgtttttattttttttttcaaatttttttcaaataagacgaatggtcaaagttgggcgctgaaaattatggctacacttattttgggacagagggagtagttcactacaagtccaatctgccaaaaggttacatcaacatgttatgtgtgaatagcgaccagagttgagttgtgggactggggacaatcagaagacgggggcgtctaagtgtctactccctccgttcctacaatataaaggattttgagtttttgcttgtaacgtttgaccattcgtcttattctatttttttttcaaatataaaaaacgaaaagttgtgcttaaagtactgtggataataaagtaagtcacaaataaaataaataataatttcaaaattttttgaataaaacgagtggtcaaacgttacaagcaaaaaaaactttaaatcccttatattatgggacggagggagtaactattagccatgtttagatttggtgtttaactattagtcactcatatataaataacagctctcatgtgtctttgacataggggtccagtgacaagtgacagatagttaattgtcacaaagtggtaaatatttaaatctctcccagaaaagggctggagagaggtgatccgtccgcccatgggctgctataaaaagagtgacggcccatctagtgggaagattgggccctccaatctaacgtcggttcccaccgcgtaaacggcccagatctcacgccagcccggcccgcctgcgcccgca

SEQ ID NO: 4733 - DNA, 10991 bp, Oryza sativa
taatattcatttataatatcatgtttgtgcaaagaaaaatacttgtggtgctatttattttgctcatatgtatctagtataaagtatatagtttgtgttttttcaggatagtaacttcagtttagcactatgcgatcactggatgtttaattactggatatttgaattattatgcaagttcatctacattattttgtctatattactgttaaacggtgtgtttcgtacgaaaactttacagcaacttcagtttagcactatttcgatccgcccctgctggtttcatgctgaattatagaaaacatctgcactgcccatctgtcagtaaaataaaataaaggtctcgtttccaccacaaagagtggataaagttttgaatattcgtggcacgcttttcaaactgttaaacgatgtgtttcgtgcgaaaactttctatgcgaaagttgttctaaaataatagattaatctatttttttaagtttataataattaaaactcaattaatcatacgttattatcaccttattttacctgaaacactttatctttatcttaatcttcaggagatacaaacaccaccaaaatatgagtgccacctgttagcaccactctctttctttccccaacttctctctgcctcacagtcaccctgcgacaagcacgagctaaagctccaccatagggactttaggggcgccatcgtttcgctttttttctaataagccaaaacggcttattagaaaataaaaattgaatttgtaggtaaaacttttatatatgtgttctttgtgatttaaaagccaatgctaaaaaaatctacgttgaaaatatctcaaagtcattctcaaaattaagtttgaaaatttaaaatttggttttttttcttattaggccatccgatgggagcctagggaggcagttgtgtagccagaggttgccattgcaatgaattttctcaagctagctaaagaactgttgctactgtgtttgcacatgatgctagtctacgtgggcaagtattttctacacccaggtgccataacatttaagtgtatgcatgtagttcaaatagttatataaaaaattcataaaatttgataagataaactatgacgatataagactctatataaatatgaagtctaaatttgatctacacatgaagaaaaaataataaattttatctgcgttatacaggttctatttactatcagtttctattatttttacactactacaatagatatttttgcgtgtggttgttttgatttttgcgtgcggtagattcgcccgtttggagcgggctgtctgggaaaatcgtgattttctcgtgcgggtgcttatgtcacccgcacggaaaaataaaaatctgaaaaaaaaataaaatttcaaaaaattgaaatcctaaccatagatcggggcaccctgccgccactgccgcgccggctcccaccgccactggatccggcgtggggtagccgccgccaccggatccgggagtggggagggcggcgccgctcccggacgccttgcgcgagcgttgggaggaggggaagagtggtcaagtggaggcagcggcggtgctgctcccggccaccgcctcctcgtcgtcgtcggcggcaacggccgccgcgttgcctcgtcgtcgtcatcgtcgtcggcagcctccgccgcacccctgagcccaccggcaatggatccgcctcccccgagcccaccgacgatggatatgtctccccgaggccgccatcgttggcgcgagctcgccaccatcgtcatcatcgtcaaggtcagtcgtcatcgtcgttgagggggcgcggccgcggctccatcgctctccgcgtcgcctcccacgccatcggcggtggcacccgtcccgtgcgcactcggtgaggagaggaggggaggagaggaaagaggcagagagagacgagagagaggggaggggaggagaggaatataatagggaaaaaggaagagagggtgtcaaaaaaaattgaagtgggtgagagagaaaataggaagggatattttattttcctgtgcggtccacttaaaaagcccgcacgcgaaaatcgatttttctatgtggtccacttaagttgaccgcacgggataatgaggattatcccgtgcggttggattaagatgccagcacgggataattgattttcccgtgtgggcgtccgcccgatgccggtcgctcgattatcccgtgcggttccactcatggcccgcccaaaagggcccggcgtccatgaaaaatcattcgtgtagtagtgttatttctctagttgtatatcaatctaatcttgtacgtttgtgtatcgatttataacatcacaattaatgttactttttcctataactatctaagtcgcgcgtaaatgatgggtttcatgacatccatgtatagaaaatccttatcatgtacgtgcagttgcctggctagttgtatatatcatatatgagctcgtagcttagcgggatgcgagtatggcgtgggatgcgaatgttagcagcatgccttttctatttactttggcggcttagatgcttagtgatcaggctgttattatacacagagatgacattagttttctttgaaagtaattcattaggttgatgcagatctgaccaataatcgaggctatagctatagccttagttaattgatcacttgttcttacaattcgtttaattgtaggaaatcaggaaccgatataggttagtcaaccatctcgttagtgcaatgagggatataaaagtcaccatataccgaattaatgagtatcatccatctatcatagtaaataattagattcctcaaaataacgatccaatgatcaagtagttaaaatatcacctggttactgtggccatcagttatcttagccggttcctatcaagaaaccgctgagtaatctggataaattaaaacaaattaaattcgaaatttcattaaattgtttctaaatttctgataaccaacgaaacgctagcaacaaattgttttttttatgaaacactggatagaatacacaaagattccattaattttcataattccttttggcaataatttctaattcaaaaaactagctgggtgcagaatgcagagctgactaagaacaagggattgtttggaagagcttttagcagctatagcttctcacagaggccgtgtttagttctttggccaaatttttttaaagtatacggacacacatttgaagtattaaacatagactaataacaaaacaaattatagatttcgtctgtaaactgtgagacaaatttattaagcctaattaatccatcattagcaaatgtttactgtagcatcacattgtcaaatcatggcgtaattaggctcaaaagatttatctcacaatttacatgcaaactgtgcaattggtttttttcgtccacatttaatgctccatgcatgtgtccaaacatttgatgtgatatttttagccaaaatattttaggatctaaacacacccggaatcttcagctcctcaaacggtccatattgttacccaaatttttctaaaaatccatagttgtagaatccagaaaatgaaaaatctaaaagctgaaaaacccagcgtctctaaattttcagaagttggttaccaagcagaagaatatcaaatctgcggctcccctaaacaaggcccaacaatcagccacctattgagcaaaaacagcaagcaaaatgcaagcatttaaactccattgcttagatacaaaatcctttatgctttgatttgatccaagctaacccaccagccatggcggaggttgtacagctctaccacctcatcttgcttctgccgctcttcatcctccccttcctcctcctcctccgttagttgtgccggaatagtaatattttccaatttccaggaattttaggaaatgaaatttcgagggactttgcttaggaccttggaactctaatgattctacgactttatatgagttcttgtatgaatttttgaatggtttaggaggggactcgaacctcgaaatttgaatcttagaaatttaatttaggatagaatattttggtcaagattttgagttcacaaaggaatgaattaattgagatctttggtactcaaacctagatacactcaaataaccaaacttttgaacatagaattttattaaatagtttttaagggtatacggaaattggggcgttacaggatttgcagcgaagcttatgtcttcttgattcttaacctaaaataatgtcttcttgatcctaacctaaagtaaagggattggcaacgtacaaaaaaaatatcaaggacctaaaaggaggtacacaacgatttttttttaaaaaaggcgaaaattagagaaagaacttatctctactattataaaaattgaatatctttttgccagtactttagcactgtcaacgagaaatctcataaaccggatgaatagggtattgtggtaagttggtatgagaatttacacgatacgacatcaagaaaacaagaagacaagtattatactggctcaggcccctcataaggtaatagctctagtccagtttatatgagattgatatggaaaactacatattagaatagagaacaatcaatcccaagattggcggcgagacccctcgtcgagatgatttcgacgagatctcccggtgagtaggcttcacgtcctccggattgtaggctatggtggtggtattggcgctatgattcgatgatctggatccctcaggggatgtatcttttataccgtgaatcaccttagtctccaagtagaactcggagacctacggaccctgcacgatataatataaacccaatcctcaaggtagggctctactattcacttgtccatgaggataattttcatagtctcttgtcattttccttgttgtatatggaagtatatcgtacatacgaaggtatgtcgtatctgtatatttcatatgtcataggatagtaagtatgccttattcgtaactatgacaggtacgtcatccgtatatgagtcggttttaagttcgttctcttttgaaaatacatatccgtatttgagtcagtttttaaagttcgtttattttttaaaatatagaaggagtcgtataagaaatctatttaaaaaaattacatgctagcttgagacgatcggattcctaattgcagctcatgattttctaaaaaaaatatgtccaatcgaattcctatggcgaatttcaccttaactaaaccgtataataatattattattaaaataatcttcacccgttgcaacgcacaaatatttttttctagttatcaaataaataaaaggagttagactttgaaactagaccggctagcctatcatcttatggagctagctataaaacccctgaccgttccgcggattttctcaaactagaaaaacgttgctacgtactgttgtcgcacctagtgctagtcacgtgtagtacgttgcttagctggatttgtataaatgagggtattggcagttaacacctggcgggggatgcgagaatattagcagcgtacttcttatattaactttgggggcttagatgcttagtgatcacgatgttctatgcacaaagactagctacagtcttagttaattgaggctaagattgttgatgcagattggatggagtattcaaaaaataatccattagttgatgcagatcgatctgaccattaatcgaggctagctacagtcttagttaattgatcacttgttcttataattcgtttaattaccaacaagttggtcaactaatctcgtccagtacaaggtataaaagtcaccctactgaattcatgaaataatctcgggaaagatatatcgttcgattctccaaacattacgatccaatgggcgatcaagtagttagaatcatttaagaaaaaaatagaaaagatggcctcttgggttgccttgcgtggggaggctccctagccctagcccgcctcctcatccgatctgctccgcctccaccatagccatcggcactggtgggcggcggatgtagatcggacatttaatgctccatgcatgtgtttaaatatttgatgtaatatttttggccaaatattttgagatctaaatacacccagaatcttcagttcctcaaacagtccatattattactcaaattttttttttagaattcagaaaatgaagaatccaaaagctgaaaaacccagcatctctaaattttctaagggactagcttaaaaaactgtcgagtgttttttgaggggaaaacttttaaatctaactatagtatataatttcactagaactatactataataataactggtacatatatgtattaaaataatatatacaactttatatctaatttatatagagataacaatatagttatagtgtagttacactatagttacaatataattacaatgtaattatagtgtaactacaatgtaactagcatataactgaaatgcaatttagatgtaacatgaacaaatttaccatatacatgtgatgatgtggctagcttatgaaaagagggtttagatccggtagcaaaatatctcagcacaaatcttaaagcgaaatcgacggcctaaaaatttgtcgacagtcatttagcagtttcgattttctaaagttggttaccaaccagtaaaatatgaaatctgcggctcccctaaacagggcccaacaatcagccagctattgagcagcaacagcaagcaaaatgcaaacatttaaactccattgcttagatacaaaatcgtttgagctttgatttgatccaagctaacccaccagccatggcggaggttgtacagctccaccacctcatcttgcttctgccgctgttcatcctccccttcctcctcctccgttcgtcgcgccgccggcgtggcgcctgcggccggctaccaccgtcgccatgggcactcccggtgatcggccacctccaccacctagccggggcgctcccgcaccgcgccatgcgcgacattgcgcggcgccacggcccactcgtgctgctccggctcggcgagctccccgtcgtcgtcgcctcctccgcggacgccgcgcgcgacgtcatgaagacgcacgacctcgccttcgcgacgcgccccatcacccgcatgatgcgcctcgtcttccccgagggctccgaggggatcatcttctcgccctacggcgagacgtggaggcagctccgcaagatctgcaccgtcgagctgctcagcgccaggcgcgtcaattccttccggtccgtccgcgaggaggaggtcaaccggctgctccgggcggtggcggcggccgcggcgtcggcaacctcgccggcgaagacggtgaacctcagcgagctgatgtcggcctacgccgccgactcgtctgtgcgcgccatgatcgggaggcggtgcaaggaccgggacaagttcttggcgatgctcgagcgagggatcaagctgttcgtgacgccgagcttgccggacctgtacccgtcgtcgcgcctcgccatggtcgtcagcaggatgcctcgccggatgaggcggcaccgcgaggaggtgttcgcgttcttggacgccattatcgcggagcaccaagaaaacagagcctccggggaagatgaggaggacttgctcgacgtgctcctgaggatccagagagaaggttgcatggagtccactgttatccaccgaatccatcaggacaacaattggaggaagtactcccatgaacacacaaataactcaaaaaaaagtacaatcgtaatttcacgcgaatagcaaatatcatcgccatctatagttatactctgtaatctctatctctactattacaaaaaattaaagatatttttgtcggtattttggtccgtcatctgtgtatgagttggttttcaagttcgttcgcttttaaaaatacagatccgtatttgagtcgggttttaagttagttcacttttggaaatacagaaagagtcgtataagaagtctttttaaaaagctcgcatgctaatttgagatgaccagatttctaattgcagcttatgattttctagaaaaatatatatcgaaacgaattctcacagtgaatttcaccttaactaaaccatataataataataagataaaaataatctttatccgttgcaacgtacgagcattttttttctagtaataacctgccactttgtaggacacacaaacgagagattttgcttatttcctaacccccacaaatcctaagagctctagctcaataggcacctaaaaagtaacagcaaaattaacataatcatatataatatattagataataaaaataatttgttatgggcttcaaaaaatatatacaatgagctatttttattaaaagaaatccgttgtaacttagtagtgttatgctagtaagaataacgcgtgaggactgaacctacacgtcaatgacacatatatactataattttgttttttgatacaatgatatttttcagcaccataatttttttacagggttaccaagcaaattagcaaaaagttaccatggcttttccacaaaatgtagttacctgaaaatttggcttcatggtacacaggacttgttcaatgggggcagtgagacgacagcgacgacgctacaatggattatggctaaactcatgagaaacccaagagttatgcaaaaagcacaagatgaggtccaacgagtattcattggtcagcacaaagtcacagaagaaaacctaagcaatttgagttacatgtacttggtcatcaaagaggcgctccggctgcacccgccaagaccaccactgctgccacgagagtgtcgaactacttgccaagtgctagggttcgatgtgcctaaaggaacaatagtgctcgtgaatatgtgggctataaatagggatcctaagtactgggaccaatcagaagagtttatactagagagatttgagcatgttgatatcaatttcaaagggatgaactttgagtatatgccgtttggagcgggacgacggatgtgccctgggatggcatttggtctagtgaatttagagctcgtactagcgagtctcttatatcactttgactggaagttatctgacaaaataagtcggtgacctagacatgacgcaggagaggggggccaccacacggcgactccatgatcttttgcttgtccctgtgattcgagtgccgttaccgttagactcgcgcagctagctaggtgctagataagtagcttgtgattttttatttcttgataaagcgaccaaatatattggttcactaatgtttacctatgttcaaaccttaacaattaaattattacaaaactacttcaactcactgtgcaattaattacatttgtacattccgatatgtattttaatatacagtttctctgtgctattcatcttttgttattgttatatttgcagatttatgtgtcatatttattagacgaaaagaagtagaatacaacacaccacatatgtccggcggcttctctggataggaagaaaaagaagcatgcagctacatgcaacttccctacttcctctggatccactttcatggcaaatcttaaactggtgtgacaaacaaggaccgtacgtagtttcttttcctttctccttaatatataaaaaaagtaggatcccatatattatagaatggacggagcgtgtggatccatatatacacccctatgtgttgccagtggagagcaatattcgactgctcttggaatatcgtcaatcacctagactgtggaaaagacactttcatggcaaatctcaaactggtgtgacaaataaggaccgtacgtagtttcttttcctttctccttaatataaaaaaaaagtaggataccatatattatagaatggacggagtgtggatccatgtatacacccctatgtgaaggttgccagtggagagcaatattcgaccgctcttggaatatcgtcaatcacctagactggggaaaagatgttgtcaaagacataagcgcgcgttgtgctacctccaaagctattccaagtgaccagaaggataagagaatcgaagctccggaggataattttcataatctcttatcaatttccttattgtatatagaagtatatcgtacatacaaaggtatgttgtatccgtatatttcataggtcataggataggaagtatgtattatccgtaatcatgataggtacgtcatccgtatatgagtcggtttttaaattcgttcgcttttggaaatacatattcatatttgagttagtttttaagtttgttcgcttttgaaaatatagaaggagttgtataagaaatctatttaaaaagaattgcatgctaacttgagaagatcggattcctaattatagctcatgattttaaaaaaatatatatatccaatcgaattttagtgaattttaccttaactaaaccatataataataataagattaaaatagtcttcacatgttgcaacgcataggcattttttctagttatcaaataaataaaaggggttagacttcaaaactagacctgctaatctatcaccttgcggagctagctatagaacccctaagcgttcctcggattttcttaaactagaaaaacgttgctaccgtttgtcgcacctagtgctagtcacgtgtagtacgttgcttagatggatttgtataaatgagggtattggcagttaacacctggcgggggatgcgagaatattagcagcttacttcttatattaactttggcggcttagatgcttagtactcgtgatcacgatgttctatgcacaaagactacattagtattcaaaaaataatccattagttgatgcagatctgaccattaatcgaggctaactacagtcttagttaattgatcacttggtcttacaattcgtttaattaccaacaggttggtcaaccaatctcgtccagtaca

SEQ ID NO: 4734 - DNA, 33959 bp, Oryza sativa
ttgtaaatatttaacatttaggataatatttttattaaattgtacagagtggccaccaatggtttgtcaagtgtttaattgaaaaagggaaaatggtatatatggcatagatttgttttcaagactttatatattgtatctactagcaaatatgcgcgtgtgttgcatgggatctagtaagaggggttaaatgttccgttccactctattatactccctccgtcacatgatataagggattttgattttttgcttgcactgtttgaccattcgtcttatttaaaaaattttagaattattatttattttatttgtgacttactttattatccaaagtattttaaccacaacttttcattttttatatttgcacaaatttttttaataagacgagtggtcatacaatacaagcaaaaagtcaaaatctcttatattatgggacggagggagtagtatgttttcagtttttcttagtgtgtttcaacttttttttctatggttgttttctctatttttgtgtacgttcaccggtttttcagaaactttttttttagtagacggattgacaaaactctgcttttgcccttcctgcattataggaattacttggagtgaaaagcttggacaccatacgctgatcccttgtggtggcggtacaacacaataattgagaaatccattcaacatataatggtcatgcttgtgcgatcaaagcgtgggctcctgttctactcccatcgtatcctcaactacactgtttcctcatcttcatcaaactgcttccactgttgggccttactaatgcctagcgacaccgaccactttgcctcccattacgagtatctccacactctacatcgctgccttaaatgtcgcgtaggcctacccgacaccaccaacatggcctctgtcggcgtatgggtcaccgtcagcggccacttcaagcttccaggcaccaggcgcttcctcaagaatatattattcaaattatcagatgtattatttcttaaattgggtgtttgttcgttcatgacttcatgtagatcgaatccatgtgtatattaaaaagagtgaacctactttaattaaatattaatttatattttctagttatcatgggtccacatgtcatatggattatgatgcttgttactattatacactttgttatattaatgactcggttatttcctaattcacgagttggcgatcctttgacgtcatttaaattgtaaacttaccgatggagcagaaccaaaataggatatgatttatggttgtgcgcctggcgtgggaaggcaaatgggatgtgctgagtgtggatcctattggattctgacacgtgggatgcttcatcatcgacgtggaagcggtgaattttggtttgggagcaatcagactcgcacgtgttgctagggcgccagtgcagaaacacgaaaatcgttaatgtacgccatacaaccacgaataatagaaacactactagagatggcagtggggtcccgttcaccgtttccctacggtgaattcatctattaggtgacggtgatggttaatatgtatccactatgggggatgaaatggttacaaacttattaccatcgaggatgacgggggcagggacggtgcacgattccctgtccccgcccccgcggtgacccgactttactatatagaggactaattctagactttttatacattttggcccataatactgaagcccatttaataggtatatatataaaacctaaccctaagtcaaccggtcaaactccataatccaaatcctcagatccagtctctcctccagtcctcctgctctcggttgcggcgctgcacctgcgtgcatcgccagttcgccactctgccagccaccaggcacaccgccgtgcactgccactccctagccaccaggagcaccactgctcgaaacgcgcacgccgccgcctcctcttgcgtggcacaggcacgggtgttgtcccgtccctccgtcgactcgctgccgagagcaccgccgagagcgccggtgtcgcgccgcgcagcgcctgcggctgtcgtcgcgccgccgggagccaccaacgccctccatcgccactcgccagcacgccgtccgctgccacgtcgtccgctgtaaccacggggataaattcaccacgtggtgatcgggactggagaaatgtagccccgttatggttgacggggcggggatggtgaaattttatcaccatggggacggggacgtggatgtgacccctgacggtgaattccccgttgccatctctaaacactacaaatattttaaatatgtaaagataaagataaagaaaaattgggatcatgatgaaagaaaatatgaccgatgtggtgagacatgttttcgtctttttttattatagatcactgtccttttttaattagaaatttaaattgtttgtttattttatagaaaccatcaagaaaaaaagagatcggaagggaaagaagcgaagcaagcgcagccgctcagggtggggtggtcttttggtggttagatcttttgtccttctgtgattaggaatttagatggtttatttccactactaaaaaaaacccatatagggaccggtcttataggtgccggttcatttaaaaccgacacctataggccttttccaacctagcttcgcactatgaataaaataaagaatcgacacctttaagcattataagtaccagttctcaagaaaaaccgataacaataatatgagtgccagttctagcacaaaaaccggtacaaatattataggtgccggtttttttaaaagaaccgacacctataatataaatataggtgccggttctacttagaaaaaaccgaccggtcgacgtccttatccactcgcatctcttgatcggtcgctctacctcatccactcgctcctctcactcctcactccatccactcgcatccccctcccctctcgccctctcccgcctcctcctccttctcctggcagcgatgcgctgacagcggcagcgatcgcaaggaggcagcggcagtggccccttctccagcggcggctacccccttctccttgcagcggtaccttctcccggtagcggtggcggctgcaaggagacagcggcggcggccgcaaggaggcagtggtggaggtccccttctcattgcagcggcggtggccccttcttctggtagatatcatgccaacgtcagcgagatgtcagcatgaaacctaggcacagatgccatgcttcttccatgttctcatgttgaaaattcatgccaattatttctatcacactcaatgacgattgcggcggcgaagcctgcaattaacactacatattgccttgtgcaggtgatatcatcaccaattcaccattagctatcttacttgcctcctataaataccctcagccggaagggttattcgtatgcatcaaaaacacacaacgctaactcatcacgagtttgatacacatagtaatcctacgtaatcaagcttagattgtgttaatcaactcaatactgcaaaaaatcgtttttgcaggcggtcaaattagggtaaattaagtgactgtaagctttgttaaacgccatggatttgatgaagagtaatccgcttcaggggagcccatggagcttgttgaacttgctggtattgatcattgtcgccgccatgatctgcggcgagctatgtcgtcgtcgtcgtcgtcgtcgtggcgacgagaatggtggcgccacgaggctgcctccggggccatggcggctgccgttcgtcggcagcctgcaccacctcgcggtgatgaggccgcgcggggtggtggtgcaccgcgcgctggccgagctggcgcggcggcacgacgcccccgtcatgtacctccgcctcggcgagctccccgtcgtggtggcgtcgtcgccggaggccgcgcgcgaggtcctcaagacgcacgacgcggcgttcgccacccgcgccatgagcgtcacggtgagggagtccatcggcgacaaggtcggcatcctcttctccccctacggcaagaagtggcgccagctccgcggcatctgcaccctcgagctgctcagcgtgaagcgggtgcgctcgttccgccccatccgggaggagcaggtcgcccgcctcgtcgacgccatcgccgccgccgcggcgtcgtccacggcggaggcggcggcggtgaacatcagcaggcagatcaccgggccgatgacggacctggcgctgcgcgcaatcatgggggagtgcttccggtggcgggaggagttcctggagacgctggcggaggcgctcaagaagacgaccgggctcggcgtcgccgacatgttcccgtcgtcgcggctcctccgcgccgtcgggagcacggtgcgcgacgtgaagctgctgaacgccaagctgttcgagctggtggagtgcgccatcgagcagcatcgggagcagattagagcggctcacgacaacggcggcgacgacgacgacgcgcatggccatggcgacaaggagtgcttcctgaatactctgatgagaattcagaaggaaggtgatgatcttgatgacactcaccatggcaaccgtcaaagctgtcattcttgtaagtatctacactacactagctactacctccatcaatttttataggacttgctttattttgaaaaaatcatcgatacttttattaatagacgtgaagctatattattttgtatgtagtgcctatatttcaggcgcctaaaatttcttaaaaaattgttactttttcatccctaagataaacaatccaatggttctcatcacttatctatcactacttccatcccataatatagtaaatagtaccatatgataagacatattccggtaccacgaatctgaataactcatgtctaaatttgtagtcctaaaatatctcatgcagtactagctaggttactatggtataggatggagggagtatttattacttataattctcccatggttggttaataaattattctaacaaaaactttacaatattacatcaaaccaacttataactcattaaaatttacaaaattgcatgcaaaaaaattcagaaaaagacgcaaataaagtaaaattaatcatgtgtaactccaaaattgtagttaagatgaacttaaattccatattgaataaggcttagtaatatgaaattttaggttaccgaaaatatacaaatttttaggcatctaaaatctagcaaatctctatttaatttctaagagtcgtttgcaatatgaatctattggtacactaaatatacttgcaatttgacaaaattattgacaacataaagtggcaagtatagatttgtgtcttgaaaagaatttcataatctccaaagatttattagatttcataaaattatccaatatataaaattatggtcaaagtcacactttaaataccgtggaaaaaactccaatgtcaagtatcttttatcagagggagtatatatttatgtatatatggcttcccgccttgtgctttccttcctatcctccatcaacagaatgtataaattttatgtagcactgtaaatatgcatgtttccttttaacatgcactaacatatgcatgacatgcattggccaggacatgtttgcaggtggaagtgaatcaacatcaacaacacttgaatgggccctgtcagagcttgtgaggaaccctcatgtgatgcaaaaggcacaagcagagatacgacatgctttgcaaggcaggactagggtaactgaagatgatttaattaatttaaagtacccaaagaacataatcaaggaaacactacggttacaccctgtagcacctctacttgtcccaaaagagtgtcaggagtcgtgtaaaatcctcggctatgatgttcctaagggaacaatcatgttcgtaaatgcatgggctatcggcagagaccctagatattggaacgatgcagaagtgtttatgccagagcgttttgagaaagttgcagttgatttcagaggcacaaactttgagttcaaaccatttggagcaggacggaggatgtgcccaggaataacatttgcaaatgcaacaatcgaaatggccctcactgctcttctataccacttcgattggcatctccctccaggtgtaacaccggatgggttggacatggaggaggaattcggcatgagcgtttcaaggaaaagggatctttatctacgaccgacactccatatgggacttgaaacaatatgatgaatacacgcgtgttgtcatggaaaatgttgataatagccgaatggtgtatgtacctagtagaaaaaaaatactttctgcaaattatagtacctatacttacaagatgtttgggaggtaggaactcctgagatattcagatattccagagctccgagtgcattagtatagaaattcatgcacgaacacaatatatataaggcgttgctgtcatgtacaagagctgtgttttttaaagataaaagtactgtacgtttccagttgtaatgtaacaaaagtttgcaagatatatgcaccttttgaaaaattgaaacatgagtactgcatctcaacgtacattgcaatataatttgtcttttatacctgaattaatttgtgcctcaagctagtaccgcgtgaagaaaatgccatgtggatcgatgagaacagctgatctcctacattaaggtcaactcttagacttaaaaaaaggtgatttgatagtgaatcaccgaactatactatatattgtgtgaagtaatactcaatccaagaagaacggaaatttgggtaataaagacaaactcgtgtgttaagtgcatgcatacgtaattaagcaccgatgaaatagccgcttaggagtcaaaatgattcttttattttgaagaaaatttgaaacgaaattctaagttgacttaaaaagctgactctgtttttttctgactgctgactctgttaattattttctatcaatcacccattgttttttatctaaaaccaatctctgttttgaagtaaatgcagatgcagaagtagcatagtacaggtttacaggctcatggagtatacaactcagaaaacacaattacaagggtctaagtaatgaaatcatcaaaagctagtgttcttatcttctaaaaaaaactagtgctcttttgaaagtcaaaataaggacaaatttcaacttagttcgtacatccgaagccaagaaatttgattgaatttcgacaaagaaatcaaccgtctcatctagctcgtctccgtgttaggaacaggaacactaacagtagcatgcagccacagatcgctcttcctcctcgccgtgatcccgagcccctccgccatgtccagctcgccggcggcggtgcctccggcgagctcccagtcgaagtggaagaggaggctcgcgagcccgagctccatgatggcgacggcgaatgccacgccggggcacatcctccggccggccccgaacggcacgaactcgaagtccgtccccttgaagtccaccgcgccgccgtcgaacctctccggcctgaactcctcggcgtcggggccccagaccgcggtgtcgcggcagatcgcccacgcgttgacgagcaccatggcacgctccggcacgtcgtagccgagcacgcggaggcgtggctcctggcactcccgcgggaggaggagtggcaccgcgacgtggaggcggagcgtctccttgatgacgaggtggaggtagtggaggtccgggagggcgtcctccgtgacgtgggagtgcccggcgaggacgccgcgcacctccgcctgcgccttgcggagcgccgccgggttccgcatcagctccgccatcgcccattgcagcgtcgtccccgtcgtctcgctccccgcgctgaagagatcctacatggtggacggcgacggcttgtcaatttcgtcgaacaccttggagggagaagaatttggtcgaacacttgtggggagagagggtgggagagcttacgatgattatggcacggatggtgcccatgtcgagagggatctggaggccgccatccttctggatccggaggagcacgtcgaggaggtcctcgtcttcctcgtcgcgccacccggtggcggccctcctctggcggtgctcctcgatgacgccgtccatgagacgggtcatctcgcggctgtgcgcctcggcccgccgcgccgtcccgctgagcgcgcgggcgaggcgcgacgacgggaacacgtcggcgagggtgaacccggcggccaccttgacgccctcctccagcctctccaagaacgcgtcgcggtcactgatccggtcacccaccaccgcccgcaccacggcgtcggtcacgtacctggcgacgagggagctgacgttcaccggctcgggcgtcgtcgtcgacagcgacgcgacgagggcggcggcctcggcctcgcgggcgcggcggaggcagcggacgcggcgggcgccgaggagctccgtgacgcagagcttgcggaggcagcgccagtgctccccctgcggcgcgaacgcgacgccgaggccgtcgcgggtgagcgcgcggagcgtcgctgtctgcggccgcgtggcgaaggcggcgtcgtgggtcctcatcacctccctcgccgcggcgggcgacgacgccacgacgacggggagctcgccgagccggagcagcatgagctcgccgtggcgggtggcaaggtcacgcagcgcgcggtgaggaagcgcgccggcgaggtggtgcaggctgccgatgaccggcagctgccatggccccggaggcgggttctcgccattgttgcgtggcctgagcttgacgaaggcgagagatagtatcagtagagtggccaagaagagatactgctccatgtttctctgtttcagctttgcagtggttgcaaactttgcaatgagaaagcaagctttataattttgcaatgagaaagcaagcttgagaagatgccaaaagaaaaattgaaatcagaatgacgcccaattcaaatgtttttgtatttctaaattcaaatttccagctgattaagggtatcgaccggtaaactcagaactttcagatattttgttcaggaattgagtttttttttcaaacggctaatcagattgacggcgttatattaatagagggaagtttagttatacatccaaacgctaaaagtaaggaaaaaactgtacatgtgtaactgtaacatgcttgcacgtcaatcctccttactcctcgtgacaacaattttcccatgtgttttgcactggccaaaccccagcatcatagctcatcatcttggaaacgaataattatttgatgatttgtagcttccttttctctaaacattctcgcattattcctttctttccccattttccagtcaatgagaaaaaggctgatttaaggcccttttttttccccttcgggtggcttgtctcatgtgtccttcaatccaataaatctctactgctgttccagcttgggatgctctatccaaaaatatgtgaggatgtcaaactagatttgctttgagattgggcattattcgttcaggaatagctagccatgtcacaagctagctggatacacgaccagccatattaaacgagcaggagaatggcgagtgattagtatattactccatatggagacaagtagtcaagccctgcagcaaaggccatgtttacttagggatgcaattattttgaaacctaagccagcttttgctggttttataataagagagggagaaactgtacaaagggatgcaatttcgcttgtgcataaaccttataacatgcagtagatgctttgaacagattattaattgtttacggacgatattgtatttaaacatgcagtacatgctcggaacagattgttaattgtttacggacgatatcgtatttaaagatgagcatgtgaattgcgattggactatagtatatcatgctatagaagattagtattcagatcaagaagcattgtggcagctaaaacaaagggcatacatatattattctgtcattttacacagcattaaacaattctccactacagttgtgccatgcttattccataacaaacaggactctgtgcatggcacgaggttgctagcagaattcagaagataaaaaatgtcctttgttcactcgatttcggttcacatagacgaggtctaagtacagttttcggaagatcaaaatgcgccataatctgattacaataggatctttctcagcttgcagcttcagtatcttgctatcttccaagctcagtatcttcagtgcggtgtagatgacaagttagcagttgtagcagcactatcacctagaagacgtctggattgcaatggccggagataatgccgtgttgcgtcgcttgggcaagatgtaatgacaggacataattcctatgctgcaagataagagatgaacaaccaagattcttgttagaacaagcattagaaataacataaaagaactgaaaattaatgaatgttgtgataaacgcacaaacctgtagcgcctttatctccttttcgtacgtgtcgataatctgcgaccgctcctgcgacattttcttttcataatcattgagccgattgtgctgtttaagaaatgcgcgcttcaggacaccgttctgttcgagaaggcctcctaacatcagcttcagtatcttgtgttcctggaagtatcagtcaagttgatcagtcaagcttccataactttcataactggaagatattgataattcaagacgacattattataactggatggagtagtatttggtacctcgcgcatcttccgcatttcaactggactgatacatgctgcagtggatttctcgaataggtcaagtaacctaaaggctcggttcttggcatcaaccaaatctagagcagaggacatctccttgacaactagctcagcccattcagacccattggatgggatgttcatcgctgacaaatcagattcaactgcaacaaccatcagtaaaagagagtttcagatttccgcaaaattaactaattggtctggaagggtaatcatgaatgaaaggaaaacaaatgttaccatacctttaggagagaccacctcgtttcctgtatcaccggaagccgcctctgtgatctcagtatcagtatgagattgcaaacgatgcttgaatcccctaattgcagcgtccaacacattaccggacgcttcaaaaaagctcttcaggagctacaaattcaaaaagagataaaaaaaatacagtatcagacaaactggcacagagatcaaattagatacaaacacaatgaacaatgatgaatcatattcaacatcaaacacaatgatcaatgctgaatcgtattcaataccaatatgatgtaacatctaaagtctcatcagtaaaatcaggattcttaagtcttaaccctctacttactaattaagtgcctgtgcaagtgcaaacatgaatcccacaaaaataatagatgcgtgctaatttctgcggctgatgattcattcataaatcacaatcctttcatctacatcgtgatcgaatagcgctcctatcctatggtgaagaagcttaaaaaaaacagagcaaccagaaaaaacagaacagaaggtaaacaaagatcgatggatgaatcctgcaatacctgcggatcttcatgggggaagatgagctgcagcacttcgatcgggtcgaactccaaactcaccccgaggtcagccgcggaggcggccgacgacgagcaccggccgcgcttcgccaggtggtgcgacgggagggggaacgggtcgtcgaggatgtctgcgactgagaacccgcgcttccggctgctggcggcagcgaccgtggccgccattggtgcgggcgatcggaggggagagggtgtaccggcggcgaactcctcggatcaaaggcggagagtgattcggatggaccggcgttgcggcctcgcggcccgcgtggcttgcttttataggcgagaaagccaggggaattcgagatcggagagccgagtccgattccgaagcggctcggtaggggcagatccaacttgggacatgggggttcagttgagccccaaacttttcggggggaaaaaacaaactgttacttgtattaaggttaaggctttatttagtacccaaattgttttttcctaaaaacgtcacattaaatctttagacaaatatatagagcattaaatatggataaaataaaaaactaactacacagtttgcatggaaatcacgaggcaaatcttttaagcctaattagtccatgattagccataagtactatagtaacccacataagctaatgacagattaattagacttaataagggtctgctcagattgtagtcaaaataaaccttaccagatggcaatattgtcaaaattttagcaggatttcttatgtattgattaaatttggcaacaaactagacatggatattttttgacaactttattaaaaaatggtatggttgaaaatagcatcaaagtgaacaggccttaaattcgtctcgcggttttcagatgagttataaaattagttttttcattcgtataaaaacatcttccgatattcggtcaaatatccaatgtgacaactaaaaattttattttcgcaaactaaacaaggcctaaggctctgaaattaaaagaagagcctcttccagctctcgaagagaagctagggttaacgaacgaacgcaaacaatatccagacaaaagtagtcacgatgggagagagagagatgaatctgctctgctctgctcgccagatggagatcgccgcccctgtcccttgttctgttcagccggcactcgtcttggcagcgcagggagcggagacaaagagacgggagattttctttcttttacgctgccaaggaagatattctactcggagaatatttaattatttgtcatccttactactggtaattaagaatttgtcattaaacctacgggcctgtttggcacagctccagctccggctccacccctcctgaagttggagctcagccaaacagtttcagctccaccaaaactgggagtggagctgggtggagctctctcacaaaatgaacagacccagacccaactcctggagttaaattgaggagttggagctgtaccaaacaggccctacgtgtcataaactgtgagtgataaatttttaattaccatatcttaaaagtggcaaaaagttaatacgagtactctcacatttatctcaatatttttactactttaaaattagctatttctttataatgactagttgcccacgtatcaaaaattaacaaactcgattagcgatcgtatcgacaacaaactcctcgtaccaccaacaactatcactccacgcatcgccaccaccgctctttctccatgagccaccatcgttgctcatctccgcctttgcatgtgcaatcgcaccctcaagttatcctccatgggtcacccttttttctcgtcccctctcgtcatgcacactatcattatggtcgccattaaggtcggtggtgtcggtcttacagagacacagggagtcaaggaggaggcaggagtcgacccgatgaagagcgaagacactagatttgggctccttcttgctgaatatagcggttccccaattgttggagggaaaaagaaaatggagagagagagagagttagtgtgcggagtggttcctgagtcactgtgatgtgaccatcaagtatatgtaaccaagcataagaaatataaaacattgtcaaagaatgtatcggatgaatagaggatctacaagatattcaagtccaatgagttgtggaatatagttcggtctccggagacaacactaactttaaacagacctagcatcttcatgccaactccgatttgggtgatcttcgacttgatggaaagcttatctcattacctttcaaatgcatccagtctcatatccaaattcattccgagtcaacgggaatcatcaaaacaaggcagtgttgttgctgaaaccgaacttgggctttcagccttgtaatagactaggcccatctcggaagtgtctccgtccacctccacgaattagaacataaccctagatctattttcctctataaatgtctatgcacaccctttagaaaaattgggttttgtttagttgaattttgccaagtgccattcaccttgtctctagtcctcgctcgattagtcggtgactataaatttagagcccccaatagttggtgtgttgatttgccgggtcgattagatctaccacttcaatcgcaactattcctttgtacttaattacctattcgcaatatttagattgcatcttatcttgttcttgtagtgttctctcgtttgcattgtagggatcatcaaccgtgtgccacggttggtacgacatcgtttatggtgtagcgattgcacagcgtcctagacttgttctggttggtagccacatcgcaaacgtcgcactcgatcaaagtgagagttatccccctcatcagaagatcgggccacgagagagagcgtcgtcacaccggacttggatatggatggaatagggtggtccaaattgaaatgtaaagttagctcttttgtaaatgaaaagaatggttaaagatgacatagtatgaaaacttttaagaatacatagtacgaactataatttactttttttctttagcacaattattaaagatgagttgtccattgcccgatactactgtgatatactaagtctttagcataattaaagatgagttgtccgggattacccgagagtcgacttgtgatatactaagtgtggttgggtcggtgtacttagctattactaataatctcatgatatgttgatgcatcaagatatggacttctactaacacgggttaattaattatggttagatagattaagctaaaaaagataaaattaatgccatcaattacgctcaacaataaagcattcgactctggtctccttttctcactacgtgatatacaatgattatatcagtaggcatttccataattctatcatattaaatttttttctacatatacattaatttggactaatatttttctcataattaaatagataataaatcattttttatatttctcctataaaatgtgaatagggcattgtataatgcgaaaattatattatatgcatgtaatttaatgtgtaagatatggactatttaactttttctaaaaattttgcacaatagtagataggtaatgaactgaacaaccataaaaaaatatatagagaatccattgtgtgttactgattttgtccttgttctacaatatgtcactaggtttgccaagttctagtatgccatcgcactatgcttaacttctataacataccatcgtcgtctagcttccgttagaattgtacaattttgacataatgaccgaaatacccctaggacgaaaaattacaaatatcagattgtaacaaagtttgagatgcgcaattctctgccttgtttataatgacatttcggattttttgccaaattttagaatttccgtcccatggatatttcggtcattatgacaaaattataccgaactaacggagtctaaatggacggcgacggtatattatagaggataagcaaagtacaatggcatattgtataacttgacaaactcagtggcatattatagaacagggacaaagtcaacggcacacaatggattctctctaaaaaacaatctagtcaaattgtttgtttatctcattcaaaacaaaacattttttttatcaaacacgttaggagaacttcaaaagaaggtaagaaaaagaggaggttagtcactagctcaaacacacgtggggaaaagttactcacatccatggtatggtatatgctcacattaatcgataatatactaatattattaaaattgttcttcgtcgtaatacggtgtgaaactaaaactttaaccttatattcttatgttgttccatcttcttcttgttttctcattcttattcttttataataatattgccacaaccaacactattatttgcacatgaatattagtagctaactcatgtgtgtgcgctccgtaatatatattattgttgacgcgaaaaacacgcactggcctgagagatctgcttaactctagtgcaggtccaaagcgattaccttcgggttctgagtgtgccagttggtttgatcctgcaaccaacaagaaataaaaagggacaaagttaaatccgtcaacgatagccgatcggctggattgacaatgacatatcgtttggagccaagtcgatgtaacttgcatcagatcggcaagggaagataaagcgtagagattattagatctactcgatcggttgaagatgtcaacgatacacagtctatctaatgaaatacatttaaaccaagtgattggaatagatcggacgatgtgccgagataatataaatcacttaatatctaaatgtgcctcaaagtaaagattgtgtatgctcgcagcatagccgatacagcaaacctagcatgtatcggctagtactccagtacgactctatactaagataacagggtaaatgaaatatataaaacgcagatcaatctagcaagtaagatggactggcagactgataaagagcaagatatgcttcaaataaacgagatcttaatataaagggcagatttagaagatcgagaaccataaaaggcacaagacaactaaaccagataagatcagctgaaaccccgatgctatctctattagaaatcataggaaaagctagataaaacgattcaagacatcacttaacagatcgaacctaaccgatgcagcattatgcgtgaaaagaaacataaaatctaaacaaatcgatgaagactcattcaagatggtagatacgctgtataatctagctcaataccgatatctaaatctatcggttcttttcgatgatagaggctggccgatgaagttagatgacgggatcgatctaggctatacagcatatatgataacttggcgatttacatagacaggattagagtgttatagagatgtaagcactaatcccgataatgcaaaccgccataacaagctttacctcttcgtcggagatcgaacttgatgcagcccaactcgaaagcaaagaactcgtcgaaacaatagaaaaaaggtggcgatgcgccgaagtattattgaactgtcgtcccatgattacaaggtgtcgggtcatatttatacccgaggtacataacatgtccttgctggacacgactcttatctctattacaatttaaaatatgaacaagtcccttaggcggactcttaccaaaaatatctctaaagaaaagcgtcatcggcttgtcttcatcggatttagcgtcagccgatacatacgacaggcgatgccgcctgtagccgattcatacggcagccgatgatgctcatagccgatacgcactctcccttccttaaacagaattcctccaaatctggctttgactctagctttgaacccagcccatggccttaccaaatttggtcgttaacaattatctatgtttttacatgtgtaaacaataattattatctttattaatattattatatttatataagggacctgactagttttttaataagtggaaagatatttttattaaacataatctagaatgctataaagatttataatattgaacaatatataattatataaaaaattttatggatgaattagagattgacacttgttataaatccaattattataatgttatatatatatttactagttacatgtcaatgcattacaatgcgatctagagataaaaataagatttagtttatttctagtctaatttttatgatatattgggttttttatatttctttagagaaaatattgtacaacaattacataatttattgttttataagtagattagtttatcataccccatttataaaatcctacgtccgccactgcggctcggaatccgaagaggcatcgcgaaatcgtgacgtgattgtgtttacatcaagtgtaaaactttggcatgtcacatcgaatatacggagacatatttaaaatattaaacgtagtctaataacaaaataaattacagaatccacctgtaaaccacgagatgaatttattaagcctaattaatccatcatgaatttattaagcctaactaatatgtcattagcaaatgtttactgtagcaccacattgtcagatcatagcgcaattaggcttacaagattcgtctcataatttacacgtaatatgtgtaattagttatttttttcgtttatatttaatactacatgtatatgtccaaacattcgatgtgttggtgtgtaaaatttataagtattatacacattaattataagtattatacacggacaaaaatcccaagcatccaatcttacataaacacttaacataatcagttttccattgttttacttcacaaggaaacataatcgaatccgttgaataacacaatgcaaacacaaggttgacgctacaaaaattataaaggtggaagcggaaacacataaacaagtaccaaatctataaaaaaaactaatctttcaccttaatttgcagcacctcacgatgtggcaaatccggttgtgatctaatcagccgcggaggcggccgacgacgagctccggccgcgcttcgccaggtggcgcaacggtaggggcacgggtcgtcaaggatgtccatgaacccacgcttccggctgctggcggcagcgaccgtggctgccattgataccggcgatcggaggggaaaggtctaccggtctagggtttcggcgagcctcgcggcgaactcctcggatcaaagcagcggaggcagagagtgatttggatggggttgccgcgttgaggcctcacggatggcttggttttataggcgaaaaagccttgggaactcgagaagaagcagaactcgagatcggagagcgtgcgagtccgattccgaagcgcaggccgctagaatccgaagaggcattgccaaatcaacgtggttgtgtttacgacatgggtgtaaagcttcggcgtatcacatcgaatatacggacatatatttaaaatattaaacatagtctaataacaaaacaaatgacataatccgcttataaaccacgagacaaatttattaagcctaatgaatccatcattagcatatgtttattaagcctaattaattcgtcattagtaaatatttactgtagcaccacattatcaaatcatggcgcaattaggcttaaaagattcgtctcgcaatttacatgtaatctgtgtaattagttttttttgtttatatttaatactccatacatgtgtccaaacattcgatgtgatggggtgtaaaattttgccagggaatctaaacaggcctgtagtaatttttctgtcacatccacttttcgtccgtccgatctaggctgtgtaaagttttggcgtgtcacatctgatgtatggacacacatttaaagtattaaatgtagactaataacaaaacaaattacagaatccgcatgtaaaccgcgagacgaatttattaagcctaattaatccgtcattagcaaatgtttactgtagcaccacattgtcagatcatggagcaattaggcgtaaaagattcgtctcgcaatttacatgcaatatgcctaattagttattttttcgtttatatttaatacttcatgcatgtatccaaatattcgatgtgacagggcgaaaatttttaccaggagatccaaacaggaccctggtgatagccttcgttatgtacgaattacaagacacaaaattaaagtatcaatctaaatccattcaaacaatcattaattataattattatacacggacaaaaatcccaagcatccaatcttacataaacacttaccataattagttttccattgttttgttttaaaaaaaaaaacataatcgaatccgttgaataacacaatgcaaacacaaggttgatgctacaaaaattataaaggtgcaagccaaaacacataaataaataccaaatccataaaaaaaactaatctttcaccttaatttgcaacacctcacgatgtggcaaatccggttgtgatcgaatcagcccaaagatcttcataatagccatggagagccaatcgggtaagcactaaaggttccaaaaaaaaaagtcacaaattttcaaaggacgagcatccaatctggctgccgaggcaaagaacaaatttccgttcgtccgtctgtttccatgtcccgagcaagttgtgtgaaccgtgtgcatagttcgttgtgtccaactcggttccatcaatgaaaaaaaattgatgagccaaaaaaaagactcagatcaaaatcaaagatcgatgagatcaataaaatcatcgccaatactaacagaatgttgagattgcggcgatgccgctgttgcttgtcggaggtcgaggccactgctcgtcggggtcgctgctgccgccgggcctaagtccgtggccatcgccgctccgctgctcgttgcacatcgacgtcgaaaacgccaccgctcccgctgctccaatgcctcgtcgacgtcgaagacgccgcacccgctgctcgccgacgacgacgccactcctgctgcttgccaatgacactgccgctcccactggtcgtccatgccgaggccatcacacctgctattcaccaaggacatcgtcgctctcgttttgaggacgatccgatgaggcctgcatgaaggagagatgagagaaggagaaacgatggaagagatgtggatagtaggagatggattcggatcctgtgacgtgcaagagcaacgtcagaggcgtgcagttcctcgcagggttttaaatctcccgctatagctgccgctatctcccgctatagttgtttgaaaagggttctaactattcgctctcatgtacaatttaacagctatagctccatttagcccgctatagctgtttaagaagctaaccgctaaatggcttagcccgctatttaaaacattggttcctgcacatccaccgtccaatctcatctagcggctcacaatcgttcccccaataatcttcttcctcctctgtccactgaagcgtgttacactgcctccgccatggctcttgacctctccatccaacatgccacagacagcagcggcatagagaagggggagaacggcgaggagcgtggttgttgtgtcgctcccatatgcgggtctcatacatggtttatgcagcccagtgcagaaagttctcccagcagaacgagtatgcgtgtcgttgagtttcattgtagtgatgttcaagtactacggtccatctgaaatcaacaacataggaagaaaaatatatgatgatcgactgagaatgaagggagaataatatgttttttaccttcaatttagcaaaaattcgccccccctaccctcccaaccgatttgtgcacagtaaactggtcgagatggaaagcagttggcagtttggggagtatttataggcccaacacacctcaaacgggttaggtacacaaagcccgtgaaaggtgttgttcatacctcaaacgggcttaaattgagttgcccgtcacaagtatcgacctacctgtgactggccagaaaacaaatccgtcacaggtggcggcccatcacctgtgacggcttataattacgcggcccgtcacaggtgaggtgataccagtgatgggttggagggaaaacccgtcactgcctcacctatgacagctttgtcttttggcccatcacagataaggtgatacctgtgacagaccgcagccagatgcctcaccgatgacgacatcccgtatgacccgtcaaaggtgacggtcaacacctaggaattgagtggaatcataatttggagttctttcagatgattgctctagcaagactcaagtttgctcaaaggggcttcctggaggttttctttttggcagcctggcacatttagaagaagaggaatggtttaatctttaagagcattcagccctccttccaagcctagagatctctttttgtgaaagaagttcttttgcatatgtgcagaatgaaggatcccttaaagcaaattgtttttaattggttacaagctttatagttttattcagtttcttcttctgtaactttgtaaatatttttcgagttttataaaattacactgctgggcaaagtcctggcagtaattccggtcaaaaaaaaagtgacggtcatcagtgaccaaatcgtttgctcgtcatagatatcccgtcagaggtgtgaggatctggcgtagtcaggggcggatccagcatgggggcggtggggtctcgagcccccactactggcgtgaagactatgagagcccccacaaagatcacactaaaaatttttaccatatgtagataggagagggactataactctatctagtttacttagaccccactgctatttctttctggatccgccactgaggcgtagtgagtgaaacacctgaagctgggacaagacaatattgctttcttcaaagcatatgcctctaaaaattttagaaaatcaagaataagatcgatcaagcataatggggtagaggtagctgaccataatggaaaattccaacttatgtactcctattacaatcaacttctgggccagccttcttgggaatttgatctacaacaactatatacagacgaagaaagtgattcgaaccttctagctggacaaggactgcagatcactcaagaagagatcctaacctcaattaaaggtatgaattcaactagtgcgccaggaccagatggatttggacctagtttctaccgtgctgcttggagctggatcaaagaggatgtaatgaggttggctaggatctttacaactttggggctaaccttgagaggattatagagccttcattgttctaacacgaaagccgggaaaagaaaacactgtcgattgctacagacctatctccctgcaaaatttctcactaaagtttatctccaaagttcttgcgactaggctccaaaaagctctaatgaagatgattcacttggaccaaactggtttcctccatggaagatgcatctcggaaaatctaatctatacgactgaattgattcaagcttgctataaaaggaagtgcccaactgtaattataaagcttgattttgcaaaggcatttgacttggtcaagtctcttccaaatacttgctgtcacaggattcccagaaatctggattcaatggattcagagtttactctgctcctcaaaatcttgtcttgatcaatggagtgcctgggagatggatctcatgtaaaaaggggctccggtaaggagatcctttgtcgccatacctgttttttggttgccgatgtgctacaaagaatgctcgagcataaccaggcaatcagacacgccgtctaccaggatcgcccttgcgccactatacggtacacggatgatacttaatcatctgtgtaccgagtggaagaggaggatgtacaagcacttgttggatattttgtaatcttgagcattttatatttctgttttgcatgaacgtagtggctggctgaaggttgttttggccggtcggtagaatagctgtttccttctgcatgttgtcagttttgtttagctgccgaatgacctggtttcagatcgtgggatggcgcggtcagtagccgatccgggttgctcgttccgttcagttgtgcatgtaacaaactccgttttggtggaggagaatatagagtgaaaacagaaaagcagcagaggttgcgctgcacaaaaattctactttgttcttcagttcttgacgtttcccgaacttcttgaggttactatcgttgtccggcaattttcagagtgagcgagtgtgagcgatttcagagtttgctctttccgttttgctgacaattggtatcagagcggtaccacgacggtcctgagacgatgtctgatgatggcgggcgatacacaccgcccggacgccgtggtggcggtggcggcggcggaagcggcagcgggcgcggaggcgcaagtggcagcggcgcgggggatggcgcagacggcgcgaaccttcctctcgtgccacaggggagagatgctgggcacactgctcgcctcccggtgctgtcgaggaccaattatccggattgggcattgttgatgcgtgtaaacctacaggcgcaggggttgtggacggcgattgaacccggatacgcggagtaccgcgacgatcgggcggctctctcggcaatccttcaggcggtgccgcgcgagatgttgcgcgggctggcgaagcatgacacggcgaaggcggcgtgggacgccatcaagacaatgcgggtcggcgtcgaccgtgtgcgtgaggcgaaggagtagggcttccgtcgccaattcgaggcgatgcgcttcaaggatggagagacaccggaggagttcgcgatgcgactcactgccgtcgtcgcggacattcgcgacatgggtggagtcatggaagacgaacacatcaacaagaaactgctgcgcgttgtgcccaagaagtacaagccggtggcgatttccctcgagcagcttctcgacgtgaaaacgatggcccttgaggagctcgttgggcggctgtcgatggtcaactcatacagtgatgatgaggaggaaggtggcggcgacaagctctacctcacggaggaacagtggcaggcacgcgcaaggaaacaggagcaggaaggctccggcggcagcagcaagagcaggggcagctctggcacccagaacaaccgtcggggcaaggccggtgggtcaccgaaggggaaggagacgatcaacagtgggaacaccagccgtgactactccaaggtaaaatgtttcaattgtgatgagtttgggcattttgcaaggcagtgccgcaagccgcggcgccaacgtcgaggggaagtaaacctgacgcagggggaggaggagccgaccttgctcatggctcacgtcatgggggtgtctctcgccggtgaggagacactcgggcgaacacctggtgtgcatgaggtgcatctcactgagaaaaaggtgattctggatcatgaggttgcagaagaggaggaggccggcttgacgcgcgtgactacgatgctcacatataccatggtgtctgcacgctgcgtgatcctgatggtctactgcttgccaaggtaaagcgctccccaagcttcctgtacattctgaagttgaacatggcgaggcccatctgtttggcggcgaatggcaccgagacggcgtggcgttggcacgcccgtttcggccacctcaatttccaggccctccggagattggcgcaagcggagatggtccgtggactccccgtgattgaccacgtcgatcaactgtgtgatgggtgcctcgccggcaagcagcgacgagtgccgttcccagacaaagccaggttcagggcgcaggatgcgctcgagttggttcatggcgacctgtgcgggccgattgcgccggcaacgccaggcggcaggaaatatttcctgctccttgttgatgacatgagccgtttcatgtggatacggctcctctccggcaagcacgaggcagcggctgcgatcaagcagttcaaggccggcgtcgagatggaaagcggccgaaaactgcgggcgctgcgcaccgaccggggaggagaatttacctctgtcgagttcactgagttctgtgccgatcggggtgtgagtcgccagctcacggctccatactcgccgcaacaaaatggggtcgtcaagaggcgaaacctgactatcgtcgctgctgctcgctctatgctcaaggcggcggggatgccggcacatttctggggagaggcagtcgtggcggctgtgtatctattgaatcggtcgcccacaaagagcctggatggtgtgacgccatatgaagcgtggcacgggcgacgtccctcggtcgaacacctgaaggtgtttggctgtgtcggctacgtcaagacagtgaagccaaatttgaggaaacttgatgatcgtggcacacgaatggtgttcattggttatgagcagggctcaaaagcctatcggatgtatgatccggtgtcacggcgagtttatgtgtcacgcgacgtcgtctttgatgaggcggcaatgtggccatggcgtgatccggaggtcactcaaactggaggcgaggaggatttcactgtggagtttttttccactccgctaggtggaaatcgtgttcctgacgtggttgtggaacatggaggcgcacgggaaactgaaaccgcaccaagtccgctggccacgcccgacgcggcgcccgtgtggtctccagtgacatcaagctcacctgccggtgttgagttctgtacaccaccatctgatgccagtattgaaagcgatggagctcctccccgttttcggacggtgaacaatgtgctggccaccacaactccggtgctcgatttcgactacgacgacgagtgtctcatagcggagcaggagcctttcagtttcaaggaagctgagaaggagcagtgctggatgaaggcgatggaagaggagatgagctccattgaaggtaacaatacttggttcctctgtgacttaccatctgaccatagggcaattggtctcaaatgggtttacaagatcaagagaagtgccgaaggtgagatattgaagtacaaagcaagattggtggcaaaggggtatgttcagcaacaaggcatagattatgaagaagtatttgctccagtagcaaggatggaaactgtgaggttgctggttgctttggcagcacatgagggttggcaaatacatcacatggatgtgaagtcagctttcctcaatggtgaattggaggaagaggtgtatgtagtccaaccacctggttttgttgttgagcacaaggagaacaaagtactgaagttaaaaaaggccctatatggtttaaagcaggcgccaagagcttggtatgcaaagctggattctacacttgcaaatctggattttgtaagaagtgcaacagagaatgcagtgtacactagaggggaaggtaatgccagactcatggtgggggtatatgttgatgatcttatcattacaggagctttggggacagaaatagcaaaattcaaggagcagatgagaagtatgtttagtatgagtgatcttggattactgtcctattacctgggaatggaggttaaacagactgaagaaggcattacaatgtcccaagctgggtatgcaggaagaattttagagaaggctgggatgcaaggttgcaatccttgtcaggttcctatggatgctagactgaagctgaaaaaaggagtagaagattgcattgatgcaacacagtttagaagcattataggaagcctgaggtatttggttaatacaaggcctgatctatcctactctgttggatatgttagtagatacatggagaatccaggtgctgaacattgggctgccatgaaacatattttgcgctatgtggcaggaagtctgaatattggtctcaagttcagaaagggagaagagaaatttcctcggctagttggctatagtgatagtgatatggctggggatgtggatgatagaaagagtacaacaggggtgttgtttaagctgggagaaaacttaatcacatggcagtctcagaagcaaaaaatagttgcattatcatcttgtgaagctgagtatattgctgctacaactgctgcctgtcaggggatttggttagcacgtttgctgggagaactgcaaatgaagaagccctgttgtgccatgttaaaagttgacaacaaatctgcaatcaatctctgcaagaatcctgtacttcatgatagaagcaaacacattgatacaagatatcatttcatccgtgagagggttgaaagaaaggaggtcgaagtggagtacacaagttcagcagaacaacttgcagacatactgacaaagcctcttggcaaggtccgatttctggagctgaggggaaagctgggtttgtctccagtgtgatgcgtcaagattagggggagaaattgttggatattttgtaatcttgagcattttatatttctgttttgcatgaacgtagtggctggctgaaggttgttttggccggtcggtagaatagctatttccttctgcatgttgtcagttttgtttagctgccgaatgacctggtttcagatcgtgggatggcgcggtcagtagccgatccgggttgctcgttccgttcagttgtgcatgtaacaaactccgttttggtggaggagaatatagagtgaaaacagaaaagcagcagaggttgcgctgcacaaaaattctactttgttcttcagttcttgacgtttcccgaacttcttgaggttactatcgttgtccggcaattttcagagtgagcgagtgtgagcgatttcagagtttgctctttccgttttgctgacagcacttaggccttgtttagttcccaaaaattttctaaaaacatcacatcgaatctttgaaaacatgcatggagcattaaatatagataaaataactaattgcacggctatgatggaaatcgtgagacgaatcttttgagtctaattattccatgattagtcataagtgctacagtaacccacgtgtgctaatgacggattaattaggctcaaaagattcgtcccacggtttccaggcgagttatgaaattagtttttttattcgtgcccgaaaacctcttccgacatccggtcaaacatccgatgtgacacccagaaattttcttttcgcaaactaaacaaggccttaaggatacccttctaaagttctctaatgccactgggttaaaagcacagtgattaccctgaatgtcgatcagaacaaggagttgatcttgtcaggactgctacagtgcaaactggaaaaactgtcgatagcctatctcgggcttcctctttatgtccataagctatcttcagctgacctgcaacctctggtttccaagttagatggtttcttatctggatgggaagcctctcttttgtcgcaggcagaacatctagtactgataaacgcgattcttagcagtctcccagtctacgcgatgtctgcattcagattacccccagaaaccatagaggaaattgacaaacgaagatgggcttttctctagactggagacgatgtctgctcgggagcacaatgcctggttgcctaggattcagtatgcaagccaaaggcacagggagggctcgaaatcaaaaacctaaaaattcagaatgaagcgctccttcttaaacgcctattcagtatgtacaactagggatgaaaacggagcggatacggacggataatgctcatactatattcgttttcatatttttttgccggatacggaaacgaatacggactatctcgaatacgaataagaaccgaatatgatcggacacgaatacggaaacaaatttttctcggaacacgaaaaccaattcaacttctaatagaaacaaatatcaacatatataattagctcattttatataaaatgtagtataatttataaatacgatccgaaaggtatccgtatccgatccgaaaggtatccatattcatttttatccggagcggacggaaactatccgctccgttttcatccctatgtacaactcaaagatctcatggacaaaatggatctggaaagaacactcagggcctgtttggggagctttagattctgagaagcagctgtttggtagccaacttctaagaatctggaaaagctctgaaacccagctctccagcttctggcttcttagttcatttttcagaatatgtaactacagattctcagaagctgtggactgtttggggcagcttttgggaaaagctgcagctgggacaagctcccccaaatagggcctgagatactccgcttctaacatcttttcgacttgggcctcactggacctcaatgtagaaactgctgcctgatctacaagccctaactgaagtcgacgttggagatgggttgcgaacttccttcttgcatgatcgatggataaccaacgagactttagcgatttaattcgggcccctttacacccatgcaactagtcgtcaagtttcggtcaaagatgcctttcaacgaggaataacagaagattttgttccaagactatctgaaaacagctagagcggaaatgcagtgtctgcaagttttgctacagatcgaacttctccctgcgagatgagccggacattcgacgaagtggaaaattgggcaagctaacgacgaagaaaatatactatgatgcaaggttatcccctggcatatcgtcaccaaactggggtttaatctagcagtgcagagcgccgttgaaagtaaagatgttcgcttggggatcgcctttccacaaaaggaaacctgctgaagaaaaagatagtgcaaacgtcgattttgcacagggggaagattagagtacaaccgcaaattcaagatgtgcagctcctccaccaactgaaaccagctcacacagtgccagcgcttcactatcaagtaatccctatattctaaattaatctacatatatttcataggtacatcaagaccaagaaaaactaataactctctcatactatatttactctagcaacaaactcaatgcatgcaccatccccactattttctagccaatagcaaatcaagatattgcatatgggttataaatatttgtgtgcatagatgcatacatcaatgtccatttactccaatgcacaaataacgaatagacttaatgaatgaacataaatatgtagatcatttagaaataacctcaaaaaaaactatatgtagatcaatttggaatggagggagtattttatctgctctgtatgtgggcgatctggaatcatcgtcatgatgtcattttcaagaaataaaccccctcgattggatcctgcctgcaacgttgcatccgcgaggcagctctctgggcagagaatcttaagattgaagaccgacatgtagtctccgtttggaaagaaattttctcctccccactacaaactctaaatatgttgtaatgaacttttcatcctctatgcaatgacaaaattcaggtggggaagctctcccccctggtgatttagtctaaacaagtttgatggtaaattcaacggtgtaataacacgacaattttgatctcctatcgcagaggcagtaggcaatttcccaccaacaacacaacacatgacatcttcagagattattattcatttcccaccaacaacacatgacatcttcagagattattattctggacagaccgtcttgcggcaaaagttagaagacgtcaggattgaagtgcccggggatggagttgttctgctgagcctgcttcagatgcatcgtcagcgcatagttgtttatctgcagcattttttaccccagtagattcttcatcagtatgtatgttaggcagaaaaagaaagaaacttgcaaaaggagataggattgtggttgccacctctagggtcctcagttgctcctggtactgcacaacaagttgcttcaaactctgaacctcctggctcctctcgtcgaactccttttggcgctcatgttgaatggcgaccgctcgcttgaggacagcgttctctcgcagcacgacggtcaattgctccttaagcatcatattttcctgtacagaaagaaaaatatgaaagtattcaatgttattgttactcctaaatcatgcattgatgcatgttttctacatgccgaattgctgaccaaacactacgatgttttttacaccctagagaagatagacacacgtgtaccttttgcaagttttgtgctgcatcagctcctgtacgctccacgattgacttctccaaaacttctaaagctcttgaggcgcgagcacgcgcatcgcccatgtcagatgcatttgtcatctctctgacaaatagctcaacccattcagaaccattattacctgtctggcaactatctgcagcagctgggtgttcattagctgtactcacaccaccattattaacaatacctgccaagatatgcaaaatagttgctgttgtcatatatacagtatgctacatttgcacaagggagtgagatgcaaccgattcatgtgttgtgagaggaaacgatagtttagaattggcttgggttttcctttctctttccttgtaatcgttctgtaaatattttattcttttaataatatagtttaacattgctggacaaagcctggcagtattttggtagaaaaaatacaaagaacttgggtagtatatagccagaaaatgcaacgcgagaacttgacagcttggggacacactgagaaggaatacacaactattctaaatatggtgaatacaaaagaatggaagatagaagatatgtggatgcagtcatcagaatttatgtctagttaatcatgcacactccatataacataattgactgaatcgtgtgcagtgtctttaattgaacagcgcattacgttgcagaatataaacataagacagacatcaaagaaactgttgcagaatataaacataagaacagacatcaaagaaaccagcaaggctagagatctctgaataatattgatagacaatttgaaagagtatatcatgacccacatggatcattatgatagattggtactgcggtgtctaaaatttaagtgtgacaaaagcaagaagtactagtgcatgagaattatatgcacagatcctagaaataaaaagcttttggttaaaagctgaaccttcaacagacggataaactgctgtggggagcccattttcagatttgcaaccagtagctgataagatagcctctgtagactccaagcgcagattgtttaaactctttattgctgaatccaaatcatctccagaagcatcaagagctccttcgagcaactaaaatgaattttcagaaaccatgatcagttagttatatggcatagagataatactgtgcacaaatacctggcattactacaaaggataaacattacgcagaactaacaaaggatacacgcatgaatttgcccatgcaacaatcatttgatatagtgtagaagaatataaacacagctgttcagtgctcatcaaccttgcctagtctctgcaggcaggaaaccacaactttctcgaatgagagagtgtagctttgcaaaactccaagaaacattacatgtagagatgtaatctctaaggtgtactcatagtcatcggcatagtggtgcccatcatccagtactggaaatgataagcatgtataaattgtgccatcaattgatttgatgatacctataggtggaactggtatgttttccttatctaaaaggatctgaacactaaatccataggtaaagggtggtaaacaaacacatacaggaaagcagtagattcaatgctatcaaagaaaacaccaatgcaaaaagcatctcccaaagcctccaagttcgctcctttttcctccccagaccgcagggcagcacaagcgtcacaagatcatccaaccaaaacgccacaagagccctaattctgattggcatgcccttcgtccttacacctccacaaaggaagtgaaaatgcccactttctgatgaaaaggatccagcttgcagcaatccatacaccagaacaacaagttcgacccccacaaaacaacccgtgaagaccaaatgggatcacaaatctaagccataaagaacacgcattttttttcctcatcttagcccgcccaaattagtcaccggtgatcacacgcagaccaggaaaatttacccatgaatcatcgtcgccacaccttaacatgcacgcacccacct

SEQ ID NO: 4735 - DNA, 14503 bp, Oryza sativa
catattttaagaatttttcataaccatttaacggacgaggagacatagggcttgttcatattgatgtcattttcaaccataccattttttttataaagttgccaaaataatatacgtttagtttgttgccaaaaatttggtaaatatggaagaaatcctagcaaaattttggtattggctacaatctgaacatgcccatattcttaagaaatcaaaacatttcttttcctatatggatgtaacaccatacactatcactcaactcaatatattctttttcaataatcaactttcagtcctcaaagaaataacaatcaaaattctcaacgtgagatgcgtgtggagagatctgtccaagtctaccatccagtctctcgcccgccaccgcgcgacaccatcttaccatcatatccaaacaacgtgctacccttgtcgatcgatcagtgatcgatgttgagaccgacagatattatcgcaggtacatgcacgacatcgagcacgtacgcacccgcgctcgcaccgcatcggacgtacgtcggcgcacgcgtccgtgatggcgtgtgggggcatgtacgtacgttcagggtaagttttatagtggaggtggatgtcagatctaatttggaccatgtcatcgtcttcttattaattaaaaggcaacgcatacaacatatcacatctaatacacaaaccaaaatattagtttactctcacatcatttttcacttttcttggagattgtgtagagcttgccccttgtataagagcaagtttaatagtatagcatactactagcttcaattcatccgtagccaatctaatagctaattcatacaatagttgcttattatacttttaatatatggtcccacatgtcatatacatattgtgtcttggagtccgtgctgcagctggctacagatctgtagcccgttgttcttctctatcatcttttatcttattaaaatatgtttatagctagctaatagtatactattgtacctgctatgagggatggcttattctctctcttcttcacctcattatctaccggcagcagagccgcgccgcggcggcctatcctcctgccaatttttgcttctccaaaaaaaaaaaaaaaaagcctctctgcaaaccgcgcggtattgtcgccttgttcaggctaccccatgctagcttagctctactaactgcacatatcgccaatctatgggcgcagttttccgtgaaggcgccgtgggcgtgctctcgcgctgattgggtacatgtggttctctcaaggtaactcttttttttagagggaactcttgttcagttttaacttcagtttacaacattttttaaacagtatttcaccactttgtttggagaccacatagttcatcacgtggattatttacctgtggtacagtctggctgcccgctgtgtgtacatgcatgtgaaatttaacatcccccaatttatttcttgaggttaattactccttttattctttttgcgagcattttttttaaataaaaacgaagccagacttgctgctgttatattaaataggaattgagtatatttacatattcactaacggcgcaaagaagaaaggaataaaaacaacaaaaatacatttatatctttgcataggcactagatatgaactaaggtataatattcttgcgatatctttggcgccatacatatatatatatacctcacacctagattaattttatctatgattttaaccattagctgttgcattggagtttctttatttctgaaagcacttttgtttctttcacaccaaatcttccacacaatgcaatcagcataggtagtgacttcattgtcttagtcttgtgtttgcgaggaattaatcttatgaatcactctagctactcctagcttgctagtcttgcatttaatttaccatctctaattgagggattggataagcatccaagatatgtcttagtagctagaaattaaactagctaaaaaaatattgtatatatttatggtccctaaattaatccatatcctgctactgagctgtaatgtatttggatgtttgcttagaagtctatgcttgcatgagttgctctaaaaaaaaaatatcagctctcttcctgataatagattttgggcatgtgctgcagtccatgtgctctcctctgtcttggctaggccgcagaaatcgttcagagatggagtaggtgtgaggtgttcttttgtcatgacccagctgcctggcatttgcccatcacagtaatttgtgcggtacacgatgctatatagctctagttgacaaggacaaactttattcattgcataggcaggcgtgtcatgtcaccttgtgccacttgctcgccaacgacatacgctctcaaatctttgtgtatatatatattctgtttgtttttgtacacgtattttgtcttcactaattaatctatgtttggtgaggcacaagaacacatgtttgattaattacagtgtaataagtcatatggacacaggagccgagaggcccgagagtagactatgtcaaaacgattgagcagaattacaaccacaactttaattctacatgggaacaaagatggtgcacgtatgatttggttaacatatatggtcgattttgctgcaaagcttgaggataaaatactagctaacaagtcttttctttaaaagaaaactgaaaggggatgtgctctatgtaaagactaagatatcaacactgtaagcagtaaaggttgcacaatcctcgcaatgtctaacaaaatttctgtttgtgtagaatccacagtgtatagacaaagctagcgcgagacaactgatctatttctgaattcattctcagtatctgttagtttaattacaaaccagtttacatactattgcgtttaacaatttttttcttcgatggagaatgggaaaaaaaatgtgccaaatatggtctttatcaatgcggaccatgcatgattcatccgaattttcccagcgtagaggacttatctggctagggagggtacttctgttcactatataaactgggctggaatgttgctacaccatctttcataccaaacctagccattgggcccgagagcacttttcaaatagaaaacacaaaaagccactgtgcacgcggggatctcccgttccacctcatttagtcccacctcggaaaactagctccacacatcgcagcataaatagccggattgcgccccttgctgtcgccgagctcagcagcgcgagcttgtaacccgagcgggggcattaaggtggtgtggacgttgcggtacggctgcgggcctgggtcggcattgctacagatggctcgcccgttccaagttgagtagtgggccggcggggcttgtgcgaaagctctggggccccacggttcctagagtggcaggcatggcgtgaggctggtttcacagagcagcgaatactgcccgcttccaacggtggaaggataacgggccgccgcactgctggcccgcttgggtctcgcatcctactccaacggaccaccacttttttatttttcttagaaaaataaaaacttcgttctgtttttccagctagctagtccgtgcacaaaatctttttttttttggttaaaaaagaaaaacttctttctgtttttgcggatagcaggagaagtgtccagttcgtgacttgaggtctctttggacttggaagtacaagattctcatagaaaaaagaaaatagaggattgcaattccttggaattttttttatacatgccatttgaaaaagggatttgagctcaccaaattcctatacatatgctaatagtattacaagtagaaagcaaatgaattttgtatgaaatgttgtttggaacacatggttgtcctgaacacaaaatttagattctatcctacgccagctagtgaaaaaataatgttgaatgttcagaaatccttccgaatttatatgtttttatggaaatcaaccaaattcctatgtatgattctcatattcttgtgggattcggtagcatatgacattctaaggattcctttggaacaaagaaaaaaaatagaggaaatctaaagtgttaaaatcttatggaaaataatcatacttgatcctctgtaacaaaggataagcatacgcaaaatcctttgaaactcccattgaatgactcatttcattcatgggaaatttggaggaaagcttgtaagaagtatagcttcatgttttcccttgtgtcttagattcctctaagtttcaacagagcaagatattctgttagtagttttttttttccaaatcctgtgtttgaaaggagctaatcctacgttgttttctattcccttgaaagaaagggaaaacagaggaatttcaaagaatttgaattcaatgaaaaaatttcctatgataccctttggaatagaggattagatctttaaaatttctttgaaattcgtatggaattgctgcttgtaaattttagaggatttatatcctatggaatagcatgtttcatgtgaattttagaggatttatagtatgggctccaaaacctcctggaatttttcctttgtccacctcttccaaatcctgtgtttgtcatgtgctccatccaaacagcttcctctgtagttttcctatgttcctcgttccttgggatttaataacagttgttacatggctaaaaggattgtgattgtgatgttttagtgcacttgttttttctgtcccaacaatccaacatgcatgcctgatgcctggttagcatgcatcatcaaagccccatgcagtccagatttaaaacgaggtgatcaccaactgcgttggagacttggagtctttaaagtgaagagaaaaagcacaaaggccatcacaggacactggttagcagataccagcagccatcaggcaaggcaaagttcctcacaaataatggggcggctaccgaatttgttcatggcattaaagcaaggaaaacatcccgtgaaaagatggacaacttcaacatttctgttcaaacgggcaggcttaggatacagcgacacagagacgttctcaagctcacatattatggatttgtatcacacagcaaggttttaatgaagtccacagatcccatatgggatatcaacacacgcattttagcataacagtatttacgaatctaacaaatatgagtagcctttgacgtgacaatggctcatagcagcttgagaatcatatctgcaaaatgagatacggtggaagttagttaacggggaaaaaggtttaatgaatcaatgcatataggcataggccatttcccatatatggaaagtgcagtgaatatgtaatatgcatgcattaaagaatgcatttagtgaactcaaatttgtggcgtgcatttacgctttaagttagcaagcatgtgaaaatgcgatacagtaaagtttgaagacatttgtatacccttctatgattttgcatgaaaatacaaattggccttgaaagactgcatcgcatagagaaaaggtatgcgtgcaagtcactctatacacactgtctcgataaatgcaacaaagttcactatgtcctgataaatgcaacaaagttttagtaacgttcgtccaagtgttagggcttgtagccattgttaacctccttgtcaaaattttggtaagatggtttgatgccaaattttttttggcaaagatactttaaccttttgtctagccttcccaaagtattggcattgtgaatttttgcaacagaccaaatgagcctataaaagctttgccattaccaatattttggtgtggttgggttgagccttatatggtgtttggaagtaaaatcaccagaaaatgcagtcactccaagatgtagcactaagggggtggtgtttcacataaagggaaggtcgacacaactacaaagggcaccacagcaggatgttatgaaagccagccctttcaacacaaacaagggtaacaatagtaatcaaattacaaataaatggagatgagatttcatcactgaggaactcaacataaaaaatacatcatgaaaaatgttactttatatattcggtgaagagcttgtgctacttacattaacaaatgaacattctgtgagtaggattaaataaacaaactgatagtaggattaaataaacattttgtactaccaatattctgtgagtggcttcctggcatgtaaggtgcagaaaactgcttgcgtactgatttaactgtcaaatatacaattgagaaggcaacataaaaacaccaaaaaccttttaatctaatagctagcccagagagtttaaacataattttacatccaaaacatgctgaacattcaagagtaaaaagacaacttttatgtttcagcaggtaaaacaatacaatttacacaaaatgaataggtgttatcatgatatcatctgagcacaccaatgatcactggtctcacttcatacatgctgttaagggtgctcctaagttaaagcagaataatattatccttgttatttgctatcctcctcactttttaggtagtacaagaagagtaaatcattatcaaaatatcaattccgtagtaagtcataatataggactaccgcatgttagctgttaaaaatcctgaaagtcattttatgtcctatcacaattcacaacactacatacctcccaagtaatcagccaacagaagagatgatttgccgcatgtatgatgctatttgatattggaatacacagaaatttccattggtgaaattaaggctgtttggctgcctgggctgcatctgcgccacagacaacagcaacagtgctgcaagcagcaaggaaacagcgggcagcagcagccgcagccacagcccaggtagccgaatggcctgattgttaggtcagtgataacagcatgactcattgttttattggcatccatgttatgcaatgacgatgtcttcagcacagggagcatgacatgaatatgcaacacctcagtaaccctcgccatttgacaggtaagatgtgaggtatggttagtcttatgtttccacaaatcttaaaccatagcagcatagccattatttttcggtgcgcagctgcattcagaaaggccaaagtaggagtataactcaaggaaacagcgtggtcttgtagatactagatacacaccacataaccaccttcacattctccatcaaattgataaaaactaaaacaatatttcacaagtgcaacagaaggtaagtattcatgtatgatgctaggggtggctatgtttatcacctgaagtgaaatccctcagccgcgggccttaagctcagccaggcggcgggagaggtcgtcttcatcaacagccttctccttctccttggcagctggtatggcgtgagcggcggcctgcggcaacccaacggagacctcaaggccgtagtcgtcggcgacttgctgcatgaggctgttgacctcggtctcgggcgtggagagcgaggtggagccggccatggcgccctccatgaactcggcctggacctccatgttgacgaactggcgctcgaagttgtccatggtctcggacatcttctgcaggttccccgtggcgagcgcggagtcgagcgacttgacgatgttggccatggacttgccgatgacctgcatcttcgcctgggtgtcgaggcgcgcgacgacggcgtcgaggcgggaggcgaggcggaggtagttcatgtgctcggtgcgcttgcggatggcgttctcggcgtagatccgcgcgccgtccatgttccccttctcgatcgccttcttcaccttgagcttctgctccttctcctccttctcgcacttgcgcgcctgccgctgcagcgacttggaggtgaacttgaggtcgaagatctgggtcatcagcttctccgggttccccatcgccgccgccgacgagctagccccgatcgtggatttggctagggtttgacgaggaggaagaggaaaggcagatcggattgggggatttgggaacgcgtcgtatttgcgaggagacgagacgcgaattggggatttttattattggggagatgggattcggttccgtttgatttgattcgaggaggagacgaccagtcgaccacgcggtttggtttagtgtacgccttaacggcgaagtaatccccgccgtttgtgtgtcgctgcgtgtggggtcggcgtgtccaactccaaccagtgtcgttggcgtcaccgacgccgtttggataaagcgttttattgtatctctaattttggaataattaattactagaaaatagatgcggccttgccgcacaatgcaccagccaatatgaaatattccatccgttatatattgatcatcaattgactaaaatcaaaaatttcaagttgattattatgtaatgttggtgtagttactacatctaagcatgaaaattgggtttgcatgcatgcatataggtatttgaggtagtaaagctctcttttcttgttgggggggggggagttaaaagtgtgcatgtttccttattcttcaccaccacttacttaagtttttttttgtgaaaaaactaatcaatatgaaatgggaggaataaataatatctatctactactacttaaaaaataagaggtgcttccatcgtccgtcaaaaaaaccgggtgaaaaaaaaccggaacgaatccgattcatcaacgcggtaaaagaaaaatcgggaaaaaaaaagaatatgtccgattccataaaaataggaaacaaacttccatctgttataccaagtcctattcggttagcatcaccaggagaaccgacaccattcacagagagagagaaagagacgatgccgccacctctcccgcccccgtcggaccgcagccgcctccatgccgccgaatctggcggaggcgaggtccggcccgccgcccctcccacccccgccgggctgcagctgcctccacaccgccggatctggcggaggcgaggcccgaccggcgttccatgacgtccgccaccaccaccactgccgcacctccccaccatgcacagagagagagaaagagacgacgccgccgcctctcctgccctcgccggaccacagccgcttccatgccgccagatctggcggaggcgaggtccggcctgccgcccctcccactcccgccgggccgcagccgcctccacaccgccgttgttcggggagagggcgccgcgccgttggttgtgggggagggcgccgccgccgccgctcgcgggaagagaggcgccgtcgccgccgctcgggggcgcggaggggagggcggcgatgtgagatgggagggagggaaatgggctagggtttcggcggctgaggagaaggaggggttttgtttccccgatatcgacgctcggccgtccgatcaaaaccctaaagatcggacgatcggtgtcgtccaggccgaaatcagcccaagagggatcgagagtgaggccacttttctggcccaagcccaggttgtggcctggggaggggaagtgcacttgcgcgtgcacaaaaggccgtggaccgaccggcaagggccggaaataagtctattttaggtccctcaggcccaaaaaaagagaataagttcatttttagtgctcattttttcagaagcattacaattataagttattgaatgtgtttatttcgaagcaaacctaaaaggaaggattttctttctttttccaagtaaataattgttaaatgacgtttgtattaataaaattaacaattaagctctgaaaaattcaaatataatttcaaagagcgtaactaatcatggagaatttaaaaaaaattaaatttaaccatgtcattttatttctcacacttgctttacttgtaaatttatttaattatacacatacctacttaaaaataccaaatatttcaacgaatttgtattttaattaattgcatatttttctaatctgtacgcttcacattgtaacacacaggcacttttgctagaccaaacaacacttttggtcaatatacacactccgtaatcacccggtgcaacgcacgggcacttttgctagtggtcttataagtacatctattttctctatctatttaatgcttgaaattatggaaatttacccttttattcatatattaattgaaagcagcaagacattgagatgatggacataagttggaagacgaatatgtgcgtacaaattctaaattccaaccaaccaatgtaatgaaactacttattttccctccacatgttccacatgtgtataagaatcgaggaaatccttttttcaaaaaaaataattttatcttcttattccttaaatataacgttctaagtgcataacattaaaaagttcaagttacacagtaaaggaaactaatgaattgattatttgtttgaaaatttggtactcaaggagcataacgtttgcatcaagcgggagcaaaagatgtcggtagcattcttttcccaaaattttaccttaattttcgttagtacacttttcaaacatcggtgtgtttcatgtaataaaaaatctatgtggaagttgctttaaaatatcaaatatatcaatttttcaagtttgtaataattaaaacttaattaattatatgctaatagttatctcgttttgcatgtccgcatttaatctaaatcttcgtcagattcgaacacagtaatctcatttgctagttcattctatcctgaataaaagattgcaaagaggcctggcttttttttattattgtccttcccagtccgcagtccccactcttgagtctcgactcctccgctgctctccactcatcaatctgctcctcgctcgacctcggtgtctccgtcttcaccgcggtgccgccgtgtcgctactacaacggccttcagtctatagccttctttgcatgaagctcgaaggcgcctgtgtttgtaagattgaagttgcgccggcaacatcagtaaagagaagtctgtgatgcgctccctgtcccccacctcctgcaatccctcctgcttctcgggccagcggccggatccgcagcccacgataccttcgccctccgcatccggaagacaactcccatattcccaagccgatgtgattatcggcgcaaaaatctagtagtgagctttggtgctggacaaagcaccagtgagtgtgagttgtgcgatacagctagcgttgcttgcgtccattcacttactctctgcctcttttgctcatttgcatcaccatccagtatcccttagtataggctcggtgattttggtactcgcctgcaggcatgcatgcatgcatcctacttgggtattttcctctctacaagttcaacgaaagatctaaagagaaccaatgatcctagggaagacactgcttgattttctttgctgaaaatatctcaacacgtgccttaatttagcaccaattgcaggtaattttaaccagttctttggtgttctaaatggaaggagtataaataaaggacacgagagggtggttcgccgcggcgtcatcggccgtgacgcgcaggtggcggaggatccggcaggccaccactcactcgcacacgccgcctcctctcctcctccgctagttagcgcccctcccttctcctgatccgggccgatggccagtgccgtccctcttctttctccccgggttcaatggatctggcaagtctgtattggcacgggcgttctcgagggtgactcctgtcggtgagatagaagcgttgaggaagggcggcagcatggcggcgggaagcacaggggagggcgaggtggccaggcgaatgtgaagaagacgagcccaacgccgttgagggagaacatgaagcgggtggtcggccgcaacgcgcgggtggcggaggagccagtggattagggtcgagcaattctgcaaataaaaaatacagtaactccgtagttttacgatgaggtccaccgcaacgaactttagccgtcgatacttaatcaaacggtgcaaaaggagtgccaaggagacacgtggccaggtgttactggtttcgggccctacaatcggtatataagatttgtcactcttaggagtgatgataaatgatttgccactggacccatatgtcatagatacgtgagggctcacatgttatagacagcgagtggcagataattaattgccacatcttaaaagtgacgaaaagttaaatatccctctaatttcacaatcatataaacttttttccaaaaaaaaaatattacagttccttacaagtggttgttggtttggacacttttccaagcttctaccgctatataaacggtgtgttttcttaaaataaatatataaaatttgttttaagggtgtgtttagttatttgggtgtaaagtttttaagtatacggacacatgtttgaagtattaaacgtagactaataataaaacaaattatagattccgcctgtaaactgcgaggcgaatttattaaacctaattaatccgtcattagcaaatgtttacagtagcatcacattgtcagatcatggcgtaattaggctcaaaagattcgtctcgcaatttacatgcaaactgcgcaattagtttttccccacattttgtcagggttatggataccacatacctaatacatacctaatagtagttgactaaatctcggcaggatccaccacataccatgtcttatacggaaactgacctcgaaggagttccagataaggaaagacaaccagagttctacatggaaacgacaagtactactcgaattatatccatattggtttccctagttctacttggacaaggggacacctatgggtataaatacaagcccccctaggaggacagggggacagacatccaccatgaagggatcaacacccaacacaatcgacatagaagccacaacatagaagcctacatatgccaagacacgccgccggatatcgacttcagggataagcacggtctgacgctgtctgttatacaatatcaatttttatacaatatcaattatgcgagtgtttccgatgttaaatcgactacggtctgacgctgtctgttatcttctgtataaatcatgcttgtttacggtttacataatgcctgatatttacatctgctcattatatcctgataattctagaagatccatgcagtttttcgaatacatactcgatattctctgctatatatcctgccttctagaaaatatttttcaggaataattgagcactcgagtaggtcgtggtcgagtacaccgcattatcgagaacgatctcgacaaatgcagaatcgtcgcgcccaacctaccaacgaagaccgacaacctatctcatagcaccggccatcgctggattactcgagaaaaggttgttaacggataattcctcgcgaacgccgtcggcttgatcacccgacatgattgcgaacggacatccggatatgctacaagttgtgtgtgagagtcatgctggccacatgatatgcacatgtaataaaccaactttagcgcccctataggtgattaagagactcctactcctggttctcgaaccagtaagacgcagtgatctctctcgcctcactttaagtggtcgagttacgactactgcctggtcctcgaccaacgatgtagcgtttctcccactacttccacgttaagtggtcgagttacgactactgcctggtcctcgaccagcgatgtagcgtttctcccactacttccaccttaagtggttgagttacgactactgcctggtcctcgaccagcgatgtagcgtgtctcccactacttccaccttaagtggtcgagttacgactactgcctggtcctcgaccagcgatgtagcgtctctcccactacttccactttaagtggtcgagttacgactactgcctggtcctcgaccagcgatgtagcgtctctcccactacttccactttaagtggtcgagttacgactactgcctggtcctcgaccagcggtgtagcgaatctcctattacctctatttcaacaaagttgatagcaggtatacaatatcgccaagtgttttacccagagatcccttaccacgacgacacctagcgttgaaacctatcctattgtccttttacgccgtcttgacaaggcctccgaggaacctaagggaacttcggctggggacacccagagccgataaggccttgtcggatcctgtagagacaaaagaccatgtaagacctggtcgtgtaagagttctcgccgtgcgtattaaccaagccgtgtgatcggaaattgagttttccaacttcacagctgggggctaggatcagtgcttgttcaaccaaggcaggtgtcacaccccgaagttttcctcccaagtcaaaatggtaatttgcaaatgaccctaagaaaatgcaggtgaaatcaggagaaaaccctaaagaaagtaatgcaaataataatcagacttgacatgcggaatttttcttgagttctacatgtcaaaattcattaacag

SEQ ID NO: 4736 - DNA, 21361 bp, Oryza sativa
ccgcccatccccttccttcccccgccgccgatccgccgccgccgccgcgtcccctcctctcgttgggattgggttgggttggtgggtgggtttgggctcgaggcgaagccggatcccggaggcggaggcggagacggagctcgcgatcgtttaacgacggtaacttggaccgatcgcgctgtcccccattgattacgtcggcttttttcctttttttttttctttcttttctttctttctctctactgatactactgtgatgaggcgtgaacgcgctacgcgcccggtgccgacaggtgggcccagatggagtgctaccttttttgtttttttttttgcgtgggccgggtgggcgctttttcttgccgtcgtggactcgtgccgcggaggggcgattcccatcttccacgcgctccggttcgatgtgggtgccgtgtcaatggtgaaaagaccatgtgacttgaactaaattacattcacaactcgtaataaagttctaaaagtaaaaaaaaaaaaactcgcatctccagcaatgtgaccctataataattacattcacaactcgtgtagttctttaagaaaaaaagtttccccggcaatataactcctatataggctttttatttttacatgggtttgataccgcggtgaaagggatgaggtgtctcggtatcagcatgtcctacagagaaaacgttgtctcgggaagagactaggaggtccaagagacaagcacaataggatagtcttaaaagagaagatgagaataggtaagtggaacctgaagatatgacatcacgagaaaaacggtggtatggtcagcgaagattgctcggtatgacgacgatgtggccgaacgatgtcaaccgcccccaccaccggccagtcaaggctgcatgttgcagtggacaataaaatttgacaccaataaacagatcggatttggacactgagaggtagatctgcaaagagcgattctaacgaatcacacgtcgcgtgatgactacgaagcaatttcgagatggttctatgttaacaggatagcttgagtggcatcgtagggtagggagatggaggtgacctggagatagggaaagatcgggttagggtggcgcaccctcaggggagaggaagaggaaatgttgaaaaaggggaaaatgaggaaagtggctaggaaggttataaatgtaattgagtcgctagcaagtaggacaaaagtctttaaccgtaaatacatagttctagaggtgttttctctatacgtttaattaaagtatatttagtaggtttattgccgaaacctagaatagagataagaccgagcgaatacaacacctatctaaacaatgctaatgtttggataagcagcaacgcttaatagcgaaaaaataatgtgtaaattttatatacatatactttgagcaacttaaaaattcaatttctaacgacgtactggtaaacttaagtgcaaacaatggagatcaaatcgttctgaatgatcttgtagttataggccttagagcatctccaagagcctagccaaatggctctctaagttaaaatttggctaacttacacaaaaaaaatctactccaacagactagccaaatgcctctccaagccatccggctgtctaaattccccaccagactagctaaagttggccagccaaaaccggctagccatatgtgggacccacgcctgtttccccctctctctctctccatgcagcagtgcggcatgcacatgtgacgagggcgtcgtcacctcgtcgtcgccgcggccggccaccgtcgccccgtcgtcgcgcggccggcccccgcctccccgtcgtcgccgcgggcagccccgccgccccgtcgtcgccacggctggccaccgccgccccgtcgtcgcgcggccagcaccgccaccgccaccgccgagctccgccctgagctccgctgctgcccccctctagatccgccgtcgaggtcgtcgcgagccgccgccgccgagctccaccccgagcgacatcgaggtcgtcgtcgcgagccgccggcgtcttgcctactgcctccccgcatcgccacaccatcgcgcgcggccgcccgcctcctcgcgtcgccgcaccaccgccggcgaagagagcggcaccggcgggcggagcccgagcagcggcggcggatggcgacgcagcccgagcggcggtggggatggggatggggcggcggcggcggatgggagagggaagtggggtttggagagaaggggagaaaaatgagggagaaggaggtgtcgaagctgacatgtgggcccaattatcatagactcagaatagagaggatgaatagagaggctgttggagtaaaatacagtttgatttgctaaattaaatggagagttggctaaatagacatttagagagtcaaatttagagagaccgttggagatgctcttattcggaactcggaagacctactacagcgcaaacaaccagcggctgcagctagccaatagtagctacaacctatagatgttgaagctagcaagtgtagggagcaatagtttgtgtgcagccgaacgaattggttgtccaatgcagcaagacggctgtaaaatttgggctaccgaacaaacccatactacggagtacatccgtatttttcttttactagaaaaaaaaataccggtgcgttgcaacaaatcatgagatgcagtcaggagtccaacttttatctcaagttagtatgtgagtttttttaaaagatttttttatacgacttagttttatatttcctaaaacaaacgaacttaaaatccgagtcaaatacttatctatatttctaaaagcgaacgatcacatggatgacgtaccaaagtaccggcaaaaacatttttaatttttataatagtagagattctattatctaaaaaagaacatctggataaaaaatttcaggatacgccttttaatcttgtcaagaacatttaataaagtaaaatagaaagcgacttgaaaactctaacgaaagactgaaagtgacatggaaaatattacacaggtggcggctaccatctgtataaaggtacgcacgtaatgatctaaacatcaggcagggtcaggtgtccatgcctgagtaaattacgctcttattaccagctgtatgcaacatgagaactttgagaagttttcagtctggaagaggtgcaactgcatgagtaagaagtactgatttaacagttgagcactctatgggtgaagaagattaatccagagtttaactatagtgtacaatgctttcctgctgggaactcaccatctgaaacatctgtacaaagatacaaccatgcagctatccatcagctcggcaattacaaattgaagtatggtgcaaaaaagggggacccatgttctctaccactccagttgcaagcctccccaaaaccatatgagccctaccgttctcccgctaggaggccaggctcagaagcctcctaaatatattatccttgatcaatctttgtaaataagagatacaacaccaccacatgcttgatctgcatgtaaggaagattttgatttttttttctccactcctgttactcccacattataacaatactcatcatataactttgagaaggccgcataactagaagagctaattcacaagaatatatactggtttttctatctgtccaataaccaattaagcaccgtcttttttggcacggttccatcactaccttctttctccgtcttcacagcagtatttacagcattacggatgagagaattcaagcgcaacctcagttgtgcattgtcaataagcagatcagataacatttttgttgtctcttcatcagtaacatatgcatcttcactgctcatggtaactgaggatttaccatcagaattatcaccatcatcagaagagccctgttcatcatctcgtgacagaagttgagcctgagagattgagagaggatcattatagaacacagattgtgaatgtaaatgtaactaacagatccgctttcatgggcacaaggaagtgagaacttcatgaaaacagaagcgtaactttgaatattcaaaatcaatttctaaatggacaggtacataacactgaaaacaatgtcttctgtaccaagatgaccattacattggtcattggcaagacttcttttttaggtatagtggcgccagtatgtaatctaaagtaaatgcatctatgactgtaaaataggaaaaaaagtttgtgaaaatatagatcattttactcattttgttaaatatagttttactgactctgaaatgatatcactcttcagctgggaagatgaaaactgttccccagagctaaccaaaactaacacctaaaccttgttccaatagaatcaagaatgcagctttgaaggcccaactaggtggctcaaacttcaaacataagcagaggctgaggaaactacaaatcaatttaggccaggagttgttccaaatctgactccagatcctttgaagaatctagtgtcaggtagtgtctgatgtttccgtcggagtttgagctcaactttctaagtgtgcctttcccgtgagaagctagaaggagtttgaatgacaataactaatcaaaagatatttaaaacattacctcagcaacaagcaaacgtattctattgtctgatgtcgtcacaagatctaaagcatcaggcaaagatgataaatcaatagtcatagtgtcttgctcatctgcaacaaacttggcagtacattcctgtagacgctcacggagcagtctgcattcgtgaagaattttttcacgggagaaccttgcacgtgttgaccgctgtttctccctgttaacaatcctctgtaatatataataaatacaattagtagctagagagaatgccgattgcaagaagtataactaccagaagcttgaatttaagaaaacaaaaaatggtaatagggatagattggatcaaagttgttgataaatcagctgttatgagcgttgatgcttgaagcacggacagtaatgcatattgtagaacagaatatgggaagggtttacataccttccaagaatatctattgcctaaataattattagtttcaaagcatgggattggttattttgtaccctatctatcagttaggacttaggaaggatctgatttagctggaaaattaaagatgttttttaaggtacttttacactgtcaaaatcagagtcataagaaagtaatttcaaacatgaatccaataatatccttttcttatggtaaaacctaaatattattggattaatagttcgtcaaagctcttcaaaattggacagtcaaaatacaccttatattcctgaacggaagagtaatgaccttcttgagggtcaaactactatttacatgaaaaatacccacgggtgtgtatagcagcagtcttgagttatccctataaaaggtaaggtttctgcccaaaccctagctaatcaaagcctctagccgtgccaggacaagcccacacgacctgagaagatcgcactatccttggtcttatgatcaaccatatcattagtgtgcaaagcaaaacaacaaaagaacacctcaccccttcattctctctctcaatttctttagttaagtggtgtacaaacaggtagcattaaattaattcaattgtcctccaagagtgattatatatagataaagaaatcgctgttgaatctagcttgtgtagatagaaatctttattcagccggccttgacaaaaggaatcacataaagaatagatggctgtgctggttatataataaaaaagggaaaaggtccatatgtttgttgatcaaaagaagactgttaagctcatcttgtcagataccaagtaggcaagtacaacaattcatgataatattccaaaaatggacaacatgttgcatgggtggtggagatgcagaaatcagggtaataagttagaagtggaaaagcaaacactcaagatggcttgcatgctttcaaaggcttactcttgtctaatgacttttttttttgtggggacttgtctaatgactttgacaagccactttctcttagctacaaccaaaatctagtttgcaacttgtaaagggttatgctctcctggctttgagcaatgagaggccagccatagcaacaatttcacacaatttatagatactatcatagttctgcgagaaagaaaagctttaaatttacatttatacctctaattcagtcttctcctcatgatactgattcagcactttcttcatctctttttgggagttccgaagagatttcacctctttaacaagaacttttatatctgctttagactttgcctcgaattctccaatatgttgctgcaaactctcaacttcttttcgtttagtttctagctcttccagtaacatttctttttcaccgctagcagttgttttctctgactgcacacgagttttctcattctgcaattaagtagaaagaaatgtaagaaaatacttgtaagatggatagtaagaaaccaagccatgatgacaaagaggagacaaagaggaaaaccaacttgttcaatcttcaggtttgactccatttcagagtacttcctgtagagctcatccttatcccattgaagttgggtaattttctctctttcggtcaaaacagcctgatgtagaatctctttgtcttttttcttcgtagcttccaactcaacctccaaatctttgacctgcacagaatagcagagaagcacaagaacaacgtacatcaataaagtatgaacaaaaaaacacaaatcaatttattttaaactcgtgacatataaaacaaagcatatcatgtgtttaagcataatccataggcatcacaaatgaatgtcaggtagaaaacgtaacctttgtcgcaagatattctttgacagccacttcctgatttagtcgtgctatgagatcctccatatcagtttttgctgtcacctgtcttctgtccatgctgatcaaaagtctagtcaacttcggcctttgatcagcaggaaggatgatttgtgcatccatatcatataaaagctgcatatctaaacctgtaaattgttctgtttggctatgtccatcaattccacttggaagatccacaggaccatcccaaagggaactactaactccaggaaccgataattcactgcccctcaaagaactcaaatcacttcctatactttcagcagagtccttcctggcatggccagggttagaatcgtgatcctcttcggaaaccactcccttataagtatctatggaaccattcctaacaccatgttccaaaaagacatggttctttttcctgtgatttgacatgctactagcccgctcattgggctgatctaagatagactctcccagcataccattaccagttgctcctgtcggaccgttaccatgagcaaaggctgaattcatttgactggactcagagagaacacctgaaccatgttcatcaggacgcggagaagaatctgcactactttttgctgaagaacccacttcagaagggcgctgattccaatcttggtaatctttcattcagaaaaatagcgtaattaaacatttgctaaaaatgttaagaaattttagttaataaatggatcaatgcacaatcaggaaaaagtgtcttcaatagaatatgtcaagcggaacatacatgagcgtgcagcagcttccagctcaagaaaagcagcaacaggtgcacttctcgacaactcaatgtcagaaagtagcttttgcatccactcctccaaagcgttccttctctgcaaacaaaacatttcaagaaccaccggtcaaaaaggctaagcacaactgaatgtagtatttgacatcgaacaaagcaaaaattaatcaatatacataacggctaacctcttctagaagcaccctgcttgaatttattcttgaaaaggcatgcttcggtggagcaggggggattccttttctgggaaattcctgcttaagctgcagtacgggagaatcttagaatgaagaaatgatattggattagaggtcgaatggaaagtaataatctttttttctcagaatcatatccaagatgagacttccaaaatgtccacattcattatagaaaccataaaattgcaaaaggtgaagtcctcattatgaagtcaccagcggaagatgcaaaaatctgtaaaaactaatttggcccaggtaagcataccgtatacactaagtcaagatttataataacagtatgttttaaagtatctgaagtctgactacctgtgtgatgcaatgcaccaaaaatcctaagttgcaacggaagtcactggagaagcaagcaattgtgcattcaatgcactagcaaatgtaagtccaattcaaaggtttgattacattttcaaatttaatgccagataaattaatctggcagaccactcaggatacgataggggattattcttatttaaaaatcactggaggttgttcttgaaaggtatgttccaactgaaaatgttagtgggcttctagctcaggaaagaaggtcggtacaatttaaagacacttggcatgtgaaagaagaaaatagcaaagaggtgtctcaacttacatcagaagataactttagaaagtcactaaaccttcgaagaactccgtggctagagctgatgccttctggagattgtataccaacatgtatcctgtaaaactgtcctttatgggcattaaaatgagatcataaacagaacagtatcaaagttcacaacaaacaggaattgcatgatatatgcaacagaattacataagtgtctcttgcccgtcgatcacgactaaactagtgagccaaaagagaggtaagatgcaccacagttaccaaaacaccaaaaagtatatttctgccagtaggtcaccctgaatcattagcacaatacttcctatggcatgtcatgttggcatacaccattgtggcatgggctgcacgtgagttaatgacttcagccatggctattgtgatttgcacttgtcccccatgagttttggccttacatagttctctctcacccccaactcaaaccccctgtgtactgagacaagtgaggcagttgtgcggagagggagaatcacctctagtgtactgcacgtcagcgattggttatcacaacaaaatttgcaccccatacaggggtatgcctcaacacgccatgttgtcattaagagtcaggacagtgtgctaacaaccaaaagtgaccctttagtgatctaaagaaaagtacagttttgtgagtccagcagcctaataaactagtttgataagtatggtggaatattggaaagtgacacgatttactcaaaatgaaagaacaataaaaaggtaatacattagaaagttggcatccactacccaatatgagatagttttgaaagaagctcagttcttcgttgataagtgctgaacttcttttgtcctttttattggtctaacaaggttttctcacttgtaatccactccaagcacatttatgttgtagcatagcggtaataccagagacacaacatttccaatctgtacgtcaatccaaattgactgacaaaaataacgtgatgataatataagcagtactcacaactatggatttcaagaagttgtcagcagtcgcactagcttcaggtgtctgagcgatccaagaaggaatcatcacacagtaactccatccggtttgagggttatgtggccatatggtgttccttccctcctgcagatcaataagcataagccgtaagaagcatcaagcaatggaacttttcatggtatcctattgatatggcatcatctttccagcgaaacctagattgagaagttatgtggtcttcatggaagtacattttctttaatacaaggaaacatcttcaaggaactttcccagttgtttgaaaattactgaattttgttaacgaggcatgtgatttacttgacggtgaaaaagaattgactaggactagtaggttaatcttcatttgcgttctaggatcatttcatgttaaatgtggtaaagatgttgggaaacacaccaagtgcaaagaatgaggctagcacaaggcaggcaggtcaaacaaaagagctaatcttcacaatgggaacaatgatgaataataaaatcaccatcagcctgctcaaatatgtatacgaaatcaattattgtacttatggccttatgcgtaacagtatgaacatgcctaattgcctaatatagaaatccaaagcccttatgtccgatggactcagacaaaaccagagtctttgaaataagcagcacatatacaaccaaatcaatccgcatatcatgaagctgaactgcactcggtttgtctaaacccatccccgcagaagtagtcctacctgaaacccatactcgactccttgcaaaagaaacaggaattcaaaaccctatccaggggaaagctctaaaacaactctgaatcagtagcaacgcaggcactccaaaccaacaaatcccaatgcagatcccaacccacacatgaattcctagccttacattccactactattacacaccacatagccgcgggcaaatccagctcgcgatatcgttacgatcgagaggacaagcattaaaagaaagaaagaaagaaagaaaatccccgacacctcgcaactaacgccgaatctgacgcacgcagcagcaacgccacaggatcgcaagctcccaactccaactcccgaaccgcacgtccctcacagatcaaagcagggagccaacccaaccgaacccccgatcaatcgagcccggatcgaaattagcgggggggaggggggggggggatcgcgcttacccatctcttcgggggcgggctccagtccatgccgaacggcagcccggaggtgccgtcgtggcggtgcttcggcgggctcggcgccttcttcctcgccgacgaaaacgacgacggcgtcgccatcgccgcccgcttcggcggtggatcgagcgggcggaagggtggggtgaggtgggagggaggaatcgatgcgggggtttggaggcgtcgcgccgacgattccgaggtggacggagtggaggaaggggagggggagtaagagggcggcggagatgaggcggacgcggacgcggacggggagggaggggctctcctcccgcggtggcgtctaaccgtcaacgcgcggcggtggcagccaagcgagggcgtcggtccggtccggtccgggtctaggcttttccaccgccgtgtggggtggtggagttggtggtgggccggcggggagttgtgtgggtttttcgcaagcccacacaagtgtaattgttggatgtggccatggctgccgacagataatggtatgcacttcttagtgacgaactggttcagtacatactactaggctgtgtttagttccacactaaaattgaaagttcaaagaaattgaaacgatgtgacggaagagttagaagtttatgtgtgtacgaaagttcaatgtgacggaaaagttagaaggccgagtttagttccaaattttttcttcaaactttcaacttttccatcacatcaattttttctacacatataaacttctaattttttctacacatataaacttccaacttttccgtcacattgttccaatttcaaccaaacttttaattttaacgtgaactaaacacacacgaagtttgaagaaaaaagttagaatctaaacaatatctaagtagaaaaaattatggggttcaatacatctatagttggaggaaacaatgaccaaacacatatttgagattgtattgatgctcgaaacaataacaaaaaaaacatgtatatctctatctcttctctactattataaaaattagagttgtttttgcaaaaattttggtacgttttgagtcggttttaagttcgttgtgtttgagttggattttaagctcgtttgattttgaaaatacaaaaggagtcgtataagaaatctctttaaaaaaactcgcatactaacttgagatgaaatacggatccaagcgagttcccacaaaccatatataatattattattattattattaaaatagcacttacccgttgcaatgcaacgcatgggtattttttgtagtttgagtaaaaaataacgaaggaagcactaacagggtttgcaatactagggtttacagtactgaacgaaaatcgctccatttccatgaaatcattggagaccaatttgtgaaaaacaagcagttttagttagttgtatagaattgaccaaaagtcgtcctcggtttttaccaatttttgtaaagcagccaagaccattgaactctgagcactacaagctatgaactgtagttagtactgtaacttaaaatctgagtcgcaacgactcgcactcagaatagacttcacatcgtcggctccatactcgacaaagcactaacatccatttcagaaaaagtgttgccaagatatagaaacggtgaacgaacaaatgcctgagaagggtgagtatgagtagctcattgcaccacgatacgcgtattcttagctaattaaccagtagccggcttactgatcagtataatcgtcatcatcaaggccaaggactgccaagaagtgcacatctcatgcaacaaatagaagtcctttcattcataggaagcgtagaaaagtaagaaaacaacagtttcttctacgggtgaatgaacatctttgatattacaaggttccctcggaatccacatacaacacggatagtaatgctgagagaccaggaacagcaggcatcagaaatggttccaagaactcttcgcaatgataaatttagtccatcctgcccttgatcacacactcttttacttcggttggtgtcctgaaaacccaaaagaagattatgtaaaagaaacgtattgatgctcaaatgaagtgctgaaacaactaaaatgcggaatgcggtaggactttgagctccaattatatttgattgggaaaaaaatcattactgatgaacttctaccaatttattgcagaacggtagataaaataatggtgcataacgtattttaattcaaaagctgtttaacagaagaaaaatgaagccactcatccaatcttgaattagtgaagtgaacttacacaagcagaacaaagcctccccaaccactgaggcaatcacgatcaactgatgactgcagagcttgtgagatagtctcaaagagttcttcaggttcctttgtcaagaaaaataatatgttgtcatgtaacatctatcattcaaaatagtggtagaaatctaaacagtacaatgcaacagaattataatatattatacagatccaaacagaaatgcgaaattgctatagcccatgatgttatcccataaagaatgttacacgggctaaatgtgatcatacaaacaaacaaatgcataccatgtttggtttgtacatggactcacaagcaccatatagagactccgatgctgtccccgatacaacgaaatccttagctagttccctgcacagaaataaacatcctcaatcagctcacaagaatatgagaaacaagcgttcaaacgcctaatcagacatatcaggcacacggacttagaccaaaaacttaaacaggtggcatgctattggaataatagtatcaaagttgtttcagtacatgatgaagcagatagaaaaaatatatcaaattcagaaaggaacaaaaaaggaatcaagcaaatctctgatagagcaagttaccaatgtcaagcatgcacacatttctctgggacagagacggagccaatcgtgtttgggtgtcatggaattcaggatagaaacaagaatggtgaacccataaatcacgttgttcattcacatggggtcttttgttaatgatgatttagaaatttgggaggtaacctttgttagatatgacaaacatatttataaattaaagatgtagataactccccacctaaccatctaaatgtggaataagactaaggcgggcatattaatcaatgcagtaaattgcagaacatgagcaatggataaccatccagatgtgtatgaatagatccaaaagaaattaatttgaataaaaacaaaaacacaattgaactgatacatactttgcaccaatgcagtccatggtacaaataaatggctcattgtcctctccaagtccagcgataacaggctggcagaagtatggtccaaatctgaattttccatgtatcgaaaaaagttagataaacttacccctaacccaataattgtataatacaaaatgaagaaagctgtttactaatagcacagagaaatcacaagtcttagcatgcaaactttacttactactatgccaatcataaaaaggctattgtattgttaaaatgttgagaggctaatgattatcaatcaggaatttcagctcatatttcccaactgcccagaagttatctgtcaacctgattgatgttgagctaatttctagcttccacatcatcataaaaaaaaatcaagcatttgcctataaatatttatcagggtaaaccaataaccgacataaatctcgattctggtgctgcccttggtgctaggctctggcaacaggctggtgccaagtgcctaaccaagtgggttaagcgcctaagtggcagcctaggtgaacagctataacacagagcacctatttcggcttggtggttgtcaagcggaacactactcatatgagtctgttaagtgcatatgagttactcttttggtgcaaacaggggaaaatctaaaaggttcaaagcatatccatcaatccatgtagagcttactacatcaactaaatcgagagtttactctttatgtgccatttgagcaatcagcaagctagcaaccctgcctacaaacaattatcaaaccaacggcggcagccatggctacaaccacaacattatggctttagcttcttagtatgctcatcgtgcaatatggttatacaagacttaaatgtctaagcataacttgggtggttgtaatgtgttttctgtctgtcacaagtagagcacacatatcctttgaaacataaacctgctgcctttaacaattgtaccttcacatagtcaagttattgtgcaacaagaacaaatctaactacttgacaggcgctttgtaacactataaacagtcagcatatctacaaaattctgcatctttccgcgaaattgaatactccaattggcatttgaatttaactctgcttcatatactactcaattcaactcgcgctgcgctagcaacatcctttagttcattacctcttctcgtagaggagagcggagacgaggctggcgaaggtctggggcttcatgtccctctcctcccgcagttgatacagcttgtgcctgaacaccaggcgctggtacctgcaccaccgaccgaccgaaaccctaattctcccaaaccggatgctaaaccaaaaaagcacaaagaggaggggacaaatctggcgcggcgactcacagcgtctgcgcgtcggtggcgaggccggagaggccgatgtagagcttgtcgtggatcttgaacaccctctggaagtccgtcgcgacggtctgcagctgcaccccgagccgccggtcgctggcgatcgcgaagcagttcttccccaccatcgccaccacggcggaaccattgtactcgaagatctgcgaggcatgggagaattaagatccgtggggcgggcggcccggccggccagggagcggggcggcggggggcactcaccgacatggccggcgcggcggcgagttcgcggcggaggcggaggcggaggcggaggcggatgcggatgcaggcgtcgaggttcgaagtcgaggaggagaatcggaggaggaggagctcacgcagtgggcttttgaggcccaacttgggcttcttgctgagcaagaaggtccggcacagggacgccactggtcgttgaatacaactctaaccacgaaattcaataaaatttgttagaattcgatttttaaatatattttttaaacacttaaccagtttgtacgtggtttcgagacctgtaatggtgtgtttagttcacgccaaaattgaaaatttgattgaaattgaaacgatgtgacagaaaagttgaaagtttgaagaaaaagttgggaactaaaccataaatcagacctaactcctaaggcagcatttatttgagaaggttggagcctcttccatcctgacggtgtgtttggctcccggtcaaggttggatgggatatggcggtccatattttgctggatatggcgatccagttttttttttgagtgaatatggcgatccagttttttgtttgggccttgtttagttccaaactttttcttcaaacttctaactttttcatcacatcaaaactttcctacacacataaatttttaacttttccgtcacattgttccaatttcaaccaaactttcaattttggtgtgaactaaacacacccttggttgtagggatgaaagtggatatggtaatccattttttttgtttggttgggggagtgggatggatgagtggttgcaatcaccctttcattagaggtggtgagtatacccctccacattctcacccaaaaaatatcaagagtaaattgcatccatggtgcatcaacttggcaggtgggtgcaatttggtataataacttaagaaattagcattctagcacaataacttggcaggtaggtgcaatttagtataaaaactttataagtgattgtataaatacaacaacttgcaagataggtacgattttgatacaataaattaaaaagttatgtgacaacttaattatttggagtattttttcaataaattcaatttttaagtacttattttgaaaatatactagcgcatatttgtataagtatatttatatttttatcctaataactaataactgaaggtcaactaaactggatgtagaaatttttatatttcagttgatatttgagaaggtgaagaccacaaaaaaaatcttaaaggtaattggatgtaaattgtactactatgtgtagtataataattcttaaagattaaatttaatattataaggtaatatccatatgattactatgcaataacatactgacatcgtaaaaaaaagctcacctagcatatgtttagccaagttgatacatcaaaatattaaattgttaagttcttgtactagaacacactcacatgtcaagttgttgcattcggacgttcaattctcaagttcttatactatatcgcacccacctgccaagttattgtaccgtaggtgcaatttattcaaatatcaatctactaaaaaaatctagatagaaataaaaaaacagaaataaataaaagggaaaggagaaaaaggaaaaaaaattcttctcgaaatcgccggccgcccctcgccaaaggtcttcgtcggcagcccctcgcctcctctctcgccggcaaccccaccgccgcacttcctatctctcccgccaccgccttgcctcctctctccccggccgccgccgctcaccctctctcgccggcgcccaccagatccggtcgtcgccggctcgcctcctctctcgtcgccggctcgcctcctctctcaatgccgagctcgcctcctcccgctggccgcaggcgccgccgcctcccgccgacgcagctctcggtgcctgcactgtcgtcatcgtcgggtccagatcgtcgtcgtcgtcaccggcatgcatgaggcattaaatgtgtcgatgtttgatgtcgtggttctggtatttgcatggtatggggatcgtcggtgctagggtatatgcgagactgaggtaaaagagatggagacagggatttttatacaggttcgggcccctgaattgtcaggtaataactctacatcctgttggccgaagccggtattgctcttattcatgataatcacaccagtacaatgtttggggtagcctatctaactgttgttgacatggcggtctgacgatctgactcgtagtcaacaacaaggtagcctcccacctcgaatccgtgcccggcgagatcagagatagcgcttttgtctctcctgacagtatccggagacaccgcagggtattagccgtgcttatccctgaagtcgatatccggcggcttgtcttggcgtatgtaggcttctatgttgtggcttctatgtcgattgtgttggatgttgatcccttcatggtggatgtctgtccccctgtcctcctaggggggcttgtatttatacccataggtgtccccttgtccaagtagaactagggaaaccaatatggatacaatccgagtaatccttatcgtttccatggagaactctggttgtctttccttatccataactctctcgaggtcagtttccgtataagacatggtatgtggtggatcctgccgagatttagtcaactactattaggtatgtggtatccataaccctgacagtagcccccgacttcgatgcaaatgaacgaattcatattctcaaccgcgcgcagacattggagtaactgttatcgagctcatgtgacatttctcggtgagtttagagataacgttggacttcctttgtcagccttgtgcgggcaccgaaagggtttgtctaagtcaatctctgatgtcgaccgagaaagtacagagcatacgactaagtttcccgtcttgctgtaatcgagaatttggattgaagtcaagaaattttatctcggcgggtacaccatctcttcattccgtattccttgtcgagatccagcaaccgttctcgagcgatcgagaaggcgtagagtctgcgacggaactttgtcaatatttgtcatactcgccttagtcgatcttggtgtagaaccatagagacatgcgatcttcgataatgtcaaatagaattttcctgaaatcaatactcagaaaagaatattagacagaaatagcccccgagcgaacgctctaagggtgacatgttataatatgtatggtaaattgaaaatgaattaaatttaccgaccaatattttgagtatgagcgtcttctctcttaccgacttcgatcagtcagtttgtagagtcatacactctccctagcccccagccttgtcgtcggagaatcgttcttggaggataaggctcttggacccttgacctgctgtcacgcccagaaattcccgaatagaattccaagcagaatgtgcattaaaatccccgtccaggaccagccggggtacacaaacgacaatgttgacattcagatccacgtcttacaaacatcataaaagtcttacaaaaatgcagcggaaaacaaaagaaactggagctaagccttgactaaactacagcggtacagcgggaacaccactccacaggcatcctcgacggcacggacgaagcctactcctcggggaaaccttcatctgacacatacccgtcctctggggttgggaaaagtagagcaagactgattactacccactgtactcagcaagtcataccggaataggggtatgatgcagggaattaacaaagaagagctagagtggttcatttgcataaatactagcatttataaacaggaattgaatgcgaaaacagttgtaataattaagcagtattaaacatccgctgtccaacgctaacccacgttgcgacaggcccaaccatccacctaaactatccaagttcaacagattacactagggtgagactaatcacggtgaatctggttgaccgcccataaccgcgggcacggctattcgaatagttttactctgatcagaggtgtacaactgtacccacaagacacagccccacgacacgtttccgtgcgccggcatgccaccacgacataccggaaagaggccgtgacaggacccttcgcataaccccctctagccaagcacaccacacctcaggtttcacccccgtccccagcgggcaacgggcagtcccctctcgtgcctaggtgaatccggaagcgacagaggccgtcgcagggcccgccccgctccatcacgcccacccttgcctggatgcgtcgactagaggaaagctacactacaagcccagccgttgcccacgctggcttgtggtaagtacgataagttcttccagggcatcccgcgaaccggtccttaactgccatgagtgcgaccagcaaaaccatgcacccacagcccaccatgtgattcattttaattaaccaacaccagagcggtggtactaatccaacattaccattagaattaacagtctaaacattaatatgattttccccattgtgaactagttgaactaagcatggctaagcaattcctagtccaaactctaatcatgttataaccccaagctaacaaaggagcatggtatcaaaatagtatggctgtaacaataggtaaccatcccatagtaatattgcaaaaccaatgcggtatttgaaagaaaacattaggacatttgcaatataggatcaatatgatcaagtgacaagcatgacttgccttgctctgctgctggaggaacctcggcgactatctcgaagtacaccggagcgtcagaggaatcggaatctagcgacatacaaagcaaacattgcaaacaggctataagactactgaaacagggaacaaaaccatttttaatggattctacacatttttcttgatttactgagacttgaatgggattaaacggagctcggatgaattagttatgaattttagaagattcactgtgtttattactataaaagaaaaaccttaaacaatttattgcgcaatattaaccagggctgacgtcagcacgggggagtgcggcgccgacaagcggggcccaccggtcagcggcacggggaggagagagggcgccgacacgcgggacctacaggtcagcgacccggggaaaaggatggggcggcggcgccacgtggcggccggaccgacggccccgatctacccaagggtaaatcggacggcggcgggagctcgcggccgggatgcgcgggcacggcgcaagccgaaccggcgaccatggcaccggcggcgcggcgctcacgcggcggcggcgcgcatgcggcagcggcgcaaggcgacggccgacggcgaccgaccggcggcggagagcggcggctagaggaggagcggcggctacgcagctaggcggtggcgcggcggctaaacggtgcgggagagagaaaacgaggaggagagcctcaccgacaacggtcgacgacggcgggcgacggaggacgatggcgacggcggaacgagcttccgagcctcctaacgaacaaaaggagaggggttagagagagaga

SEQ ID NO: 4737 - DNA, 139009 bp, Oryza sativa
tacaagtacatggttatgtttcctgactttgtatgccactttttttttatagctcgggcacatgcggaccaacaaactgtgccccaagtacggggaggaccctgaaacatctcgaaatggatgtcaattccatcaggtctcatcctcctgatattgtgagtaatgctcaaataaaaacatcaaacaagaggttggtagcaaaagtttcgtctgaagcttttgaaactgaaggacctgaaagtattgaaaaggctaaacctgtccctgtaaaattcaaatgtggagcacctgagaagtcattggataggaacatgtcaatctcagcttctttggtttctgataaacgtatgatggatgctacagattcgaaatcaactggaaaggttaataagattaaaatatctaacaagataaaatatgatgattatcctcctgatactcctaagccatctgttgtaataaggcctcctgctgaagtggagaaggatctacctcgtaagaaaattattatcaagcagcccaaggtgcttggagatcagcaaagacctactgaacttaggagtggtcaggagcccagaaagacaaggaaaattgttgaattgtcaagctttgagaagagagacagagaggatgataatggtttttctggacaacctattcagatcaattcctcacatgatagggggtggggtctggtgggaaaaagaagcaaaggaataatggaaagtagtgaatcctggagagcttttgaggagcaacgagagagacaagaacagagactaattgaagctaggatatatgatgcaaggagagaggatgagctccagaaggcaaagaagaaaaacaagaaaaagaaaaaacatgaatttcgagatgatgacctacttgatcctaggccatacaaaaatgacagaagggtacctgaaagaggtcgagcggcaaagagacgtaccccagctgatatgacagaatacacaccaccagctaagcggcacagaggaggagaggtacttgttctcaaccctgttttaataggattatgcattgttttagcaatgttggtatgttagacctttttgtaattccgccaccagagatacctgtttctgcaacttattgtttgtagaaattgagaaagggcaaaataattgtatgatagcctttcaaccagcgtcgtgcttggttttgttattcacctttagagagttgggactagtttttctcaactaaactgtcccattgtgttgtgcgttctcaacaaaatagtttgttttgatcaatattcagtttgatcatccccgtcaacatcatcatctttattaattctcttttggcacgttcatctttagttttttaacatatagacacccgcattttgctacaagggatgtgatacccatttgtgagatataggtcggataatgcagataatccattgttgttttttttgcaagactatgaatttaaacttaatttatttgtttgcatactgatgcaggttgagctctccaacatattggaaaaaatagttgaccacttgcggacaatgagctgttcattccttttccgtaaaccggtgacgaagaaagaggctcctgattactttgacataattgagcgtccaatggatcttggtactataagggacaaggtgcgaaagatggagtataaaaatagggaggattttaggcatgatgtggctcagatagcactgaatgcacatacatacaatcttaaccgccatccccacatccctccgcttgctgatgagctcttggagttgtgtgattatcttcttgaggaaagcgcggatgtgctagatgatgcggaatacgcgatcgaggactagtgcacactaaccagatatggcatttagatcttgctatattctaacttagatgctgtaatgctgacctgtaggaggggggaagagcacctgtagaatttttcattttaggctctggctatggtatacctgggatccccaattccaactattttgcctcttgttggtattgggagttgggagttggaatgtacacaaactctaggttagacattgagggcccactgtaactattggcctcttgctgtaaaaatgtagcgatgtaattttttgtccatatccatggccttgggtgtctcaaattctgatgttgtagcattacatcctatgtgaatggcatctaaccatgagtcaaaggtgcaacacgtcaaagcatgtgctaaaggttgtacccggtctaacctgattggtgaaggtcccttcaaatcctgcatgattagaggcttaccatgcaactatgcgaagtcaaaacctgtaattgtaactgtaacgtgagagatggtgtaccggcagtacaagttgtttgagttgctgccagatgatgatgtatttgatgttgcatgctttgaatgagtattcaccgctcaacgatatcattggatggtgcagttcatagtttcatacctttggtttttggtttgtgatgttgtagcaacagaacaacaagtaatcatccattaaacaatcaagtccctttctcctacttgctgaatgtactgatggctcaagaggagttgagtttagagtatagaatttttaagatgctgacctgccaagtaaactatacaacaattccctagctctgaagcacctgctccagatgctcttagctgaaagaaaatctttgaagtgtacgagggctgtctggaccgtccgatcatgacaacgaacgacggcttagtccaagccaatttcataatggcccagatactcaatttttgcatggtcagatcacatctaatataatagtacaaaaaacaactaaaacgtgtactagcatctagcagtacgaaccagcaaactggcatgcatttgtctactccaaaagagcaccgcttaacgcgggacgcggctgctcacgactaaaccatttttataattttattctcttgcttttagtaaaaaaataatggcagtagtagacgaagacctggcaagtccttgggcttaaatctcacgagcatatgaccaattgaccatatctatgcacgcgacaaccaaaacattacaattccacgagtccgcgacctgttctactcacgtcaccccgcatccctgatcaaacaaagcatttgctcgggagcttgagctcgagctccgtaggccggagcagccatggtgtcgtcgtcgtcgtcgtcgcctcgccggcgagctctcctcctgctgttcgtcttcgcgtcgtcgttctttgccagcgctgcaggtgagagggttcttgagtagttttgtttctttgatgaaatggaaggcgtggagattgatcgatcgatcgatggtggcgtgccgtgtttgcagcggcggtgtcgcggacgaactcgtcgtcggcgttcgtgctggcggcggcgcagacgcggcggaaggatccactccgcgggctgaggtactacaccggcggctggaacatcagcgacaagcactacctcgccgtgagctcctcatttccgtgataaatttcagctcgcaatgcgatcaccttggtgttctactgttcttcctgcctggttcttgatgctgacgccgtcgagttttgctatgcttgtcgccgcgcgcgcgcagtcggtcgggttcagcgcggcgccggtgttcgttgtcgcggccgtctggttcgcctccctcgcgctcgccgcgttcgtcgcctgctgctgccgctgctgctgctctggcgccggcggcggcaacggcaacggcggttactcctactcccgcgccatcttcgccgtctccctcgcgctcctcctcgtcttcaccgccgtcgccatgtaaaaccatttctcctctccaagccatttcatattacaaagtacaaaactgttcagattttttttctagtataagtttgatcaaatttatacaaaaagtttagcaacatctgcttcattaaaactagcattaaatatatttgttttgcattagaaatgatactatatctctttataaatttagtcaaatctaaatatattttgataatatatttgtttgtggaaatgctactatatctttttataaatttagttaaatttaaataagtttgataaataaaatcaaaacgacctataatacgaaacggacggagtaatttctaattttggacgccgccgccgtcgctgtgggtgcagaatcgggtgcatcgtgctgtacgacgggcaggggaagttccacgggagcacgacggcgacgctgcggttcgtcgtcaaccagtcggacggcgcggtggcgagcctgcgcggcttcagcggtttcatcgaggcggcgaaggcggccgccgtggagaaggccaccctccccgccgacctccaggggaaggtcgacgacgtcgtgcgccgggtggacgcctccgccgacgacctcgccgcgcgcaccaccactaactcccgcaagatccgcaccgcgctggagaccatgtatgtgtgagattttcttggtggacgccatgacctcgtcacttccatcatcaagaagatctcgtttgacattctgtttgccttcttctcgtgatcgcagaaggacaatcctcatcgttgttgccgccgtgatgctggccttggcgtttcttgggcttggtgagcataaagatttctttgctggttttggtgaattttgtcaaattcgtttgtttctgtattcgagtaaataattgacaaattcttgttcgattttggtgcagtgttctccctgtgcgggctgaaatcactagtatacacgtaagtacaacatcacagaacgtacatagacttgtatatagtacaaaatttttttttactgcaagtttgtaaccttcagttcttctgcagcttggtgatttttggatggattctagttactgcaacattcatactgtccggcacttttcttctcttgcacaagtaagttgttctcccttgttactgtcttgttaaatatattgcttgattaaatataatttgaaaaaaaggtgagattttgatattctaaaatggattgagtaaatttagtcggcaaaaaaaaacaaatttactgaagtggaatattctgcttctgaaaagttaaaatttttttgtatgaaccagacgtactggaacactttgcatctcagtctttacattgactagttacatgcttgtatgttataatgggtcaaccccatataattaggggtagattaggagtcggtatgtcggtgtgttaataggctaggtctatataattagagataaatgatactctttcggttctaaaatatagtaacttttagtttttagaattcgtttcaaaatataacaacttcttcattaacattctcttctcaaccaatcacaatactccaccgttcaattttcccacataccttcatttcttctccaatcacaacacttctccatttagttctatcaactttcttaataactacgtctaacttttaaaatatttatattctgaaacgtagggggagtattacttttcacgtacgcactgaacacgttaggacggtgggatgagaggagaacgactatattttaagatagcagatatcagttaaatctgaatcattaagacactaacacgagctctgctctgcttcgtcgtgctcgcagcgcggtgggcgacacgtgcgtggccatggacgagtgggtgctccacccgcagggccacacggcgctcgacgacatcctcccctgcgtcgacgccgccgcgacgtcggacgcgctccgccggagcaaggaggtcaactaccagatcgtctccgtgctcaacaacctcctcgccaccgtcgccaacgccaacgtccccgcgtcgtcgccgccgtcgccgccggccagctaccgccagtccgggacccccgtgccgctcctctgcaacccctacaacggcgacctctccgaccgcgcctgcgccgccggcgaggtcgccgccgccgacgcgccgcgggcgtggcggggctacgtgtgccgcgccacgggggcggcgccgtcgtcggaggtgtgcgccaccaccggccgcctcacgccgacgatgtacgaccagatggtcgccgccgccaacgccagcgccgggctgacccagtacggccccgtcctcgccgacctcgccgactgctcgtacgtgcggcgcgcgttccaggcggtgacggcggcgcactgcccggggctgcggcggcacagcggcagggtgtaccaggcgctgctcgccgtgtccgtcgccgtggcggccgccgtggccgcgtgggtggcgcactcacaggagcggcggcggcggagcgagacgaggcggttccaggtgtcgccgtacaggttccccatcgaggagaagtcgctgctcaagagcccccggcggccgtaccggcgaggcgacagcggcaggatggcgaggtagaagaagacatcgccatggatggatggatggatggtacagtgtcgaacaccttgggacgctgccacgcgtgttgagcagtttaggatgtgtttagtgcttcgatgattattatattgtactgattaatgatctccatcgaccatacaggttatacattgtacagcttgaaatgatttcgtgaaagaagtgtgtagtttgagaaaatgcaatatcgtgctcgcccacgtcgagaagcactgcctctttggtttctaacatttcgccgatcctattcattagccctagacaacaaaacacaacagggtatccgattgatctggcgcccattgcgatgatcggaaagcagcacaccatggatcacacgtagaattgaatcattagcccaaaacatcgcaaaaactacgggaatcagcaacaaaaaataaaaagaatgcagacgtgaactatggatagtggcaaatgatctccacctaaaaaataaaaaataaaaaataaaggcgtcctctcctcgcagtcgtgccgcggaagattggaccggatcatggcggcggcggccgccggagacggcctcagaaactgcaggacccacacatcaaaaccctatcgccggcagcaggggacaccacgcgtcgagatcgatcgagaccaactcgcacccgaaaaatggcgaaagagaatcaaacagaagcagagagctcaaaatcgaacgcacatggcgacggcacttcgccgatcgccaccgccgcgcggtcctatacggagagcccgctcgatcggccgccggaaacctaaccccgcccccgttcgcgcgctcccatggagatggcggaggagaaggggaaagcttctccagatcgaggaaggcggcggtggaggtgcgaaaatttggactcgactgacttgtgggcctcgagcttttcggcgttctcgccaaatggcgtgggctctattgctttggatcaatctagacgtgggccgtagctggcaggacttggcccttttcgcgttcgtgtgatcacgggacaacgctgggctcgttgacgaaagacgggaaacccgtgacattcgggcctgttttttaagagctccaactcctaaattttgtttcaggagagttgggttttggagtgaaattgtggagcaggtctatactctactctatctctctagcttattttatgataacactctacccagtttcgcttagaaaaggtgggagctagagctggagttgtgctaaatagacccttcccatgtcagactcttagcaactcctctctttgtcttcgaatataacaacataatttgttccaaaatataataacttctccgtcaacatttttttctcaaccaattataacacttcaccattcaatttttcacctacatccacttcttaatcaatcataatcttttatcatttaactctaactactttcttaatgaccgtttcgaactttaaaaattcttacattcttggacggggtaataccgttttttttcagtagctttctctttacataatataataatgatagatataacgatttctttatccttttaattaatggtatgcctgaaaatgcgtagcaaccgtagcattttataagaagaaaaaaatgcattgctttttagggggaagggaaacgaacattcgtggtaatgtacgctcaacacgcatgtaaactggacggcaggatgcatcatagcggcaaaggcggcatgcagcagcagcagctagggccctttgtggatgaaagaaatgaaaaccccaacccccacccatatccaggagatgtagcgagcatggataatctgataatgctagaggccagattagggaccttaattagggacgggccttccaccataaattaatacatgtgtcgctcaatagttgacggaaatgcagctgtacgttaggagtatatataacatatccacaaccacagacaccataacactccatatttctccatctcatgagacaagaccggccacttgtactagtaaccaggttccataattcttcttgacgctttaaatagtaacacgatcttcgaaatatgtgtttaaatatatttttctattataatatatatataataaattaatacgtttttatttttattataatactcataagataaagagtgaattgtactttaagccacttttgtttacctaagtttcatttaatttggatcaccctctatctaatcttctcactttgaactagttttattttttttaccatttttcattttggactgtgcaaactctcttcgcgagcacaacaacagaatcaaacacactctcatggcaacaatattccctatttacgtgcaattcacatctttattaaatgagaggtttgatgttgctatacaaaagtgttagggtggtctaccgtaaaaaaaaaataaccattcaaaaaaaaatggtggtctaaagcacaacaaaggtaaaataaccaagcctaatgtgaaaagattggatagagggtaatccaaaataaaacttaggtaataaaaggtgattcaaaatgcagtttaccctaagatgataaatctatatatgatattggtttagtgcctttaataaactaaactagctgtgtggcccgcgcaattgcgcggctagcacctaaacaaaatcatatatttttagtatgattttacttaaaatttattaaatagctatctcattgtcttaagagtttgaaagaccaaaccttatcattcccgtgtttctaattatatagttttttaaaagtcacaccagttgctaccccttatgacatctccttctttatttgcttgttcgatctaccactatttctattcattcttcttggaacctttaaaaattggatcttatagtttttagagttttttttgtcacgttgggtttcgtttttataatttttaggcgtcccgtcaaacgttgctattatactcctctatggtccgtccactatctcttctctttattgtcattgagattttaaaaatcgaacataattattgtttgggttcatttttactttctagaagtcccgccaaaccgtcagcggctttgccattgtatttctctacggctcgcccgctgtctcccttctttattatcattgagattttaaaatcaaacatgattatcattgttttttttactttttagaagttccgaacctttaaaaattgaaccttgtagtttttagagtatattgtcttgttgggttttattttttataatttttagaagtctcgtcacacgatgccactatgctcctctatggcccgtatgccgcctactctttattgtcattgtgattttaaaaattgaacataactatcgttggaattcattttttatttcctagaagtcccgtcaaccgttggcggctctgcaactatactcctgtacaccccgcccactgcttctcctttttattatcattgagattttaaaaatcgaatatgattatcattggggtttttttttttactttttagaagtcccagcaatcaccttgttcgtttgcttcacggcctttctaccgtcccttgttttaatcgttattagtattctatttggtgttttattaacagtttttatatgttgtatcaaccgccaccactctactctattataggcctgttacttaatttatctcgtcatgtcttttagatggtcttttctttcaatagtctttatttttatcataaactttagctatttataaattgtattccaaattgaaaacttatttttcattttgtaattttagaatttttttttcaaattttaattaatatcgtattgtgttcttttaatatttttattttttattttcaagagaaaagcccgtgcgctgcaacgggtgacaactattttagtcttaattcactgtgagaattcgcttggatctatatatttctataaaatcataagctgtggttaggagtctgtttgtctaaagtcagcatgcgaatttttttatacgactcctatatttccaaaagcggacgaacttaaaaatcaactcaaaggatatatattttttcaaaagcgaacaaatttataaaccgactcatacacggatgacataccaaaataccgacaaaagaacatcttaaattttttataatagtagaggtttcttttaaaaaaatagtagaagtagaagagaagagaagattacggacaaaaagtcctttttcgaggcaatcgtacaggaatcggacctttttatttttttatacggtagaagtttttttttctcttttttttattttttcttgcctttttttctccacagatagtcggactttttttatggagtcggacgtttttttttacatagaagttctttttctcctttttttctgtttttttataccggcaaaaacatcttcaatttttaatagtacagatttcagttgtttcaaaattgtattcctacttgaactctcttttaatttttctaattttggatattatttattttttattctgaattttaattaatcacatattgggttcttatgtggattcttctttcaatattattttttttaattccgaatttcagctaattttaaattgtactcctatttgaactcttttttttttttgctaatttcggattttatttttatttttattcccaattttaattaatctcgtattgtgttcttatatggactcttcttttaatatttcatatttttaattccgaattttagctattttaaaattgtattcctacttggactatccttttttttttaattttagattttattttatttttatttcgaattttgattaatctctcgtattgggtttcttatatggaaacttcttttaatattgcttatttttaatttcgaatttcagctatttttaaactgtatttctacttggactctatttttttttctaatttcggattttattttattttttattttgaattttgattaatctcgtattgggttcttatatggactcttatttaaatattgcttatttttaattttgaatttcagctatttttagattgtatttctacttggtctttccttttcttttttttttctttttcttcgattaatgtaggaatttctagcccctacagcgaacgtggtgcctcctttcaaagttgttttaataatataatagatagatagatagatagatagatatagatatagatagatagatagttattgatagttgaaattataaaaaggtatcttaactttatttaaatcgtaaacaattatggaaccggaggaagtacgtccggtgggctagccgtgtgggccggggccgggccgccggccagcgttcgcgacagcaagtgcgcgggcgcaatgatcctctgggaagccaccgcgcgcgacgcccccgccttaattttgacgcgcctacgcacaatacaacacgtacgccgccgaagccgtacgtcgcgcgactctcgcggcacgcaagtctcgctcgcgcgcgggttgttggtagatgcgcatgggtggcaggatttggcgctgatcgatcactcgaaacacgggggctcacggtgcgcgacgcgtacctgcagctataagctagccacgggcacggaccttaggtgtgtgggtgggagacgacaggacaggcacgctagtaggcttaattcatctcacgcgtcatcgcttgactgcatgcgccaagtgaggggccttcagagcttgtactgctatcatgaaaaattctaaggaaaaattagaccgtctttagttcacccccaactacctaaaactttcaacttttcatcacatcacatcacatccaaaactttcctacacacataaatttccaacttttttttttaaactttcaactttccccaaacttctaacttttttcaggaactaaacacagccttaataacattcatacaaaatgtacatatcagttcgtagcattttagtacaaactcaactcacacgttgagatacacagattttttttatttcttaatgtgtaggtcaaatttaaacttgatttttagtggagtgctaaatacaactatactctatattatcttcttttaaaaaaattaagtttgtaacattatttacattggatttaaaagaagaaaaatacatgaatgacggaatccactatttttttttgcggggaaaagggaatatattactcctcacaatcaatgtgtgagatgaaattacaactattcttaggccaaaatttagacatagactcacatcgtgccttatttgctaaggtatggcttacacgattttggttacgatggcccttgacaattctaatctccctatttccagctaacaagtctttcacctctcggacaagaaaagccaggtctgatttatccttttcctgtgatttgatcatgtgaatagccaccaggcaataagtttctacgatcaacggccaaagagtccattgcaaagccagagctattccactaccctttaatatacgatcatacaaaagtcgcaacctatatgtgttgttaacatttactaacactagtacgtagcactagggtgctgtttgactctcgaattctactagtatcttttattattctgtttagagtatatatagcctcgagaaaatagtacaaagtactacgcaattttcagaattatgaaactcagaaaggtaagatctttttcagacatcacgcatacaaaaacaagcttgcagtagagcggtagtagcatttgtttgacgcagctaggatcaccctaagattccaaccactccctgtttaccaccacacacaaactttgtttactgcacacttaattgcccttttacccatgcctaatgacctaatcttgtgacctttttgaacgctcatagccgagctatagctacaagacagacaagaaaaaggtccacatggagagattccaaagacttgctcagtttaaatttctccccctatacatgctactccataaatcccaaaatataaaaaaattaagttgaatttgacaaatcctaaaaccatgagtctatacagtctcttgagatatactccctccggactgataatacttgtcgttttgaataagggtgaggtcaaactttagaatatttgattatcaatcatttttaaaatatttatctttcaaatatggtgactacatgtatagattagtcttaaaatgtattttaataagatcatatatttgttaatatttttatacatattataatagaaaataatggccgaagttttttttttttgagactatgccattgtccaaaacgataattattatcaacccggagggagtagtactaggatggtataataatactgtagtagtatcagcaaataatactacatcctttcatgtaatttatggcctctctctgtgattttattactgccaatccgacgtgaacgtgtagtaacagcaacagtagtaacaaacatgcagtccctaccatcttctgaacctgccacactttgtcaccgctttattcgcgtcctttcagcatttacgtatgctacctgaccataccatgccatgcgtggtccacataacacatcggccatcatcctgcctccatatcgactctcaagtagtgacattattacaaccaaaaagaaaagaaaagaaaatctcaactgaatagatgagattaatttaggtcttaaatgaaaccatcacgaacttgaaccataaaggccaatgcaactaatgcaagtgctcatttaattaacaaatactcctactaacaaacatctctgcactgatacgcggtagaagcgaaagccatcagatatcgtatagtactcccctttttgcaggggcatgcatgtgatgagcgatttgcatcggatcaggctgacagctttggcgtttttgtgtctccttttggcttaagatctactacttctacacctcgatcgatcgctgctgtccagtgtaccagagttcaaatggcctatttgagaaaggttacagtgtaacaaagtttaaatgacctatttaagatagtctaaaattctgagaagttgcttgttagtaactactccctccgtttcacaatgtaagtcattctagcatttcccacattcatattaatgttagtaaatctatatagatttatacgtttagattcattaatgtcaatatgaatgtgaaaaatgctagaataacttacattgtgaaacggagtaagtagttctttttgtcaaaatctgcgtgaaaagttagattgtttggtgaagtttctgattatgtaagaagccgcaggcctgcacctaacagaggctccccgaaaccggtccaaagacccaaacggttgtgttggatcttgtagtcttgtcaagaaaccggccaagccccatgaaactccaaatagtataaaaaaaaagtcaagatttgccttaaagatataaatacgagcccaatttatttagtagctgccattgcaacgatgtgcagtaataaactagtaatagtagtatagcatgtgagccgagccgtgcagctgcagctgcatgcttcttcctccttcgctatatatgcagctgagctgcacacacgatgagcagtagtagtagtagtataatttggtagtagtgagcaagtgaaactgcaagtgagctaaggtgcaagaagagagaggtggagatggattggtacgcgtggctggcgaagaccgggttggcgccggcgctggcgtacgagtacggccgcctcttcaaccagaacgagctggagcgcggcgacgccgcgcacttcgaccacgacctcctcaagagcatgggcatcgccgtcgccaagcaccgcctcgagatcctcaagctcgccaagaaggactcctcctccgccgccgacgcaggcggtggcgactcctcgtcgtcgtcgtacgcgcagctgatcgcgcgcaaggccgggaggtgcatcgcgcggtgcgcgcggcggctggcgcgaccgcggggtgtcggtggagggagggggtcgtcggtgaccgtggtgccgaggatatgcagcggcgacgacgccgtccgcgtgggggcagtgcaggcggcggcgacgaggaggaggaggagcgtcaagaagatggtgctcatgatcaccgacggcggcgccaccgccgcgaggggcggcgtcggcttcgccgccggccggttctcggggtcgcagaaggcgagcctgatgttccacgactgctacgaggaggaggacgacgactacgaccacgaggaggaagcgcggtgcggcgacggagccgagggcggcgacgaggatgccgaggaggaacggtgctccgacggcggcggcggcggcggcaccgacgtcgagatcaagtgggactccatgttccaggacctgaagccgacgtgattgagttgaggcaatttgattaattcgcgagtttgtgtgtagctttttgtgagagaatttttacatctctctttgtggtgcgagagcttaattaggatggtaatgtgtacgtgtctatttgccatgagtttagacgataataatatcgagcgcaaatgttttgagtgagattaattgaaggtcaaaggaatttagtgtacgcgattgatcgaatacccactgcataactatgaattattttttcaattttttttagcacaaggcaggatctctgtcgatcaagtaaagttaacaactgatgaattctctctcgttcccggcaattggctgcaagcctgcaatgtgctacatgcatgatttattacgttacatattcatggctgttaacgtttgttcatcgcaagattatgcgaaaagtaaccgctgaattacaaggacttgtctaacaaacattcgcatgatttgtgttcctcatgagcttaaatagaacttcaggatgaccgacaaaggcataagcttgtcccctcttaaccagttaacattgcacagcagacatcgttagtactcctatataatgatgtccgtcgatgtaaaggcgctattattttagactaaaaagggaaaatgccatggcatggacttggatgacaccaatctgttggaagaaaatagtatagctcgaaatatagcagcagttgggggtacaatcgttgggtgaccactgaccattgcctacttggtcaggctctctagccagcgcatgttcaaatggcaggccagtatcactggcaaagctactgaaaatgacggttatgaattatgatgctgtccaacagaacggccagtcacgtcaatgcttgacagagagaagggccccacgagggtacgaggatatatccagcttggtaacaacagacaggcatagacggcacaggattcccttcaaagaatgacataaaacggaggtgaaatagtttggacaagttcgatgaatttctccaaaatattcccacttcacacacgtcaactcatattggtgtagtaaagacaattaactgaatgctttaaccgctattggcacaattaaataatcggtgtgtagccacatgaacacgggtgtatcagtattcagtacagcatacacgagttttcgattagaccattcaatatgatagtacccctttcattctttcatggcagatgaaaccacatacattgctttgtgggcacaaatagaatagggcccggggtaaaatgattgcagtaaaaaaaaagataaatcactcaaaattgggatgcttgaaagaaaaatcaagaacgagtagccaggtagaaatctcctgtactaagaaaaacatgttttcccagctggagatcaattggtgggaagccttcaatgaaatccaccgtaatctgtaagaacaaaggcaatttaaggcatgaagaacaagtattctgaaaaaagttcagtagaagttgtagatttaccttgccattcccagcctggaattcattcttcaatctggaaatagaccttgacagtaaatatacttttaatgcatcaaaatgctcacggttgcctgttccatcaaagtagacacttatgttaccatgcagaatataacaaagagaatgccaagacattaacaacgaaaatagacaagtacaccctatcagataaggttgtatttaccagcggcatggacaaggagatcatctgtgaccactggagaaacccttgcaatgtaaatgacaaacgacatgtcttgtacattgtgagactcctcacagatcattacctgccaaaccagacaaatgacaatgagattaaatgttttatatccatttcaactcgtgtcaacaccaattggtggtgatgatagtgcatataacttggtgttcatgtaagaaaaatcaaatcctccaattgatagagataaaagtcagttaacagtaaactgaaacagggagaatatccaaactcactgcatctggtggcgccgccatctttggaattagtggattgccaagagcatcccttatatactgatcctgaacagaattacagtagctttcattaaggatgttctgatttatgaaacaagaaccaattacttatgccaatttagctgacctgtgactgcacaatctctactagagtattcttgccatcgtccataggtttgtaatatacatcaactaagtctgtcggctcaagttgcgctgtctttcgtaacttctggattctgttcacaacctggacagaaatgctcaagaattattagcccagatcatgaacatcaaacttatgactgacaacagagaaaacgtatgcaatcaaacagccgctggaagttcatagcaacatgaagtcagacatgacataggtcaggtaaagattaccaaattcaggcatcaaccagtgcaaaaatactactaacacataattctcagtactccagggtgtcatacccaggagtacacaaatcatatagttaattacctctcgagcaactccagcttcaaacaatgattgatcagctcgaagatccaaaacgactaacacatcacctacatgaaaaaaaaagtaatgataatatgacaaaatagacagatagcatacaaactactcatatggaaacatatttgacataccatctcccgcagcatcaatttcattctctgccacatttgcaggacgtttaaattgccggatcacctagagggtaaaatgtttcagagaattaaagatgcagcaggttggaaaaataagtccactaaatgcaaacctgtgcaaactaaagtgtagcatcatgtcattcatcatgatgatcagaaataatgcccccaaaataaaacaaatgtcaaatctaatttttagaataggtgtgcttgcaaaccatttgctagacagatatgatctggaaatgccaaagcagaacttggaaatgatgtgtttgtattttacaatatatgtaaaaagcaaatcaatataatcttactaacatatcattctgagaacatatactagcacaattaccaaatattaatcttcaaaactgacatgcaagcaatcatttaaacctttaaattaacatccatcagaagcatggaatgttaccttaatatcgtctaacttcaagcaatgaccaaagaatgaaatttctccactttgttcaaaggctaagatctgttcctgtgtcattttcttcacttcatttgacactttgcccatgtcctttcccagtctttttcctagcacactaagaaaataacacaagtgctgagcagtagataaaaaaaaatgcaaagtttctcacgctattaggtacacatacctaaaattgggttctgcccggagagaagcatacaacatgggatcattacatggagtgacagtcttaacattcatttcttccatgacatactgtatattggaaagtaaagtatgtcaagactcaacactgaagaaacatgtccatttataaaataaacactaagtggcaaatattgaagatgaattgatcaatctcgtattctcattgctcaataatcaagattatcaactcctagaaatatgggcaagcagattccttggcaaatattgatctcaggaagggacatgccaacagtgagaaagcaatgaatatggaacataaaagtgtacaggagactttggttacaactaattgcaaatgcagtcatataattccataacagatgacttataggcactgctgacaagtacttataaacaaacctcttttagctttcccgttatgtcttcaagaaattcattgtcaggatgaacaatcaccatctccctgaaactcagattggttaagccatatggcaaaattgaagataatatacagaacaagcttttatatcatgaagcaaaaggaataccagaaacaacacatataaaaatataaagaccatctggttttcaacttcaaccatcttaaaaacataattattgaaaatagcatacgtacttttacgcccatatacacaaaaagatgaagaaagaatgtaaaaccgaactaaacacctaaaacacttcgatgttatgacaaccaaaaagattcctaaaatttcatggccatcgattatcatttcattacaacaaaatgtgtatcacatgtcaatatattatacaacgtgaaattttcaatttcctaaacgaaatatctctagattaaatcattaggaaacaaatcatgagactatgaacatacttcagtggtgttttcaaggctttgttatgccgttcacgaatattgcgggcaagatcaatgatggtcatcattctgtttacactttgctcaacacgctcatctctctgatcatgaagcaaaaaaaatcaacatgaagtcacaagtaatacgggtggaataaagcatagtacaggtttagataagaattacctccccagttgtggaagggaaactgcagaaatgaatactatcctctggtttagttgacacctttcgtaggttttgatagagagtttcagtaaagaagggtgtaaatggagccatcgccacacaagttgttacaagtgcctgcattcatgattaacaaaatgtctttgtgaaatactacaaagtaccagcaaaacatacaatctaattaggatttttttaatgcatagagtacccccaaaatattacgtaatagatgctaaggagcaagaaaagatcatttcaggaggagttgggaacttctccgccccgcgtggataccaaggcgacgcattagcgcatgattaattaggtattagctaaaaaacttgaaaatagacttatatgatttttttaaagcaacttccctataaaaaatatttgaaaaaaacgcaccgtttaacagttcgggaattgtgcacgtgaaaaaaaagggagtagaagttgggaaagggtagcgtccaactcagcctgaagctatttcacttatcaaaattaagaaaaaaaaaagagaagtttaatagcaacaagattatctgccaactggataagcattatacgtccagaaataaaggggaggtacataaaagatgatgaagactccttttggagttctcagaggcaggaagacatgaaaatgtgaacatgagatattgagatacatacagcattgatatttttattctcatcaatccataaaacaaacttaagtagaaacagtgcactgcacaatatatacttacatggtagagcgtcgaaagagatactctgcagtcttcttccccagtacgtccttttaaccgtttacggttgaaacgcacatatatattagtaagattgtcgatgtatttaaccaaatatggcacaacctgcagaggtaaataagataaaactttacatcaagtaaccataacatgaaaataaaaattgatacatctagcaaacaaatattctaagagatctgttaaacattcaaccgtgtaaagccgatatgcgtccatctcctggtgaacaaaactgactagactttcagttgcagagtttatccagtgatctagaacatttgatgacttcagaagtgaggcttgatctattggagaaaatgctgagaatccctcaatttcaagtctcttggcattttgtacaagaaatctatacgcattataccacggcaggaagacatctttcacctgttcaattttaaacaacacaaatttgaagcaatgttattttcctcagaaagacagatagtatccaatatactgagaaaggacacttacaacaccaaaaacaccactccttttgaaccgtagagactccgctcgtacaactggagaatttatcaaatacagtctcaaagcatcctggaaataaaagaaaacaataaattaaattgcaaattctaactcagacataccatgcaattgcaagcctcaagtcattgcatgtgtcttcagacagaaaatgatacagaatatacaataaagcattcatatctttaaaaatatgccacataccgctccgtattcatcgatgacttctacaggtgaagggtaattctttttactcttgctcattttcttaccatcctcagctaatacaagaccattgcatatcagatttttaaatgcaggtttcccaaataaagctgttgataacaccatcaaagtatagaacctgcaggatgacatcaaaccataaatatgatagatataattaatgaatatgcatataacaaagcatcatacacattttagaacacaatacacaaggattccactaatatcattagcaggaactgaatttagtttttgcccaccaaaatctcataaagtaaacgtgataaaagcacaagcattacagaattcttttaatcaacaccagatcattgctaccagttaacccagataaaacataaaatagcataggatactgttttttctcccaaaaagtgtaaaatattattgaagaaagaaaaaactgctatcaaaactactacagacaatccatggtcaaccataataattcatgaataacatcacatgccttctgaacaagcaaaaatgaattcaaggtaagtgtaactaattgttccactttcatcattcatgatctgtataggtatgttacaagaatacatggtacataatcatgaaatatcatccaaggtcataaatgaactgcaaaagaagaaaatgcaccctaaaattattagtaacagacacaagtataaaacagctgtgaaatttcatgaagtgaaacaaaccatccgcgtgtttgatccaatccctctgccacaaagttgccaggaaagttcttctcaaacaattcacggttctcaaatggataatgaatgtaggcatatggcatggaaccactctcaaaccagcagtcaaaaacctgaagacatcacagcagtgttaagtaagaaacatttaaaagaactgatatacacaagcattcatatctatagcagttcagacttcagaggcaaaaacgttcacatacatcacatgtataacaatgcaactaaacaagcagaaatagcgagtgaccttatggcattcagcagttagctactccctttgtttccatttacttggtcattatagcattctttttttttttgtcaaaatacttgtcgttctcacattccaaagcatttttagatacgtctttcccttcctacctttcatcaatgcagtcatactagtactagcactcctcacaaggaattttaatgcttgctttgggaaagatgattaggatgtaagaattaacgatggtagcaatgtaatatgctacagcttctagtttagtgtgagatttgctagagcgacaagtaaattgaaatggagggactatttgtacataaactcaaagacttctaaatgaacttgagtcctacagagtagaaacaacctaagcaaaaacaaggtactatttaatgctacatcaatttattagccaataataagacaaattggtgcaatcagacacaaggatttctcaccaaaacagtttcactgatcctaaaaagaaaaggtaattcaaggaattaactggtacaaacataactaaagaatattggtgacaaaaactgtgatatatttcaaatttcactcatattagagatcactaacagtgacgcaggagtagcactcacatgccatcaggtctattatctcaaatgggcaacaattagacaaatgtgtgcactgccacaagccctaaaaaatatttcaaggacttcgaccaatatggtttaatcctatttcataagaaaaatcaagaatagtactaaaacataactgccaaattgcatccatatttagaggtcactagaaacgatatttactgcaatagtaggaatcctagttgtaggtataaaatacaaagcaatgacttacatcctcaactcgtttgagcaccccatactccggacctctgctagagggaatcgtgataccatcaacatagtgtcggtgaagatcattaacctggtcatataatttcagaaaataatttgttcaggacatgcagaaatagcaattgattattgaagggaccaaaagcaatgttgaccaagcaaaagagaaccatatgagaatataattactgttttctaaaaaaaatatttgcaagagtggatcatagcatagtagagatatcaaccttgacaccagataaccgttcaagtttctcaatggaatccataacaacaatttcttcaccatcttggctgatccacagcggtagtggagtcccccagaatctacttctgctaacagcccaatccctagcaccttctagccaattatggaaccgcttttcctgcatacatttgttgttaacaaatatatcaagttaaatataccagctgataacgtaaactcaacgctcgcaacagctgctaacgtaaactctgcaagtttcatattaccagttcaattatagacattcgatgcaaatattgcaaacaataaatggtaagacatgaaacagaactatcatagaaaataagctatcaatgtcattgatggcaaatctaggtgatatgcaacaaaaaccagtgcaaaccttatccaattttgtaatagagcattagctaattactttgtgtgacaaacaagaaaagatagagtaccttaacataatctggaacccaataggtctgcttgttacattccagcaactggtccctaatcttttcaaccttcacaaacctacagaaaagctctttcaggcatacatttctcaaataaaaacaggtaatggaacaggaaaacaacaatgaccataaaagacagatgaacaaaaccaacaaataggaaccacaaagattcaaaagaaagccacattcgttcatctagatggaattaaaacatgatgaagttaaattgaagtaacttctactatctccgtcccaaaatatgagttttggggttgtacacgggtattaagaaagcaggtgaaattaaatggagagaaggttgtgattggttgaaaaaaaggaagtaggtggagaaattaaaaggtggaaggttgtgattgatttaaaaagataatgtaggtgcaaaagttgttatattttgggacaaattttgaatgttagaagttgttatatgttggggcggagggtacatcatgtacatgtgttacaagtataagatggactgcattaccatttgtgctaaacaaccagatggatagagaattatatataactcaaagggtaaagaagacaccgactaacaaatttgcatggtagcagcagtagatgcttaccagcttgggacagcccggtaaataagaggagtgcccgagcgccagcaaaatggataagagtgttcaatgctccctttactgacaagtcttcctttatcctgttcacaaagtttataatcttcagaatgacatcctcagggatataaaactatccaacatatgcaataaatatgctgctataatatcaaccaaaactgcttatgagttatgatttacgaaggtgcaatccacagagtgcagacatacattgagaaactttatgctatacatctgatttccttttgtgtgcacccacttcaaggtcatccagacaattaacatgataatgcataaaatgcacatacaggtcctgacattattccggtacatactagcatgagaatctatataatgcaatgtcctacggcactaatttattaatcaaatccaaaatctatagataatagtccacataaacaagtaggcaactaaaatgtaaatgtgttacatacagtaaatggtccaaggaatactgaaacaacagcttaccttaacagagttgatgatatccctgtcagcctctttgacatatcgcccactgaactcagatatcttttcaatgaagcagccatcatcatcaacggcgacaacaagcccactggcctggatatgaaacagacatcaggaaaaaaactggagtaaataaaaacaaatccgcatgactaacccaccataaactccctcctctaaactcacactccctttcccaattgttgccaaaaaagcccttagataatttaataaagcttgacacagaaaatatataaaagtacatattctagactacaacacaaagtaatggaaatatggagaatatgcatatttagtagattgataggtcaactgtctcaacctccaaggtcttggcagcatgatagttagtttaaatacccaaacagtaaaggagaatttttccaacctcaatgataccagcagcaagacaaacacggtggtcatcttcaccaaaagcaggagcacaatggacaacaccagttccactatcatcagttacgtagttatccgctatcaccctaaaggcagtctcttggagctccaagaaaaaatcgaacagaggtttgtatctgcaagtaggaaaagtaacagttaaaaacaggaagcgccccagatatatactccaaatttggctatggcagtatggcatgttccgtattgttctattaacatctagaaaacaagtatcaggagtaatcaactaagcttttttttaaaactgaaaaacagcaggggagggcccgtggttaagattttattaatataacaacagacaaaagccaaaaaaaaaaagaaggaaaattgcagattttggatccaatcctctagtgtataccaactaagcattactgatattaccgcacaaaacaaagttcaccaattataaaactaaactacacaagtggtacacattgtttgagtagcaaccaaaatgatctctccaaaagcatagagatatataaacgttgcatgaaaaattcaaataacaagtgatgtggattattcagccctgcccagaaaaaagcaagtccaacaaaaccaaacatggttaacaacttaaggaaaagcatcatctcacacacataactccgatatctactttcagaaactgttcactagttcagtgaaatgcttcctagcacagatagtgttaacatgcatttaactttcataatgtcatgggaaactaataataaactatgaaagtattatatgattaggaagacagagcactcactttaggcctactaaggatgatcctggaaactttgccaataattcatatgcttcagtatccaatccaccctgaacaacttcagcagtgcctcccttagaaggtgcttgcttctttccagatgatttagccttggctggcaattgcccaagcctagattcagcaacaacatacactgctccagttgacttgtccttaacctgttcgcaacacagtacacatcctcaacagaagaaaacatcaacttacaagcagagaagggtgacagttgtatagtttttttctgactaaatgaatggggtggtctagacatggagcagaataggaaacaatagtcgataatgtctttcttctacaatcaatttgatcgatttatcacaaaaaaagaaataagtaatgcaagaatgcatcattaagttaaacaaaaagggtctaaaatgttttttcgcaaacagtaagaacagggcagttgcagctgctagattgactggtacatggttctctatactgataaatatggattaaccggatgcagcaattaaattatttgcgggaactgggaaactactataagatcccaggagatatccactaaaataaggacaagcatcatgtatgtgcagcaaaatgattataggataaacaagacagccacttaatgcaatataacacagaaaccaatgatctattgtgtatagcattatgtatgcattagtttacataacatccagagttcaaaacttctgcacattttggatttactagcgagaagattcctcaagagtatttcactggtttttttgcttaatatatcatcagtgaaagttctgttccttgtaaaatcaagttttgtatgtatgatgttaacagtgggtaaacttgacagctatagtctaaagttaaagaatggaaaaatagcccaaggaaataaaggagaagtactaaccttgacatacacaagattggcattgacacacaaggctaagttgcttggaagtgtccagggagttgtagtccatgcaacaagtgctgcattgtccgcatcaccgataatagggaaagacaccatgattgctggatctgggacagtctatggcatcataaaaagaagttactacaaattgcatagaaaatttatgagctacgacatgaacaaagtcaataaccaaccctatagtcaagtgcggcctcaaagtttgatagtgcagtcttgcatcctgtactgtaaggcatcacctgggacaagaacaagagcccaggacactttaactttcaagaaattcctcataaaaataaatccattaacagaaacaacagataaaaaccaatcaattatttcatgtaatcacaatagcattatctacaaaatgaaaagccacttccatgtaacctaaactctgctattcattcttctcattgagacataccagaacaattccattctccacacatataaattccaaattctaataaaaaatacagttaaccattgcatacttctgaataccataaaatttcaggttccctaccgcctcagcttgtccactttgtagcaactaaatcataataaatatgcaaagcaaaccccgagactcaaaacctaatcaggcgtgagatcagaaatttaaccttgaaacccttgtagacgaggtctttctcccagagctgcgagaaaacccaccaaacggactccatgaaatttatgtccatggttttgtagtcgtctttgaagtcgatccacctccccgtgcgcgtgacgacggcctcccattcggcgacatacttggtgacgatgccgcggcaggtctcgttgtacttgccgataccgaggtcgaacacctgctgccggttggtgatgccgagctgcttgtcgatctcgaactcgacggggaggccatggcagtcccacccgaagcggcgggagacgtggcggccgcgcatcgactggtggcgggtgaccacgtccttgattgtgcccgcgaggatgtggccatagtgcgggaggccggtggcgaacgggggcccgtcgtagaagatgaactcctcgccgcccttcgtgcggcggagctgctcgtggaaggcgtcgagctccgaccacagcttgagcacgcgctcctcctccgcggggaaggagaagtccttcccctcgcagacgtcctccatggcctccgctcctgaggccgcgaccccggcggcgaatggggctagggtttcgggtgaggcggcgaccgcggcgaatggggctagggtttcgggtgatgaggcggcggcggcggcggcggcgggggggtaaggggaggaggggcttggaacaagagagggggaagggtttagagctggaagttcacgtgctgcgtgcgtgcttctccttctcttcgctagaagggaaattttcatttcgacacctctatttgtcgcatttgtacaaattgctctatttttatcgtgttcagtttttgctaactcaaacatgccgtggcattgacgagaaaatggatatttggccacgttcaaaaagcggcttagttggaatgccatcctaaaaacgtgtttcactaaaatgctaatatgaaacacgcaatcatagccactttgtcattttctctattttcgtcattttcaattccattttcgctagaattcagcttgatgagaccaaattgcccctgctcgtcggctgaaaggggatcgagatcgagcgcggcgaggtggtcttcgttgctgacaagggcgtcgacgatggtgtgggacggggcgaggccgagcttggcggcgagtgcgtgcagctggcggccctcgaggagagccgagaggaaggccgctgcaggagcgcccggtgtacgaggtccacgcggcgggatcgcgcgagtgagcgttggaggcggacgaacgaggagtgcgaggtggcgtcccgatggtgggtccacgtggccggagcagaggaggcggcgagcgagagcatggcggcggcggcggcgacgacgcgcagcataggcatggcaaggtccaccgccacttgcaactcaccggagctcgacaagattggggccgcgggcggtggcagtgggcaacgtaacggtggcgccgcatggtggaggcggtcggtggggacggcttgaagggagcggaggaggtggaggtagtgggagattggggcggtggtgacgacttcgtcggtggagccagtgaggaaggccgccgctgagagccaccacggccttgggcagccgcatccacagccggacggcggcgccctctaccaaccacttcttcgacgatgggcacgggcaacggcgcgacctccggtgcccaccgccgccaccttccccgacaatgacgagcttcgactgagttgataaggggcaattttatctcatcacctagtagatgagagaaaatcttttcgaaaatgaataaaatggcaaaaatgccaaagtggcggtagacgcacgcttcatattggcattttatcgaatcgcattttcgggatggcattctagcgaaaccgtgttttgaacatggctaaatatccattttctctggcattgacaatcccaaattttcgtaagtaacaacataaacatgtctcaaatactgtaacacgtcatatgataccaaaatttaccagaattcggtaataccaagttttagcatattttgctggtaccaaattatacagtagcattagatgtatttaggttgatctcttctcaaacttttattatgatagaagtttctgagttacaatgtagcattggtaaaataatctttagtttatcatgttgtatagttatatcttatcaattgttggcattaaaaaaatggcggggttagttttggcatcaaactgaacacaccctatattagcaaaagggtgccctttcacttggatattttactaacagcccatatcactacagaatcgtgcatatcgaactcctcaaaattgcaagaaataacggcacagtgatgcgcgataccatcatctcaagtccacaggatattaggatggacgatttttagaccatgttggatttggattaagtatggtgacgtatatcacgataaaacaatggttaacggtgaacaattagtactgtgctagctgctttagaaaatggcattttgggctatgtgtcagtactataatccagctcgactttttatgagtttttgtttttccaagtcattttcattcgtgttgtcaccttgaaacgagacagaatggctaatcttgtttgaactctccgtatatacattgcaaatacaataggagcagtgcatggtgtttcgtttcattcatgcaccatttcacacattgtatttgatatttgcatcagattgctacgaagctaagaacaatcgctgcattcctacatctacgcgcggttagctcgccggcgtcgcctgcggcggcttcttgatggtcttatcgctattgtgaaccatcagcatctcctgcaccgccgcggagagcagcgactagggccggttcaacattttaaagggccctaggcgaacttcacattatagaccctttagaagttaagaagttaaggctattttttaacttgtaatatctataaagcatctatactatagtaacagaaataaacatttctaacatgttaaataataaatcaaacagtttgcaagttgcaatataacaatttgttctcgataaataatatcgatagtatgattgataacttaaaaaacacacagtagaaacaaagtactatgacctaaaatcagtgagggaaaaatgtatataatcaagggcctaggcctaatgaaaactgatccaccatataccttaatttaattagcttatggacttatggtgcactgaatggttgtataatctcttgaacggttgaacccagaacggtagaaccctaagtccctaatcttggtaatttaacggggaacaaaaaataaattagaagaaccgatcaattctaatcagtgagaaggatcgatggattggatcatcaattctaatcagtgagaaggatcaattctagcctattgggctaaatatctatacaggatccccccattttagcttggccctaggccatcgtccttatggccctactccagagctggccctggccagcgacgccgcgctcggcggctgctgctgcaagccgtgaatagcacccgccgccgccgcgtgctccacctccatgccgagccgagcaaccgatcacgttcctcctcctatctcgcccaaaatctcacctcgcttcgctgctctgagcacgtctgcgctgcaatggcggcgacagaaacatatacgtaggcgcgcgcgcggccatcggctgccgcacgcggcgccgcgcccagatacggcggttcagcggtggattatccgttttcgcgggcggatggatcagggcgcgcggcgttgcggccggtggcgcgcgcgcgcgctcacgcggaggcgtgccggaagttggctgcggacgaacactctgcacgcggcgcggcgcgtcgcccgaacagcaaaaccgcattcacgttaattaccgttctttcatcaccgagctaatccatccgctccacgttaattaagttgggtttcaaacacgtgacgcgtccctgaagggaaaacgggtttaccctgggttgagaaggccaaattgcagggaaaaaacaacagccgcgattaacaggttaaaggagctctaaagcagttaatgtggcactgtatgcgtgtcgccgaccgccgctgacaacatgtaacctccttgtaaccttttcaccccctctgctcgaccaacgacttgatagccacgaaactttgaaaataagaacagcccttgccttgagacggtcacgtacgtcacgcagcccacgctcttcttggaagcatctcgccatgagtgccatcgccgccggccgccgtcgcgtcaccatgccgtactacgcgctgttcggcgaggtggtcatggatgggatcgtccgtgtggaacccatgggagggttcgacggtacagccactgcctactatcttcaggtacatacgaataataatcgatccctttctttccgttccaggatgaactccctgtgtgccatgtcgtcgttggtagtggtactgattcgtggtagttttggggctgatcaaagtgttagtttgttttaaaaaaagatttggtgtttgatctgtcttaggagctgtttggttgggctgattttggcccgttgcatctctttctttccacaggcctagtagaaaaaaaaatacgaagcgcgtgttaaaaaaaaagttgcgaagaacaccctggccagctgcttggattcgccgcgtttttctgatggattacttatctttagcagaaaaaaaaattgttcacttgttcatatgaatggtagtagtagtttaatgtattgtgtgctgtgggacgtaggattctggtggattccgttacttatatttagtaccaaaaatttagcagtttaacaaaaaaataatcaacacactcacatattcaaccttctttgatctagctgttaagctaattaactggaaccatttctattttgcattctccaataaaacatcctccttataggttaacagttaattaggtggtaatatttgtttcatttgatctgcagttgacatgcgacgtctgccgtggggagactgccaaggagatctgtctgttcccagatcacccctgccctcaccatctaggtcagatggcattcgtgatgtgctatccgacctgtgacatactgtatggatgcattttcttctttcatttccatctgttagttgtggtttctaaatttttgcttccatctgtttgtttgaatgtagtgcaaggactgtggctccctgggctcagtctccctcatacccggcaaggggaaagccctcacccctgattccaagaacatggtgatgttaatccattgcgatggacacatccctatcgctttcagcccggcaccctactggattgccaacaaggtgaagttcagcactttagctccagaaattttggtttggctgtgtgcgtccgattagacatagaggccgggtttatctcattttcttaaaaaaaaaagctccagaaattttgatgaaatccattgttcactgatgtttctctgttgacaggtcaatggggatcagcatgagttgcacttctccaaggatgggttcgagggctacggcgacaatgatgagctgattctcaccagtgccaagttcaccgtcgagaggctgaagaaggccgaggtgccttaagtacatctgaggtaagtacatattcagcggatggtttccccaaatgtgcaatttcttttgcatttttcctaattcatctccttttttgtcattggtgcagaaaatgtcattcaaatggcatatcaaggctaaagacagggcaaatcatagactatcacaagtggtcattgagaataattttttgtgcttccactgagcatttgtgagaggctggaaagcgatgttatctggatgatgaatgatatctgtcctttcttttggtgtttgtcatatgctttcagatctaaaaacttcgtctaaaaaaataacttctaaagatgaatctaaacaaatgcttgtccagattcatctctaaaaattagtttttttaaggacggagggatactccacatgcctttgtttctcggtttctgtacacatataaaccactaccatcacactcccctcgtttcgcagccgtctggtaaggccgacagaaaaggcccatccttccatctcgacttcggtttggtttagtttccaactttttcttcaaacttccactttttcattacattaaaactttcctacacacataaactttcaacttttccatcacatcgttccaatatcaatcaaactttcaatttttgtgtgaactaaacacacccttcgattatagatttgacctggtagaatcctcaaacaaaaggcaggtattagcaagatactagtataactgaataaacgttctccattctactatcctgcatagtaactgactatatgacaattgacagtcgaaattggaagccacacgatcaaaaacgaaggatgaaaggtagagccaggtatcttgcaaatttgataggtgttgtctactgtattgaatacatcaggcttgttgtttgttcatatgtgccaatttctcataatcttcataaattccggccggcatcgcccagtggaaaagaaaaaaaaaacaatccagtccatttccttgtactatggcccgtttggcaattgctagacccaagtgccttcttgaacgccacagctagcctacacagacgcaaagaagaatatacacaaatacatagaaacaaattacagcttaaagctgttaaactgaaaaccactaaggagaccataaattttattatgagaaattttaccgtccttaaaaaaatatttgaggtacctaaattctacttaaaatttttggtaatacctagtatctaaaggtactaaattttacactagacaatacaatatggtacctctggtatcttctcaagaatgataaaattactcttttattataggtaccgtaaaattttgcaactcatgttgttagtactcctggttaacttcaacgtagaacaacaatcacgtaaatactagagattaactatataatcttaaagatgaaaaagccttaggaataacaagtttatatgttatatagttccaatagaaattcggcagaatatttgaacaatttagacatgaacataaatgttaataacaaagacaatatagttacatcgcgggaatggaaaaacataggaataggaaaaacatagcattttgataggaatacaagtataaaacagaggattgcaaaatacaggaaaaacatagaaacggccatttgattaggccgcaggaaaaatacaggaattcgaggagagataaaaactcaaaggactcacaaaagatcatcgaagcagtcgagtctgaagaggaagcggggagggtgctgtcggtcgggagcaggaagggcgcgagggggagcgggcagtcgggactggggcagattggcaggaggaaagcgtggccggcgacggcgtagtcgctcaagaggagggcaggaacgcggcacgggggaggcgggggggattcagtgcttgctggcaaaatttaataatagtttgatcctatcagatttttgatagccgttcaagaaatttagttcaaagtcttttcaaaaattggtagcagtctttatgaaaaaaaaaactttcaaaactacccgacttgggtaccatagcattggtattttggtaacattatgtttaattggttatcctatcaaaacttaataacattaaaatttaatagagtttaaagtggcaataaaatgaacaaagtctttaactatttatcacaaatatgccagtcattatttatgtgacatgtcatgcaggtaagatcacgatcaaacaatactttagaccggatgatgtggaaaaccaagtttaataaactcgatgcacgcctagtttgtaaatttaggtaaaaccctgttataaatttaagaactgataacgcaatttactctgttcactttttacggtaaccgtacctacatctaatcatacgtgctaattacatggcaccatgctatctctcatcgtttgccttatataaaatcaacattaactaaaaattaaattttaaaacttaattttaaagttgatgttgatttttttatcgaaatttatttttcagcattggtttttaaatcgttaagaacatacgtagaaaacttttactcacaaattattacaattttgcttgtatggcgtatcatccgtacatgcccaaacgataagggggctaattgtacctgcggctaatgtgtgcattcagcctagctacctctcctgtcgaatactcgaatcacgttcgtgcatcattgtaacacgcgaaaattcagtatccgacctctttgggactgtttgataagtcactcgtaactcatttcatccgatcctaaacatcgtcctatttccattttccctttcctaatcattattttaccggttctaaaaaaactctcggagtatgatgttttatttatagagtggactgaaatactatttttcttcttactattttgttttgcataaggctatgttgggaagtgagttttgattttgctatattctgagcatacttctcgaactattaaacaatacgttttttctaaaaaaaatacatgtaggtgtttattaaaaaaccaaatattttttaaaaatatataataattgttatttagttaatcaacatatttgtcctcagctctatcgaactgagcttggatttggagggaataataatcggagtgaggtgcgggagcgagagtctttccatgatgacatgcgtgtaacaacttgggtcaacgtggctttcttctggctcactcgtactccctccgtttttaaaaagatgatatcattaacttttaactacatatttaattatttatctttttccaaaactttataattacataattttttttaataataagaacgttaaatgtgtgataaaaactcaacaacgtcatctatctaacaacgattgaccccgccgtgggcgcctgtgctggccgtcgatggtccgtactagcatcgtatccaccggcagtcaagacatgatctattgatctccgagtccagtttggtttggagaaaattgatagagagtatatatgggtctgggagctttggatgttcatattccagtacctgacgaatcgaattttgagtccgagtcggaattgggaacacatctgtccagccaatgaatacaatcgtgcagtctcattggtacgtgtacccaaccaagtgacaccaatcgttgatcttaagagaagtttaatattatagcccactattagctccaatttatctatagtcaatctaatagccaatttatataatagttgattactttactactaatatatggtcccacctatcatatacacattatgtcttggaatccgtgctgtagctggctacatatctgtagcatgctgctcttctctctcatcttttatctcattaaaatatatttacagctggctaatagcctgctattgtacctgctctaatttgtctgctgctgccatctcatcatggctggaaaaaagaggcagaacaaaaagagaggagacgtgtcgaagccatcgcaacgacggcaagcaaatcagcgcagtaacgcactacccgcggaacagaaacccaaagaggacctgatcagcaagctccccgatgacatcctcgtgcccatcctgtccatgtgcccctacgccgacgccgagcgagccgccgcggtttcacggcggtggcagcatctccacacccggctccccaacgttcggttcagcatgtccgtgcaggggcttctcgcgcctcttggcgagtcgagcaaaccgcgcgtgcagagcatggcgcgcacgcttcagcggcgctgctgcggcggcggcgacaccgtgaaaacgcttcacattggttaccggaaggacgtcccgttcgagtgcaggtacgcggaggagttcgtcgcgctggccaacgcgacgaggctggagctgggcgtgcagtgcgcgagggggctccccgacgaggacgccggcgagtggtcgctcgagctgccgccggcgaccgccgagctgcagctgcggctgtactggtacgcggtgcggccgcccggcctgcacggccccggcgtcgcctccctccggtggctcgcgcggaacggcctggcggtgctacgcccggagtcgttcctctccggcggcggcgtcgtcttcccggcgctggaggagctgcacatcgtcaagtgcacgcttccggccggcggcggcatcgacatcacgtccgccgccatgccgcggctgaggcgcctcatcgtcaccgacgtcgccgtgatgagcgccgccaccaaggccgggatcgccgtgctcgccgacgagctggcggagctccgcgtctcgtgtcgctgcgacaccgagcccatggcgacgtccgaccccgccgcctaccacctgaagccgcggttccgcgccctcttcacccgctactcgtgcgtccgcgtgcgcgcgcccaggctgcgcgtgttcgagtggcgctgctgcttcgccgacgaggtgcgcgtggagagcgtcggccgcctctcggacgtcgcggtggagctcgccgccggccggctgccgaggctgtgggacgaggagagcaagtctctgtcggtagaagactgcgacaagctgatgaaaggcatcctacgtgggctcctgcctggactgcggccgcgcagctgggattgggttcagaggaaatgcgtcaagcgcgatgaaaggtggcttagctttgagatctcaagtgccccaaagtatgatacttaactgattactgatgataaataatatatattactccatccatccataaatatttaacgctgtttcgtcttaataaaaaacttttgtgaaatatataaaactatatgtatacgtaaaagtatatttaacaatgaatcaaattataggaaaggaactaataattatttaaaattttttaataagacaaactgttcaacatgtttaagaaagtcaacggtgccaaatatttagatacgaagaggatattattattgtgtagagcacttgtttgtgccgagtcacccttcaatctaaccttgtttttcatgtaccacacgttgcttaagatacaggtgggcagaatttaaacgtaaatattcgtagaatgatacaattatcaccacatattgatctattttatcaattttttacatgactaattagatgatatgaaaaacgaaaaacaatccaatgcttgtaaacttttttcgtgactaggctctcttcggcagtggaaaaaggaaagaaagtttgtttcgttttccacgagtatgtttcccgaactactaaacggtgtgttttgtaaaaaaattatataggaaagttgcttttaaaaaatcatatgaatctatttttaaaatttaaaataattaatactgaattaatcatacactaatgacctatctcgttttgcgtatcttctcaatcttgcaatcttctcatctctcgattaaatcatcacatgttagagcccacaagatcgaagagctaatctccttatggcccctaacattgtaggccacaagcccgccatacgggctgctattttaattgagtgttcgatgatagaggttgaaaacccttcatcccttcacgcaaaattgagtggtggattagcgcatgcctaattaagtacaagctaaaaaactttaaaatagattaatatatatttttaaaaaataactttcctatataaaagttttactaaaacacatcatttaatagtttaaaaagtgtgcgcatgaaaaatgagggagtgaaagttatcagtctaaacaataactgtcatcaaacttaacatatactactccgtcctctaaaaaaacgaattcctagctaccaacctggacacacatgtccaggttcgtaggtaggattagtctatttcttgggacagatggggtattggctagtagagggtccaatttaactactccaaactgtcaactgtcgtcaaaaatctaatcggatcaaaccgcctaccgcgttgctacgaatcatggacagggtcatcaaccattgttgtacaacatcaatacatacaactctatcgtcacccggtatctccactgcttagtcgccaatgcctcgaataccatgacgtttgccagcatcaggttgaacgtggtcaccccgtccgccgctatcgccgcgcgggccgacatcgccacggcgcacgccgagtcacgttggaggcgggccagcacgagggacctatagctatggtgttgtccctgctccttcggcaagaagtctcgggagtagagtcgcagagctagcccctcctcatgctcccccacaacctctgtggacatgacggcggattggtggaccgacagagcagtacacattgtgtcgacgggtggtaccgcaactacggtatttggatggtatgaggatcgttggtactagggtatatgtgattgaggtaaaagagatggagacatggatttttatacaggttcgagccccttatcttacaggtaatagccctacatcctgttgaccggagccggcgttgctcttattcatctgaatcacacaagtacaatatttgggataacatatctaactgtcgtcgacttggcggctagataaccaactcgtagacgacaacagggtagtcttcctcctcgaatccgtactcggtgagatcagagatggcactagatccctcttgccggcttctgtaggcaccggattgggtttgtctaggctaaactctgatgtcgagatctgacagcgtattggtttgtattggcttgtggctttgtggcgtgtcccctctcctcctaggggggcttgtatttatacccagcccctttgtccaagtagaactaagtagataaatatggatacgatctgagtagtccttgtcgttttcatatagaactctactcgtcattccttatccggaactccttctatatacgaggtttgtttccgtataagatatggtatgtgatgggccctgccgagtttagtcgactactattaggtatgtggtatccataactatgacacattgtacatgggaaagtgatttcatccctcgaggggatatccctcgtttcatttatgccacctaaatagttataaaattttttgacaaaaatggtaagatagattaatataaaatatatcactccacaaatatgtaagactaaattcaacttctacaaattgtaaaaaaacaacaaatatagctgcaaatgtactataactatttttagcttattttgttctttttgttgcaaatacaataggagcagtgcacggtgtttcatttcatccatgcaccatttcacatactgtatttgatatatatttgcatcagattgctacgaagctaagaacaattgctacattcctacatatctacgcgcggttagctcgccggcggccggcggccagcgtcgagctcgccgggcggcggacggggttgcccgtcgatgcgctctaggtagaaccggctcggcatccacacgctcctgcgccaccgggcgtactcgctgaacagccacccgccgcgcccgcacgcccggggcgccacggcctcgctggtggcggcaatggcgccgccgccgccgcaatgcgaccgcatccacgattggccgggagcgcactggtgcagcgcgcagcgtagccccggcgggaggcgcgcgcagcagcaggtcaggaccttcctcttctcctccggcgacggtggcgcgccccgcctcagcatgctcctggcgaccctcttcgccggcggctgccacgcccgcgccgcgcgcttcggcgctggcgccgtggcctcccccctgtccacgcttccgccgcttccgccgcggcgctcgccggtgacgggcgggaggcgcggcgtcgcccgcggcggcttcttgatggccttattgctcttctgcaccatcagcatctcctgcaccgccgcggagagcagcgacgacgtcccgccacccatcgcaccgggcgcgcgctgcaagccgtgaacaccacccgccgccgccgccacgcgctcgacctccatggcgaactggcaaacgatcaagctcctcctcctcctcctcctcctcctcctcctcctatctcgcgcaaaacctttcctcgctgctgctctgagcctctccgagcgtctgcaatggcggtgacagaagcgggcgccgcactaaacatataggcgctccctccgcccgcgcgcgcgcgcccgcggccatcggctgtcgcacgcggcgccgcgcccgcccgccagcccgcttggcgccacggatggatgaggacgcgcggcgttgcggccggtggcgcgcgcgcgctcacgcggaggcgcgccggaagttggctgcggacgaacgaacgcacgcgcgcggcgtggcgcgtcgcgtcgcgtcgcccgaacagcaaaaccgtcgcattccgccacgggcagaattagcgcggcgcgggcggggtggttagtttgcgcgctaattacagtttttttcatcgaactaatccatccgcgttaattaagttgggcttccatcgtgtagcgcttccctgtagggaaaacggctttcctatacggcgtgtatacggggtgagaaggcggaaacagcgaatacgtcttcgaggtctaagactgaaaaacgccaccaccaacaacacgcgaacgctgaagagataagtcgagagaaccctgcgccgtcgccgacgatggggctcgccggcggggcgcgcgtggtgctcttcgtcgtggcggcggcggcggctgcggctctgactgccgccgccgatcagatcttcaccagttcaggtaatcgcgtcggagtctcggcaagaaatcaagatccgtcgtgcgccccccatggactgtccctctcttcatgtcattctcgatccaaattcaccacttgctcgatgcgatttctcggcgtatattgatggaatacttgtcgatttcattattcattttgttcgattatgattgcctgctgcttgcttcacggtggccatgttcatttactgcctagatctagaattctgtagttgaaggctgttctttgtgtgcttgtatgatctgaaattgctaataactgatgatttgctggacctaactccatttggccatgatctatttattttcttacttttcgatctctaattgctgcaagaggaaaaacaaagcagaattgcactgaattgttgccgatgtcaggtgcgccgtttgggcggaattcgcgtgagccgaggtaccatgttgagttccatcctgtcgatgcgccatttaatccagtaagtttttgctaaattttcctctgttttacagttacaggaataatcagctttatttagttgtcacaaattctgcacactcggtgatcatgtgtacatcttttagaaccgaagctagcaagatctgaacaatcctcatacctgctaatgtagcctactagccttggtgttggtaatataaaggcattgtctaaactgtagtgagatttagtgattagctgtgataaataaacgattccgatctaagcaatgttgattatgtttgttgtaaatcatgtgtttttcattccattctcatcaaaaatttcagttattttcagcaattgtcgctctttactttattccaagaacacttcctgttatcacaatcaaagacttctatggtgtactatgcaggagaatggccaggaatctgtaccaatgactagccacgtggggaaacattatacatgcttcctacctgttgaggaaacaaaaaccatgaagtcgataatcccacaaaacgcaaccaatgttatcatagaaagtgaacggagagttaagccaaaggatccagatgaattgctggaaattctcaaggatcagtgcttctacagggtgagatagaactctttctttatgcggtcagtagaactgcatgtgttccactgcctgattttatattgactgaacaaaaactgattattgctattactattttgacacagcatgaaggttggtggtcttatgaattttgctactacgggaaaatccgacaagtccacgtagagggcgagaaggtaagctgccccatcctgtttattttctttgctcagatcagtcattgtattttatcctctttatgcactatctaaaaaatatctgagatgcgtcaatccaagagttgctagtttttacaggagagacaagttctggccacagttacacactacattatgaaaaataaaatattttatctttgacaataaatgcagccgacagtttctagagcacttgaattgccacgtaaagtttgtgttgtttgcaggttattcaagaatatgttctgggtgaatatgatgctgatgcaactgatgcttactatgaaaatcaaacatctgactctgctgatgaagatgataacctgatagacacctctaagaggtaatatacgaatataaggatatataaagcaaattatatctgtaagctaaacccacttgaatgaatctcttttcttcatgtttcaggtatcatgtccacctgtacacaaatgggactgtctgcgatctcactgatatgccccgggaaacagaggtatgaaaaaaaaaaacgttttgtttctatgtcatattaagtagtatgtttgactgcacttgctactttctttctacaggttagatttgtatgttcagaacccactgtagtgattagttcaattaaggagatctcttcctgcaaatatgttttaacagttcaaagcccaatgctttgcaagaatccgtaagtttcaatattcttttctctcaattgtctttacgccatttcatgttttgagctcattttcctgttctgcttgcaggctatttcagcaagaaaaacgtaccctctccattcactgcaacgagttgctagctgaagctgaagccactgtggatgatgactctcttccaaaagaagctcagatcatcatcccagatccagatggattgcataattatgcagcttatgctacttgattatgcatcattgttatagcatcagacagtgaagaaaatcatcttccgggtgcaacggcaatttggcaatgctaacaatggtataggttgttcgcggagcatattatccattcatgtgaagcaggtttgagatcatcagactaacattgatcatgaggaacattacgggcgatgagtgcttctgtactagtgcaaacgaagtactaaatttcagtgtcaaactgtagacagtaacattttcttgatatatgtttatagaagaaaatcttgtgatgcggaaaagtgcatgtgcaaacatcgtttcattgcgagattatggtattgctctgaagtgaagaaatatcatgtgcattgagagcaaaggtgttcccttttttcttgagtgcagatgacggcaagtcggcaacacaagacaggggatttgcttaatgtaagatgttcatactaagtcaagggatttgctttaatgttaagttgtcacactaagccaaaaagcatgtactccaatttcaatgctatgataaagagcaaatttgcttttgcgattatgttatttgagaatagtacaatttgcaaaataaaggtgataagaggacttcaaaatgccattagaaagcatacagaactaaacaaactattctccaagaaacttcgatctgtactttagtcaactgtagaatggttcaatgaattgacttggcctactatacattttctagtcaaaccaaacatcgataagatcttcggtgaacaccattagtcaacacaggatttggttaagcgttgtacaagtggcgaaattgcctatgcttaccaaaatggcatgatccaattatcctaaattgaattactccatctaccctaaaatataacaacccatatagattcgttgtaatgtagatgaagattaagtaccaacataaaaattattagcacacgattaattgagttttaattattttaaattaaaaatagttttatatgatattctaaagcaaattttcacattaaatgtactaaagtacttagcattttgaaaatcatgctaacaaaaaccgagctaaaacttgcatcttaatcagaactgaacgagcctgatgtgtcccattttatattaattgctatattttgggatggaggaaataataaaattattttgtgtgatatatataaaatccatctaaatttgaggacgtgcagttcagggctagtagtgaatattccacgctgacagacaggtgggccacgcggtaggcagtactagccactgagtgggacccaccagcaaccgctggccaatcagatcgaagggatgtatccacgcctcccatgtggccggaccgcgcgagttgcagatccccaaatgttactcaagcacatacccacacccactgattgcgtggaccccacgatcctatgggcccacatgtcatttgctaatctagtgggtacattgaatcgctgggttggtggagctaactgtactcggaattaacgtaaattgactatcctctttagtttatcggatacttttatgagagagaaggaagaacagagagagagagagagaggagggagaagaaaaaaaataatcgaaaataaaataaaataaagagagagatagaaccccagatctctccacagtttcaacgcctcaaatctctcaactctcgtcccaatccttaggtacacgcctccctctctttcctccaatttttgttcggagggaggacgaatttcagttcttgtttctgtttcgatctccaaccaaatctggcccaagaaaatttgagtttcttgtgtggtagatgccaccaatgtgtgccaagcccctctgagatctcaccggctgatcagctgatgtagtttgcagtcgaattttgttccgtttttgggggcaagattgtgttcttggagctgtagattggttatacatttttttttccatttcttggctcagttttgtccattcgacgaggaatttctcgtcgtgtttgttgttgattgattgatccaatctttgatgcgccaagaagcaagatgaacacgaattactcgtccctcccattgacctccatcgagctccaatccaaccagcgcacatccgaggtcgccaatggcgtcggctacaacggccacgccaagatctccaagcaagattcgttcctggtcgacggcgatgccgccgccggcggcggcggcggcgagaacgacgacctgccgctcatcggcgacggccccgccgggccacccgagggctccggcgtgcccgccgcggtgttcaacctcgccacctccatcatcggcgccggcattatggccctcccggccaccatgaaggttctcggcgtcgccgtcggcctcgtctccatcctggtcatggggatcctctccgaggtcaccattgagctgctcgtgaggttcgccgtgtactgccgcgcgctgtcctacggcgaggtggtgcacaaggcgctcggccgtccggcgagcatcgtggcgcagatgtgcgtcatcatcaacaatgccggcgtgctcatcgtgtacctcatcatcatcggagatgtgatgtcagggtcactgaagcacattggtgtcatggatcagttgatcgggcatggcgagtgggataaccggaggctgctgatcttggtggttcttgtgatctttctctccccgttgtgcgcgctcgagaagatcgattcgttgagcttgtcgtctgctgcatcggtcgcgcttgctgtcgtgtttgtggttgtgtcatgcatcattgcgctggtgaaggttgttgagggtaagatcagtatgccgaggatggggccggattttagctcgagggcagcaatgctggatttgctcgtcgtgataccgatcatgacgaacgcctacatctgccatttcaatgttcagccaatctacaatgagctcaaggagaagacacctcacaacatgtacaagattgggaggatcaccactgtgctatgtgttgtggtatatgcactgactgcggtctcagggtacctcttgttcggcgaagacactgaatctgatgtgctcaccaactttgacaaggatctcgggatcagattcagctcaatcctcaacttcattgtcaggattgggtatgtcatccatctggttctcgtcttcccggttgtccacttctcgcttaggcagacggtggactcgttgatctttggcgagttagcgccccatagcaggaaaaagatgctcaccttgacagtggtgctcttggcactcatctatcttggctcgacgatgataccaaacatctgggtggccttcaagttcaccggtgcgacgacggggttggcactggggttcattttcccggcccttattgcattgagattggacaaggaaggcaagtctttaggtaagggtgagaggctcctgtcaattgtgatgcttggtttggccatggttgttagcattattggagtaattggaaatgtatacagcctgaggagcaagtctgcatgatctatcatgatgaacaatttagtagggttagtgcattgccatggcagtcatacagactgtattagcatggtcagatacagaagacagcagaggtactacttgagcaaagctcagatacattttgtttacctttagaggtgcaggagcatttcttgaaggtttttgtttttgggagcttggactagattgacagattctttgatgtatttgcatttattggtaaggcagcacaagatgataagaagctggttgtgttgtactgcgaggttgttgcctgtctactacatgaaaagaaaagaaacgatatgtttggcacttgagttttcaggcgtttttcataaatgttcgggagtagtggagtatagagcctggagatcattttcaccgttgaaaccgtaggccagaaaattactggtttaatttgcagtcgcttgaatgtaatgaaattctcccccataacctaagataaatgctgagttgcacacatttttatgttttttttggaagtacaagccctcttaataaccaaagtaaacaacgaagcgtcgaccgaaatgtccgaaatattgtactcttgagatctctccaaattagttgtatggatacgaaaactgagcatcatgtaggttagagaatagagagatcctatcagggccatcgccattgttctcgagaaatcaaaagtctgtcacgatagttttgctgaatgctatagcacccaccaaaaattaaaatatcaatcatgacattccttttcttttttgttgcaaaacggtgtcgatacatcagtaattcaatatgttacaaaagaatgcaacaataaataacagaactacaaaattgttgtctcatgatcctgaagtactgctggtgcatatcgttgttaacagcacgcagacgccttgtagctttaccctgaatccctgagtccatgacagacggtatggtaagacagaagagaatggtacagcagccacaaagaagccccacaccaacctgcgagtgacaaggaaataatcgagttatggaagataaactgcagaagaaaccgcctttcgctactactagataaacataatgctggcaggccggtatctgaaaatattttagcaccaactaattaatacaaaatagtaaatcttttggcaaaagcaaagatcaaaacaagcagtatcggtgaaagagacgaaaccatttggcatatcaaatgaaaaagaaatcacctgctactaaaactgtgagttgctgaggaatgtaaccatgcatcgtgcactctgaaacactttgtctatcttctgccaaactaagctctggacatctagaagcttcttcactttgtcctgaagcattgagtgacgccgtatcgtttcaccatgtatctgcttccaggaaaggcaaaaatcaagtttaggaaaaaaaatacataccatatataccctgtgagaaattttcataacagagtttttttattcttttacaaaaataacagaacagagtgaacaatatataacagtgtataccttcaaaaacaatttgagaacagcctgaacaaactcaaagttattcctgcaggaaagctcatgtatgaagtagtccaacagcaatgaaatggattgaagttcaggtctctgctccaaattttgtggctcatcatcgattaactgtagcactcgtagttccatatctaaagatgatggtgataagccttttaggtagtcagtaaatgccgaatctgtaaaacagatcaagagtcagcatctcaaccatgacaagcatcagcagcacaggccacaacactaacaaatatctcccggttttgaccatgcttctgtcggcaaaatatggcactacataacgacttaatagaagcagcaagtgaagtatgtgaagcaacagtatggacagcatctccttgtagtctaatcaatgagctaaaccatgaaataaggtaaacttgagcaaatatgcctataaacactcacaattctttgtatctccacaggattgtaacagccgactaaagtgagaggagaggtcagccatttttttgtgacttgtgtcctcagtactgctgtctgtttctttactgttcgccgcaggctcaaataatatctcccccgaaagggatggaactgtgggcaagaaaaaaggcgccttctcaggtttctttggtggctcaattggtttattccgaacctgaagacgcagaaatatgatgagaacttatttagttgttcctttaaacaaaaaaaaacattataattcaaagtagcatagtgatgcaggttacacaattgtcacttgcaatgtaaaaaagtatacctttataatgtcaagattcgccagactttgccattgactcttgggaagcaaagagagggtgatcatatttggtatttggtgatccattataacataaggtttaactttactttcttttgaatcttctgaactatgaatgggctcttcctcagatttttctgttgatgaaacagtgggcaaacgcacatttctgacatgtttaccacttgaataattatcaacatttgttgatggtgagaacaaagcttgattaaccctgtcaaaattagaaagaaacacagcggattgtatatcagaaagaataaaatacagaacactgcatactatatatgttattcataatagtataatattatggagtagaagggaacagctataagctaccacattcaagtggttctaaccacagtgccgacattcaagcaggccaacgtattttcaagtgaatattacgagaaattatgccactaagagaagtccagttatcaactgtgccacttttttccattggtccatttgggaacttctcgctttgccattttcaccccaccccatctggacaaggggttttgaccagctatggcatgctagctgctgaggaccggaggtgacaggaaggggctgccactagaggcacaatggttggtacttgaggaagggaataagacaaggggtagaatggcactttggaggctctgaacagacagaacttgatggggatggtagaatggtacttgaaggctctgaacagacacgcagacagaatttgatgggatgtcaatactgaggtggtttgttagtggcaaaaacaagaatgggaagacaccattgggaagaaagtactttgttggaaaacaatgtgcaattggttaagttggccccacatgatgtgctaaaaaaccagcacactggagactgacttacgagagcaaattttctcaacgctgtgctgataatatttcaaaaacaaaggtagatcttccaggatgaacctcatcctcttttgtactctgaggtggtttgattgtttacttgcaactgatggtacataatttcagtaccatgtcatcaactacaggatggacagataaaattgtttatttgccaaatgagccatgtcatgattttgcgggagtaataacagatggaaagcttatctaatattttgctaaatgatatctccaaaattaacttagatctgcataaaaggtctacaaaacgaacatggtgagcacaagtaaatgcaaaagaagcttaccaaagatagacaccattttgatcaacatgggtggttgccaacacatccatattaggagacatagagagagatgttatagatacatcgacatgcattgcatcaatctgccttgctaaactgatatcccatattctaagagtcccatccatactcgatgagatgagccattttccatcctcactgaaacacaaatcagtaacacggtccgtatggccttcgaatctacggaccattttcattgctactgtatcaaacaatataagcaccatatcatctgctacagtagcaagaagacctgacataaaatagcataagactgttaattgggcatagaattatacacgagaataatcaaatatgttaaatactaccatttgcccggtggtatgcaatcttggtgacagatttaccaatatccagtctggattttagcttgcaacttttaaaatcccaaacctgcaagaggggacaatcctataggtaagtaatattgtcatggataaaagttcacattatacttgtaaagataagttcaaacatatgcagacaaatagctggtgtttgcagcaatatgcaattccttatggtaggactagaagatcagcattaagaatcaaattacccagctgaggacataaagatgaaacaaagtgcacaacaccactctgtaaaatgtgcagtaaaaggctgtttgtagtttgtataattacttagcatgccacaggatttacaatagaattaaaaagcaagagagcatggaaccttaatatcaccaccgtatccagcactaataagagagccatttgtagcatcacacgctaatccaacaacttctccgtcatgtgcacgcttaattgccaacgatgtatcaatataactgccacgactaatccccgattgcaggttaaatttttcgatccagccaccttcagtgcccaagaaagtaaaatttccacatgcacttattgcacaagcctgtcagaaaaagattaaaaaacaaaataatggaacacttgtaaactccaacttgtgaaagctaattcaaagaaaggtcacattgatctagtctaaaatgaaaattccatacatgcaatttaagaaaacatgcattaccttaattggtgacttgctgcctgatgacggtgtcagaatatgctccccaatgacaaagttctgtagacgccatacatacgcttgtggagtatccgtatggcaggtaacaacgttacaccaatcacgtgagcgtatctcagctgataacagaagcagaaggtttctcagcttaagttatagttttttttttcatacaggcaaaaatataaaaagaaaagggtgcaaatcagcaactagtttacaatgcacagctgccaaacataatgaaacactttgttacacaagcgctaagcaaatgaccagatcaaagatgttggaggacatagtttctgggtgccattttcattccacaaacataaaaagcatttattaaaatattcacattgcaatgtcctaatagattatgaatactgacaggcaatattaaaaggccccaattggaaaatcttcagaggtcacactttcattgactttgacaaaggtcatagcagcagtaaaatcagatagttctgaagaactaaaagaaactgcactatgaaatgggggtcgtctgttgtacaataggcatcctacatcttactacaaaagtttatccacttcttcaactcttatttctgttgccgctgctctccacatgtgctcctttgtaatggcatgtttataatttccagaatgtagttgtttccattggaatacaagcaatttctctaccaaggagaaaaaagggtgcacttccctgtctgatgctactttcaatggccatagtactggtagaatatttattggtagcataaaaatagaaaacagtatcattactgccagtgacttgtatttattcagaaaaacagaagtggaagaacagtatccctatatatgtcattagtaaaagcaacagaagtattgcaaagaccaaaagagtaccacaatcaaatgcaataactggtttcagcttgatctcttcctcctgcatgacagagaagttttaacatcttagagaaggaaaaacaaataggtagggaataaatgtagtaatcaaatccatacctttaatccaagcttttttgccctttttgacacatgtctttgagaaagttctctgctttgttgatcctgtcaacaaatagttgtgtcaatagaattaaatagtgagctaagctaacgtttcctttttctcaaagaggcaaggcatcctgataagaacgtaaacatgcaggattcagcgaaaaccaaacgcatctgatgaatagtatttccatagttcactcaacacctcaacagaaagaaaaacaaggaagaatgtcggaagtgataggaattgaagtttcatttatgctctcactgctatgctcatattgttgtcacacagaaatatccaccttactaatgcaggctaggataaattcaatttttttagaagaaaatgggagcagaccagttaataataaaataatagttataaaggtgtaagtccgctgaaacaatagtatgcctaaaacatgaataaacttataaaaggtcacatgccttagcatggttgatcagaatagaaccattatacagttttattagaccagagagtattgaagaaatgacaaataacagactcagcatcctaattgatgtaaaaacgtacacctagaatgttaatcatgatgtatcactgccatgttcctaataagttcctcgaaagtaggagatgtgcttcatataaaagttaaagacagtgagttacctggacaactgaaaaaaggcgaaaggcacgatcttgaccagcagataagatgcattttccattgccgtagaatctatcgacagaagtatggttactactaataaaatatccaactgattttttttaaaaaaagcaagacatgattgaaacacttgtcacctaatgcaccgtggtggagcactatggccacttcgaaatcgtaacaaacgagcatctccatcattagtatcaaatatccacatctggtaaacagcatattagattactggactatcaagataaactgatataacgttttgcagctgataaaactttatttgacatggtaatgccaattccagaccagtataaatttcatctttcctggctagtttgtttctagtgaggatcctggaatacctcactaataaaaggctaacactgaaataccatagacattcaggagagtacaactggttggtgcagcacaaaggcacgattttaatgcgctgaatcattctcaccgctactaagtgtacagttgatgccccacatctggttaagtactagctgcatgcagctttggacctttgcatgtttctgtacaacagcttttaagcttgacacttacctttattgaattatcagaagccgagctcatcaaaataggctcattcgcgaaaaaatgaagtgaaactatagaagcatcatgggcctcccggataacagaatgaaggcgccttttctcaagattccatatactaataacacctgacgatcctccagaggccagaagaggttgcccatctggtaaaagaatatatgaaacacttcagctcatgtatgaaatctgtatcatagaaaaaaaatgcaacagcagcatttcctgaactgaatctaacatataattattaggtggtgccaaaactgccagtcccatcttaatatgacaagctttctaacaagtcatttgagtattcacagtcaagaacagattacaggactaaaccgacaggcaaggaaaaatgaatatatcaggattttgattggacatttccattcttgtaataatctggtgaaaaatgttaataaaggttctaatttacaacaagtcgatcaaaacacctgttcgaaatgacaatgcagtcacagcaccacgaatttgatgattgaaagacatcaactcttcatcatatcgtatattatgaacatgaattgttccatcagaacatccgactgcaacaacatcaagggcaggtgaagaaacacaacaacatactgatgagttccaacccttaaactcataaagtttcttcttagtgctgatattccaaagctgcaagggaccctcttcgcttccaatgatgacctaacgtaagaccagattagatttattaccagaaatggaattgaatgcacaataaatttgacctctaaactatctccaaagcaaaggaaactccacttgccttatttagataagtatcaggatgcataatgcaagttggtgtaaacttgtctcccaatgatatgttcccaacaggctcactatttggctctgatcctctgaaggaccatataaatacattccccttaatatctgcacttagaatgtattctccaaatgggtataatatattgatcttttcttcatgtttgctccaagtaaccacctgattgaaagagatccagttagaacataaaaaagaattgtctgattgagaggaatcctgtagcagttgatgggcataaaatgtagcatttggatatcctttttgggagtttgaaagaaccatttcattcagaaactattcaaatttccagtttcaaatattataggagcacattatctgactatctccaaaatgtagcaacctcaagtgaaccagtaataatatttagataagaacaccaagcccctgcttttaccagtaataatatgaatggttgcctcaatcgcctaaacaagtaactagtactagtagtaactaacacgataatgcaagatctgctattgcaagcacagtaacgccctcacctgatcagttcgtttgaaaacagcgatatcacttccatacgcagcaaatgtataatccttgtacgatgcaagagcacggatcttcttgggcaattgaggtccttcgatcacataaaaccataaggaaaaaagctatacatgaagaatcttcacatagcccaaaaaaaaaaacagacttaccagaaaggaccaaattcagtttagcacactgcaaaacaagaaataagtccagttagtttctaaaaatgagttagctacatcagaaaactatgcaaggtgagagaggctagcgttaaagctcatatgtacaatgaagcagctcgattgaatcgaggtagtagtgagcaaatcgcattgagctaataccacaatcagtaactagcccctgagctcgaaccatgacttaaatacacaatcaccgctccaaagcatctcaaatcacgcgttctaacttgtaccagatcaactcgctccaccaagctccccgtaagctactccgatttgagacgcgagcacacaaggccaagggtggacggtggtagggcggcgtgggggtgggagacgagcggggagaaagcagctcacgttgtagacgtggaaggccttgccgacgctgacggcgacgaaggtctcggtgccgaggcgctgcacggagaagggcacgccgccggccgtgatgtacccgatggcgcggaacggctcgaagatccccatctccctctctctctctctcccaccgcggcggcggcggttacttctccggcggctgctgctgctgacgatgcttgtcgagggtttggccgctcagcttgggtgggggtgcgccgccggcgagggttttagaggtgggggttttggagcggcggcgggagaaggaagggtggacgctgtctgggtaggtcagtgttgttgcgttgcgtgatgatgaggtaggatgggccgggccgggtgatctggaccacgagggcatctgggtcctggaggctggagctggaccgagcccaagttgcgagttctaaagtttctttctttttatttgtttttcagttttagattagataggcagagatatttcagttttcaatacagggaaaattctgcatgaacttgaaattcttgtgtattttaaatttaagaatttatttataagtgtcggtaacatggaagcagggaagagttgcaaacttctttggtcctctccggccacagccagccatccactggtggggacaagccgacaaggccatccttctcttaaaaatcatgaggtaccatactcctcactcctgaactgaatgttcatgggctaaaaagtgattaactcgagatactcagatacaagctgcaagcaatgtcgtactgccagtgccagatacgttaaatggggaataactggaaaaaaaaaactattactctctctgttccaaaaatatgcatatcgtccgtatacatttaaaaaccatgcacaagtacctatattttcgaacggatgcatcatccattcgtaggtcctacgagagttcataacacgtcaagagttcagatatttgttttgttattacaactttctggactgtcagtacagctatagatcacaacaagagtatctaaattcagaatttgctaataaatttacaattatcttagtttacaactacattttcccacagatgtaagatccagaagctaaaatgctggagttatattgacaccaagggacacagcaatgaagatgtttcatgctgctgcatctgcacaaaattgttgccctcttttcaggagcgacaagacatttctgaactgcggatcagcggatattcatgagcaccttgctaccttcatctcctatgtattcaccacaaaaaatactggatctaatagatctgaattttcacacagctagcaccccaacaatattaacgtaagctagcgaaacctatgtggtatgtcacaagcagctaaataaataatggagcctcagcatgaacacatacaatctacagagagcacacacatgatctgcatataacaaatcacaatgggagaagagaccggacatactgccgggaagcactgtttcgtccaaggcccagccctaggcccaatggtgttctatcggtcttcttactgtggtcacaacactgagatgaacttacttgactgtgagattttgagtgagcatgtgattcagcacaagaatggccagtgccgttaccatggtgggaagggccctcgccattctgagagactgcgtttgtcatctgtatcattcccatttcctcatcagtgtgtgacgtatgatcaagacgttcaatgtcctcattgtatccatttaacaagaattctgagcagttcttgcgcgctccatggtcaaatgggtttctgaatcttccacctggacctcttagataactgtatctcatggaatttgccatctcgtttgttgtaatgttcttcgctatctgcatgggagatggaagtaaggcatgaacacgtcataaaacagaacagaaaaaatgctcctcaagtcctcgtgtccattctgaaaaagttatagctaccagatggaaagatctgtcgtatacagaaacatcacagaaaactaattaatagatcaaataagccagataatacctggcatctactgacttcaactctatcttgtaattggaatatcagttttgctactgaattatgtatcacagcaatttcattgcctaaaattcaatgttacttctactgtatccaaactttataggggatacacacatgaactatataattatgacatgttcatttgacaaatccagcaaggcttcataaatttctggggcaaaccctcataaaatcagcagagaagtttctatatgaaactttgtattacagaacatttactgatggttgtaaagacaataaacatgcttcctggtttttttcattatcaggtcaaaaataggttggtttctcatgagaaaaaaaaagatcaagtagcaagctaaattcaacctttacatacctgagatgcctggactactgctagaactgcaacaccgaagaaaaggaagaggtccattatgaaaaaggaaagtgccccagtatggttaaaagcagaatagctgagccaaggaataaaggatgctggagaagccggatctcttaccatccctgtgacaaaaacagcattgaggcttatggaaattttttttcactccaaattattaaggacagaaccacaaaggacttagcagacaatacttataatggcagcagaaccagtaatgatcattgcaaaaacttctagagtgatgaacatgaagaattcccatttgttcttctgcagttacagtgcactatagatcagaccaaaggacaagaaggtatccggcagggaaaaacattcaaacgaaaagctaccaaaaaagagagattgtattgtagagcacagagctcttcataatgttatagcaactttcttaagatatacatagcaacataatcttctgcattaaaagttcagcattttaagacataagttatccatttcatctccagaagagatgacaaccatgtttgatcactactcaacacagtgatacccaaaagaacgtaagtaccttgccaatgcaattagatacccaaggacagtgatggtcaaactgctcaacacagcgatcacatgtagaacaatgcttcgaacgaacaggtctcacaatctgtagaataacccttggaatcagaggcccaaatatcaacctagcaaagagaaaactaatcgacaatgctgtacttactttgcatgttatacaaagctgtgaccagttaccagacagaagtgcgggattgtctaactccaacttcaacaaaggttcctaaaggaataaatactcatgattaggattgtgaaattttggatatattgtttggctttaagtctggaaatgaatcaaacaagattcacacgagtccaaagagaagataaatgtgcctgtagaaagctatattaactaagctaatatttcaaacttacatcatccctttgattttgtgaatctcgtatatttgctttgatgtagccaggatctttcctgcagatagcataggccaatgtcatgatgcagctaaaggataatcaataaatgctgcatatctcatctggcgatcatgggggtaggtaacagaagaatagcaggctatttacacacagtaaaatgctcaacagataaagaatgcaagaacagaagggcataaccatataagtaaaacatctaccacatttctgataagcaggtcagctgatgtaaaatgcgtcaacatgaaaaaatatataatgaattgtgttactatattgaaatttgtgaagcagtatctaacaagaatcaacatgctggcaatatgtccccatgctatcttgagttttcaacttttaatactaactgccaactaatcttcattttcgtaagtacctgctacatttatagaacatgactaggccagcagttgcaaggaaaactcctgaccatgcaaacagcccaaatggtgctgtcatatccatgatatattgacctgaaagaatgaaatgtagtaaatactgcatcgtgggagatcaaatggagtgagcgacattggaaatggtacttacctgatataacagagtgtatatatgtagcaagcaagccaacaataatacaccaaagtacaggagctagccccagtttcgatagctttccaaaattggtattcccatcacatcctctatcatatacccttttagcattgtcctgcaagcaatcatcaaatcaagtcttgtttctgtctaaataaacaagcatcatcaaaaggatcatcttccagtagattctctcttgaaataccagtaatattctttcacctcaaggtcaatatgaccactcttatgacattagctagattaacaataatgaattagtgaaaaggatattaatctacatgtgcaatcacaaaaagtcaggaaatcatttcggttcccaaactcacaacgaatctataataaaaatatataagagcatataagcatcagcaaagtcacaacaaagagtagcattttgcctccttggttacatagttttatgtcttatgctagtttatgacatttctggtcaataatatcatttccatgtgtagaagtcatagaattttgcagcttcttgtactgaatctacagggaaactacaaagttcagaaagcttatgtatgcaattatgcataatcagtgaattacaccaataacacctcatcatggagacatgaaactcagctctaaagaatttataagtcagaaggaatataaaacctaaaatgatgaagaaaaatgtttcctattagtaaacatcattacgcaaatcatattaagtaacttggcagaatctctagtagatgaactgttaatggcttaatgcattgggctctacaaaagaatggctataatacaaaaacagaaatgccatggttcatgttacttacaagaaaaaatgcaacttgccgatgactcttatcagcagcaagctgtgctggagttagaccagtcttatccttcaccatcaagtcatcctttttgccagcctgaactagcacagtgcatgcctccaggttccccctaatagcagcccaatgtaaaggggtacaacctaggggcagcattgtagtaaagaagtaaatctcatgctctgaagtgtactgatataattggagatatggctaagccattggtttacactgttatgtgcacagcagtacaggtaataatggaaatagataaatttagcacatgccttctttatcctgccgccccctataagcatccaaatacaaaaggagacgtatagaatccgcaaatcccttgtaagcagccctacaaggtaatatgccaaaaaaaaacagagagagagagaaagaaatataaggggcactgaaggtttatggggacatgcattactaagtgcactggtagaaactactactccagtgcaacataagataatgataaatgtagagaacaaggtacaaaccagtgcagtgggcttcttccatcattatcagggacatctggatcagcattccacttcgcaacaatatgataaataaatgctgtctggccatactgcgctgcaacatgtgttgcctgcaaacagcagtatagagtttttaacaaattcactgccatagacaaaagttgttgattcttgcttttcattttacctagagaattcataggttaaatttatttatttatttatttatttatttatatactggaaatccctgatcccctagtgtggatacaacagttaacttggcaaacaaatatccaacaatacttagttgtctttcagaatcatgaaccaacattggacaaccaaagcaacaaaccaggaaaacagggaccaaaatacagaagggaagtcaaattcagacctgataaccgtataaatcagcaacatccaccttagctccttctttcagaagaagctcagcaacttggatgtgtccacgtacagcactccagtgaagtgctgtttgcccagtgtggtccacagcatttacatctgctccatgctgttcaaagaccaagcacaaaatcatagtccggtcaaacaaaattatatgtgcagaatgcgctcactgaatagcatagtgatacttcgtctacatgcagagaataacatactctgactacataccacaatcaagataaattcctggtaccatcaaagtatgcatgttatgtgcgagtttattcatgcacttagtaggcacacaattagtaacctttcttattcagactatactgagcctaccatacactcatgatcttaagattaaaaggaaaagaagacttaaacggaaacacctcaagggcgctgcacaggccagctgaattctcatctgctttatccagcagtaagcatgtccacattctcaatgatccaatggaaaaaataaacatacatccatatgaaaattcagggataaaccaaagcacagtctcactagttccatttctattcaagcctacaacatacaaaatgagatactgaaaaactggcatcatctccaggtcatataaacatccgaaacctactaaaagcacatcaatttccagctataacagcttgcagcagtcccaaaccctccatattcacctaatgcagttggccaccaacaaaattgttcacaaacctggagtaattcaaccacaggcactggtaatttggtatccaaaacaccagccaatgagctaaaagtgaatacacctagccaacacagtataacaacaaacagtccacggttcaaaaacatataaaattgcggctcataaagtgcattggttgatgacgcatcctaccaaacccccacccaaatccctcgctagctagcaaacaacgactacacgaaggccagccaaatcgcgagacgctcgggcgggaagcaggaggggggaaaacctcgaggatgtactgcgcggcggcgacgcggttgttgagggcggcccactggagcgcgtggtagccgaggccgtcgggctccgtgaccgggtggccctccccctccactagccgctgcagcttctccagatcgccgtacgccgccgccgtgtacacgtcgttcttcagcgagtcgtcctccgccgcaggggccggcccctccccctcctcgccgtcggcagcggcggcgggggatggggatggggacgcgggcgccacgggggcggcggaggcggccatcgtggtggtggtgtcctcgagcacctcgatctccgacgccatgggggtggggatcggagttggggagtgtttgactgggtgggtgttttgggggggattcgttggggtttcgcaagttgggtttgggtttggtttgggtggaagcggagaacgagggggaaggagagaggcggaggcggcggagacgaaggttggtggtgaaacgggaaactccactgtgattggctgaaaaaaagaaggaaaatccccacagtgactgcaagtttagcacatcaccgttggatgcataatggaaagggtggaacagggtgggtattcggtgtcggtttttcggtcattttgattcaatgtaaaaatatcaggaccgataaattcaatctcggtctcggttctgaccgaaatttaacaacgtttttatatatgcaaagaaataatggaaattttcaacacaaaaataaaaataaaaaaaccgtaagcacgtatgagtaaagacttttattatgttgcatgcctagaagaagtatggatatgaaaattagagtttaatcctattgaacttagtggattgtaggttgcatttagacatattttgttaattcggttttttcgtctattcacttaaggagactaaccaaattgaccgaacaaaatttggtatttcacccaatttctcggtctcaatctcagtcttttcagttcggtctttttctgcacaactctagagtggataatgagcgactctccttgtcctaaccttaacagcagtaaaagtcttacttggctaggagttaacgagctactccctcctctggtttcataatttttaatgatttagataaggtttaatttaaatttttataacttaaaaatattcagtttaaagacaaatacagtattataataaaaataaacacacatttaggtatagtgaaagacatattttgaaaactatatctttgtctaaaacattaataattattgccgatgtttgagatcgtaactacgatattttgcatactgtagggatcgttgttaccagggtatatacgagattgaagtaaaagagacggagacaatgatttttatacagattcaggcctcttatctgataggtaatagcgttacttctgttggctgaagccggtgttgctcttattcatcataatcacactagtacaatatttggaataacacatctaaccgttgtcgacttggagacctgaaatgaaacttctatatatgtgttcttatcaaaacttctatatatgtgttcttatcaatctataagtaaagactgaaaaataaactttaataaaaaaactcttaaaatcaactttaaatttaagattaaaaattttaaatttggctggcgagtataggcataagccaaaagatgcagtgatcacctcatgcacggctgcacgatggatccatcgccttggagtccaccattccacggtgacaaaacacggcaagtccgcagcaggctggcttggatggatcggatggcattccgttccatcgattacgcgttcaacagctccgatgaaaccatgaacgacaaccagcgagagaaaaaaaatatatcaggaaatcgatttcgcacctggaatcgggacaagtcattcttcgttcgcgtgatcgcgtctctttagcggtacacgatagtattatacacgattattgtggactgacccagtcggccgcctcgtggaatcaaaccagtacgaccgacgtcgtggacttggcagtcagtacgctgccgattccacacccagtttcctatctaagggcaatcacagtgtgtcaccgatttttgccattgctcgtatgccacgtagataaagaacctcgtaagcttcatacttcacagtgcaaatactagtagtgggtctcaccggtgacaaactttttactttttatctctctcctttttcttctcacccaaatgagtactagtactattagcttctctccacacaaatgagtagcttcttccaagaacccggtggcaaactttggacacaaaaacttttttttgggcccagaagcaaacgtggcgtgtgctttttcctttgcagactagggagggcgaggctgaacgtcacgtaagtccaccgtgaacgccctaatcacatagtacatttttcgccccctgttttcctttctgccattccattggcagttcggttctttgggacaaaagttactccctccattttaggttattagatgtttttactttggttaaagtcaaactactttaagtttgactaagtttgtagaaaaaagtagtaacatttttaacacataacaaatttattatgaaaatatattcaattattgacttgatgaaactaacttagtactatatttgtctataaacttagtcaaacttgaaacagtttgactttgaccaaagtcaaaacgtcttataacctaaaacggagggagtaattgacagcctgaaaggaaaggagtaattgacaagaaattacacgaaccaattaaaagctgctccgagagaaaacttgttgtagtatcgacagacatgtactccctccgtctcataaaaaaccattctagtactggatatgacatattttagtgctacgaatctgattctggataaatgtatgtccagattcgtagcaatagaatgtgtcacatccagtcatagattcgttttttctggaacgaaaggagtatgtatggatcattagccattacagcgattcgcaccgatgatgttgttttgtggattctcttttactccctccgtcccaaaatgtaagaatattttgggtgaatgtgacatattctagtactataaatctggacataaaaactgttcagattcataatattagaatgtgtcacatcatccaatatcttttatattttagcacggtggagtagcttgatggtctcggtcaaggcatggaatatgggcttcgtatcttgctcttcggccttgtttagtttgcgaaaaagaaattttttggtgtcacatcagacatttgaccggatgccggaaggagttttttgatacgaatgaaaaaactaatttcataacttgcctggaaaccatgagacgaatttattaagcttaattaatccgtcattagtatacgtgggttactctaatatttatggctaatcatggaataattaggcttaaaaagattcgtctcgcgatttctatgcaaattgtgcaattagcttttttaatctatatttaatgttccatgcatgtgtccaaagattcgatgtgacgtttttaagaaaaaaatttgggaactaaacaaggccttcatctcatcctctgttgccatacgtacgttaggcctttgacattttgtcctcaggttaaatcatgcttggccacaaaaaggaaataatgctgtggagcctccatgttcattattaaggcctcgaaatcaccacgctaatcagagtaaggcattaatctagaacaaagcatgatgaccagattacaaccatgtatgctgatagatgaaaatgtacgagtacgttgtccatcagaaataattccacagcagctacaattactttcaaatggttcgtgtaattgtacgggaaaaccagctggttaacatttggtacggagtatatgtattcactattcagcatacaacctaacacaagtcctcagcatactatggaacagcgaggcttcgtttgtacaatatgcagcagaaaggcttgcacgcacagagataaacaatctattcatcatagagccttgacagtaccatgtagacatgtagttaagatccttgatcggcaactgaagaaaacagagcaccattgtcacgcatgatcactaatttacatgtgtacatgatattaatggcaaaagattattccattaacttacactctgggctgatgggctgtccggttaatatcttcctgctatatactgtcccagcaactgatcagctagctcctcaattttcttttctctctctgtcgaaactaatgctgcatgagattatcaaacaattggtgagtggctattggtaatgaataactgcaacgtagtatagcaattagttacttcgttccaaacacgcacaagaactgcaggttgtcacattgtcaatggaaaataacacagctaatctcagtaaaagcttacaaactcaataattcaatatgatggatgttaatacaagagatcaaagttcatctatttttttattctaacaaaattcatctatgattgcacaaagaaaacacaaggcatatagtatcaagtattaaattgggtacaaataatgtcctagtccaaaagagatgttgctgcctcgtaaggccgtcataagaaataaacaatggtacgtagatgtttcgcattgtcttatacacaaaaaaaaaaaaaacttcctgctgctgttgttttcttatacaaaattcttagcttgagctattgcatggcctacagtggaagcatgaggtataaaaacagcagagtatccggtgtacctttgttttcagcggatgttagaagttaggtacaacttggtgaaatgatctccgtacgcccatttctatctgtaatttgtatatgcggaatgtgcttgatattgatccagtcatctcctgacttgcatctttctttaaacctattcaagcatgttataagtgtcaggctctgcaaatttgtgagccgccggatgcatggatgcaaagcttccatccagtaggtctccactatgagctcagtgagacaggacatctctcccaaccattctggaagcaattcaatatcctcgcatctccgtatctcaagcttctggagggacttccagcccaggatgcactttggcactggacaactatcaacacatttgtctattgttagttctgtgatgtttagaagctcgaggtgcggaatgctcttccatctttcggaagatagaccactggtgttcttgatttccatcctggatgttgatccagggattgatgtccccatgacttgcttgaacgatgggaacaggaacgaacccaatattctacggtaattaaatttatcgaaatatatttcccctgatatgatgtaatgggtgctcctcgggatggatggttggaatcttaaattctcacataattccatttccaaatgctgaagacccgggaataaatttttgtcaccctctcctccttgcacggatatttgtaaccctttgtttattattttggtcatgacaatcttttggagcttcctaagtggttggctacactcgatgcaaaccggtttgttagacttttggctttctatctgtgaaagatgcagctcctcaaggttctgtaactgatgcaaaacgacacactcaaatttcacggtgaagagatacaactgtcggaggttctctaactgaacaaggtggagatgttcaaattgttttttacagagttccagctttgtgatgctctgtaaccgctcaagatggagatgtccaaattccacactggagaatttcagctctttgaggttctgtaactgatcaatatggagccgttcaaatcgctcttcagagagtttcaactctgtaatgttctgtaaccgttcaaggtggagatgttgaaattccacaccggagactttcagctctctgaggttctgtaactgatcgatgtggagatgtccaaattttaggccagagagagacaattctatgaggttctgcagaccattcaggtggagatgcgcaaattgcactctggagagaaacagctctttgaggttctgaaactgatcaaggtgtagatattcaaattgcatgccaactatcttcaattgcacaagatttgggagtaaagacatccaacgagggaaatcaacaccagcatagttctttatgcaaagtatttcaaggctatcatgaggctggagcttttcaaaaacagccctattctgcatccctctctcagaagaggcgtatttatcgctggaatcagcataggcatatgaccactccaaactcaacgaggataactccttttttgtctgtaattctaagttctccatctccctcaagccaatcatacattccagaccaccaatatgcagatcgataaattgagaactagtaacttgctgaagaagcattatatagcttggagtcaagtacatcaaagggacctacaattaggaaaaaaagaagatataaatgatggtgaacttgccgtaatgatgtaagcttgacctgcatctaagttagtttatacatactctctccatttcaaattacatgtcgtttttctttgtcttaaagtcaaatattcctaactttagccatcaatttctagaaatttacatagtttaattaacaacatgcgaaatatgcattactcatatgagagtttctcatagtgaatcttaaactatatatctttctagaacttgatggttaacattaagaatgttttgactatggatagaactaaaacgaaaagtaatttaaaatgaagggagtaggtgtaaatgacctccaatggttaatgttaacatacacacagaatggttggaaacattattaatcaataaatgagttgaagttgaatcaccatagagatatatcatggtagtttgcatataaatagtttgtacatctagcataggatacccaatgtatgctagtcactccaatcacaaattaaatactttaccattttggttatatgattggtcaaatcttataagactccaagtatctaaaccaaaaaactaaagcagatgtgtgccatcgggaactggaccacacgttggggttgacaccatgattatatacatagttaatcatagttgtgatgaaataaagtcctaaggtgtaaataagaacaatggttgtgaacaagtgtttgagtgggcgtagtgcagagcaaccacgatctaacaccaaggaggcgtagttagactggaggtagcttgaggttggcttaggccggtgcaaccggtcatgtaatgatgtttttactatgccattgagtttgcactgattcatggtttgtcatcaactttgtcccttctataatatactaccaagtttatccatagtttctttaatatgccatataccaaataccttctaaaagaaagcctaaaatgccctaatatacgtgtaagagttgacaattggttgaccactggaagattcaaaaagctgtgaattttttttatctagcctactagcacataatagaagtttgtgcacacgttttaaaatttttgcattactatttttttataaggcaaattttgatacaaggcgttgtaacttcgtagttttagctgaaggacactgtaagtgaagttttgggggaagacgctctcaagttggatatttgatggtggacactgcccctattaaaataatcatttctggttggataggaaaaaaatcatgtgaattgttagaaatacccttggtcccacatgtcaactctcccatatctcttctctctatcccctccatccacagttccacactgctccaccgatggaattgcacctctacaaaataatttaccgatccagagtcggagttacctcattcatatcaattgttttgatatgtttaatcttttctttatcctctctagatgtgcaccgttcacgcagtttgtagttgcacttgttgagcaccaaccgttccaaggcagtcaggcgttggatggattgtggcaaatattccagtttgcttgcttgaatatctagcttctgcaggaaagttagttctcccaaccactccggtaatacagaaaagttccagcagttcgttatctcaagtttcctgaggcagtggcagtttttgataggttctggcaaggtgattagatcgatgcaggaatcaatagtcaaatacaacagatttacacagccttgaagaaatttcacgatatcagatgatgagccagagtcatttattttcagtgcgatcaaggccaagtttgagcttccgatgaactgttcaaatgataatagtatgctgtagcttttctcgagggtacactcccgacttctagggaaacctggaacaaatctcatcctgggacaatttgcaatgagaagaacctggagattagggaaaacttcttcgcttcgtgaaagctgatggtcattgtgacctgttagtagtagtgtagtggttaaccattcctctaggttcttcatagtactaagttcaagttctctcaatttcctgaatggtttctcagtgccgtaaacatgaccgtccacttttctgacgctaggcatatctgagatgtgcaatacttccagatttgctaattggccaagtggaggaagacattgacagtttgcgatgttagacagtttaacagtcacaagatttggaagggaagaatttatattcatcatccaatagcaaaattcatcaccccgatagccttctatttcaattgtttccaggtcgtggtggggtcggagtttttggagaactgccttgtcctcagccatgcttgaatcctcaatgaaattgcttctggaccacaccaaacgaacttgctgatacttcgccaactcttggacttcacccagtgatcccttcaaattctcaagatttttaatgaccaggctgctactttgtccgtcatagtgtttatacagtaatggaatgttacttgagcagaatattcctccttcctcaattggttttacggaaaaagtgcccacctgcatttttagacataggcataatctgtaaacacaactaccatttttttaaatcccaaacgaacattgctagtaagtataatagcagccacagctatctgctgtaaaaagcacatcaatttgatagcttatgcacctgcgcaggcattacattatatgtttctttttatgtgaccacccgcatggaaggctggaagcttgcatgtatttgtaatacgtgtgcatcctcaaagcagcacgcttgagctttagccaggttatatagatcgattatgcatgagaccagtatcaacgcttcaactatccgcaaatctccggagcagtgatggcagagccatctttgtgtttgttattgggtaatttaaatccattctttttaatacctatactaattatacactctgagaaggctcccctgtcaagtagaaagacggagcactaattactttttaaatcctattatcatagctgaagattgtagggataattcatattgaaataataatatgccatcaaaaataccatgatgcaatggacttggtagacaggatggaaactattggacattgcaacatactagcaaaagacacaagtaaactagtagagatgcagtgcacttggatggattcagtagattgtaattgacttgaaatagcgaataacactagcagcatgctcaattacactaacgtattagcaaagaaggaatactagtagatatgtttgtagcagaatgccatacttagtgggatgtaacagccagcagattgcatcagccttgaagcactagatatgcatgataggatgtccaaagaagctaccagctagaataatagccaagctggcccaaatagcagtggcatatcaactccactagtctagaagtagtgacatgatgaacaataagctgtgtgctggagagcagcagcagcaagcagtgcagcgagtaaacaagaatgaagatgatggacttaggccttgtgttctgtttacatggtggaaaaaataccatcctaatgggccttcacacctaggcctcgggtcacggtccaggtggcccaaggcctaggtccgcccctgtctcgcggggagttctcgaggaatattcctgttagatccaggtccaaagcgcccggcaaaatcgagctgatcatctcgacccacttcgacgggcgcacggtgtgaaccgtgcgccgctacttcactcgcccgcccgacgtctgcctacccgcacgccaatcatcgtcgcctgcttgtcagtcaccgctgcagcttctcttgaccgtcggtcgtcgctagtcgtccgcctgctcgcccacttctccgaccatcaccgagctcctccgtggctcgcgtacccagccgccggctgccgctccttcgcctgctcgccgccaacccgcgagcactcctccgcttgcttatcgcccgcatgcttgcgctcctcggccgcgctcgccgcccgcctgctaggagcccgcgctgcacctctgcctgcttgctcgtgagccagcgtcagccactcctccgccttctcgtcgcaggcttgctcgcgagccgtgcccacccgctgtcgcgagcccacgccgcacacgctcctctgcctggtcgccactcctacgcccacttggcaattgttgacggtggctgcaaacggtgtccatcccatccctctctcatccgttcaaccaaacaaaaaactaggataagcccatcccgtgaactaaacagatgagtggatgattccaaccccaaaaccagggatggcttcatcccatcccacttagtcatgaaaccaaacacatgctcccgccgccggtgagagaaggagaaaggaaaggggtgcggtgaaaaaaaaggtaggccagagggttaccgcgcgcgtgcgaagtgggatggcgccgtccgccagattttcgcggatgagatcgtcccgaatattggaggaatattctctttttggaaccatcctatccctcttaatctctcaaccaaacacttggttttggggatcatcccatcccatcccgggatatccctccaaccaaacactacctaagagaaccatcctatcccacccatcccaaaaccaaacctaaaaaaggtccaacctatcctgatccatcccacccttgcaaccaaatatatccctctattagggggaaggttagaattagttcatgggaattaaatggtaggaatcatgtcctgttaggtttcgtgggatggggtgatcctccattccccgtccccgtccccgtcccctacagagacccgcatagggttcaagtttaattttcggtccaagtttaatttgtttacttatcttatgtgattaatcttgtgtttttatcatatgtattagtgggtataagttgctatattaatataaagtgtgaatatatgtgttgcattgcatatagaatttcacatctatatattgttttaagcagggatgtagaccctacggggattaattcccgcggagataggaacaagttttccccattgtatttcgcgggagcagggatggggatgcattcctcgacggggaattcctatttgccatatctagccggaataaagaaatccggtgctctcatatcatgttaattttagtgaattggggattttcaacagtgcattgatttagccctaaatagcatatatattatgtacacaagagaagggaaagtattctaatacccttgacatctactagacttaacagtaaatttgcttggtactgctagaaacaaagaaactacatacctttccaatattgatatacggaacctgagaatcaattctacctacaaagtccacaatattatcatagttagaacattcttctagtccatattgatgagatggcggtaaatttattttctccaagttggcaatgcatgactgtggcagaccatagatgctctccagggaatcatgttcactaactgtgctctcttcctctaaatacttcgaattgtaaaacaatgggtcagtgatagtcaactcgtccaagtgggtgcttagaagttctgtccattggcgaagttgatctcgtgagccttcgatatgcagttttgatttcaatctagggatcgacttctgcatagcatgttcgtgtggagggatcgcagtaccttgtcctgaatgtgagcatccttcagtatactgatcatatggacgtgatggaaaacttgaagtatcttccttgtctacaggcagactgagactgctatctttgacgaagtactctttgctctttgggggagtgggatgcagtttcaggtcatggcaacttccaatttgtaggtaatcaagttcggggagcgctgcacttgtgacctccaaacaaccatgagacagttttggtgacaactgggactcttctggcactagtgaaatgtgggacaatgctgaggccaatgttttctttgcccttgctcctccaatagataataatagagcgtcaaaccaattctttaccttgcccttttcagtggatgggcctctagaaagttcctcacttcttctcacttcgtttttacgaaaagaacagccaggtaatgtgttgaactcttgtcctgtttctgtcatctcttcatcgcagccatgacttgattccaccatctgtacttctgtgtgtgtacagatatcataaaataaatgtaccgtggcctcatttggtagtcctaccagtgtcagtcttcttagcttattgcatggcccaattcgtgcatcatgaagctggggcatattatagatttctagctcttgtagatttggtaaattaccaagtacagggatatggtcgcatctctcgatatgagacaatataagtttcaccaggtttgggagcgtaccatatatcttgttaagccggggcatattattaatttctagctcttttaaatttggtaattgactaattgggatatagttacaaccattgatatcagagaatacaagtttcaccaagtctgggagtgtatcatttatcttgttaatccaatcaggaaattcggtgcaaatgtaaccttttatagagagggactgtaaattcctatgaggcctcaaattacccagcactgctcgttgtttaacagaagataccataccagataaagaccattcgaaacccaacgaatgaaactgtcgcatcctgtccagttcaagctgcttcgcttcctctgaaaacaccacattctctaggcacttgatattgagttgacgatgtgtaacatcaaggatttgctggaggatcaaaatattgctgcacctcccatcatcttgcaggcgtacattaaaattgggcagtgtcagaaggtccaccattcttgcaataccttgctccgagtagagagtgaatcctccaatggacaggtacttcagacgaaacaagccttgggtgatgatatcttcctgcagcatacccaactctaactctttaatgggatcttgtgaactttggtcttctgcagaggtacctggtgcctcagaatcactttttgcgccaacccccgagatgttgaggtactctaatgtaccaaacttccatcgtggaatcaacttcaaaaagttttgaagtttagaacagcctgaaagattcaaacaccggagttcacggagttcagttgaagactcagggagggcaggcagtttagcacaacccgataaatccaaaacctccaacatcgagcagccagcgtcgtgctctacaaattcaggaagatcctcaagagaggtacaaccagagaaattcaaaaaaagaagcttcctcatgtgcttaaataatccagtaggcagttcttgcagcttggggcaaaatgacatatttagatgtaccatgtttggcagataatgatcaggctgcttctcaagtttttcttcgaggaacgacagctttacaagttgagaacaatgtgatacattaaggaatgaaagtttttgaagcccaccagactgtgaactgaataaaggaagtgattctagacttgtacagtctgataggttcaggtgttggagctctttatgtttgtgaatgccatctggtagttttttcagttttgagcagccatgtagatccaaatactgtagcttgagaaactcacaaatgtaggaagggagctcaacaaggtcaatgtttgttgacagggtcaatgcttgcaggtgatgtagtttactcaacgatttaggtaatgtgccacttaggcctgaaacattcaagtacttcaatagactcaaatgactgatcgagtctggtagttcattgatggtgcatgcactgaaatctaagatgcgcaagaatttagtttctgaataattcttgggagatttcctgcaatccttgaaatgaagcgctcttgctgtattgggcaatatgggatctcgggaaaattcactcaaattcaagaggtacatgtagcggcagcaatttttagtgttggagctactgcagtcactggcatgaaagatacatacttcatcagctgcaattacacttgcaagatcgtgaactatatcatgcatcttgagtacattttgaggctcagtatatcgtgcagacatctgaaaaattaagtttagtcacttgacagagtaggataaataaaacagcaagacagacacattctttctatgcatgataacgaatgcattttatatggtgtgaaactaaccaaactcagcacataaaatggttagaagcttatccggagttcaaattcaatttggccgtcgtttcttaatactagatgcgtacgaccaaggtgcagccgtctacaacaggcatttcttcttcttctttttcattacacgggcacacaccactccaccagcacaccacactcacggacacaaaccacatctgacacctccatgaatacaccccttaacacatactcaaagagacaaagactagcgtcaactccctagcctcaataaaatcctattgaatgtgcgcccacatgtacataatacttaacctgatgggtggtgttactcatgactccatcaccaaaccactgctgcttgcatttgatgcatcaaatttatgtgctactcatttaatctcagtacaaatagctatgaaaaaactgaaaaaaaaaatagtaacattggtacaatattcatctaacatttcgcaagatttttaaatccaaatatcatagcatgtcaacaaaaagacaatattccaattatccaattagtttcaggattaaatttggattgaacttgttggtgcatgcatatgttttattctgatttcaagctttaggcttttttcatgactttgggcccaaaattttagcccaatggtggaagatctggctaggctgcccatgaataagtctattcaacagaagtagactgccaaagctaagcattttttgtgtcctgtgtgcatccaccaccatgttgtggacacctccacagcaaccaaagtgaaaggagggagcgtcaagcttatcaattccatttcaatattagccagagtagttggtatttatcattccactaacaaaaatagtatgcaacaagtgatgcgtctttccattctaaatattggtcaaatttcaattgggtattgaccattgacataccactagtttcggtaccattccgagcaaaagtgatccttccattgaattccgcttactcgattccttcaaattacatttatctataaactcatttttctctatcatatttgttccgattaccaccatttttacatataatatcatgtgaaattttgataaaatattgtataataatactatttggaaatcaatcgaatgggaaaaaagagagaaaaagagttgcggctgaggaagcataccgcagttgccgcgttcacattctgcaaaaaggacatttcaatgagttcttgcaagcagtactctgcgtattgttctgtcgggatggattctgggggctgaatgaatccaagagcaatccattgctgaatcaaactgctcttctgtatgtgggagcccttggggaagactgacaaatatgcaaagcacaacctcagagaacaaggcatgctgtaataactaagcttcaagttggctataactccgttatctggaaaacgatcatctttttcggcccatatattactatgtaggttttgttcccactcagtcggacgcattcttcctagaaagtaaccaagggattttacagctaatggcaaaccttggcatttctccactattgtctcccgcatcgcttccacgtagggaggcactggtgtcggtactcgtgcttttttcctgaacaaggtccagcagtcttcgtttggtagaagacccaattcaatttgcaaatctttgttcattcggtcagcaaccttcttgctacgtgtagtcacaataaccttgctacctttcttgcagagtctaagcattgcctctaactcatccagcttaaaattattttcttcccagagatcatccaaaacaataagacatcgtttttccgtgaggatagactccacagcaacattatgaattccagaatcaccatattggagcgtatggctattacattgctgtttgatagataaactgattgcattaagatcaaatttctcagacacataaacccatgctagcatctcaaaagctatctgtgttgtgcagtcactaaaagccatttgagcaagagtggttttacctaatcctccaagtccatatataggaataatggagtgttcttcatctgatagcagcagatccattattctccctttctccgcgatccttccgacagtatcctcactgctgtatcttctaggctctaaatgccgactgatataagaatcctgctcctctgtggcaccatctaccttaaagctggtgagatccatttctttctttattccttcaagtcttctcctcatcttcttcatctcccttggcaagttatatcgtgacttcaatttttcaggaaagctcgaccattcctgtcagttagcaaacacaaagttagactgaaaaatcgcatttaaacgagaaatcatgatcaggaaggatgctgacatgtctgagagaaccatcatggccatcgttggagctcgattcataaacggccagcctatcctctatgtcataggctacggccttgagtttcttcagcaagtcgcgaacgctgccatccgtctgcgatttcctctccgcatcgttcagcttcgcttggaggctgctcagcatgctcttgatggcttctagatcatctctgaaggtcacctgagacatgatcgtgttccaaatcggagagcccagcttccccgatagttccttgatcaccgcggaggcgataatctctccgaacccaaccatggcggcaaaacaggaacgaggaaagcaagtcaacgcgcaccggaagtctccccacccccccccccccccccccttccctcaggctccaagcccttctaagctagcgtctcggattcaccacgcactgagtcactgacctctctccgccttgcccctcgagcagccgctcctctaggcttgttccgcggctgggtgggctgccggggagacgacggcggaggctcaccggcgaagatggccggagggaaggtgtgggcgtgcggcggcgcttgggagaatggtggctgggaagggatgcccggcaccggcgacgccgtccgcacgatgaagttgtttgattttgagatgaatggggatcgatttctgatgggaagctcttcttcatcaagtgaagaagttgtttgaattttgagatgaatggtgaggagtcgattagttgctgcgattaatatccgagtcgccggcagaaaatcactactccagtatggactatggagtactactatttattcttatttttattgatggtagtgctgatgattggcaaccagggtcttcgattccgacgaaatccggtaagatttcgcgaaattttgatgttttgacgaggctcgaaagtaaaaaccgtatgagattttgagaagtttcatttaaattcaaatttgaattgataaaaaaagaataaatcaaataaaatcttataaatattatgatattcatagaacctattgggatataaattttcgaaaaaaataatgtattatgtgtatttactgaaacttacatcaggaaagaaaagaataaaaaattaaaccgaaaagcagcagtatttgacaagaactccatccgaaatttcgatgatttcgatcggaatttcgccaaaaccgaccagtttttgagaatttgtcggcaaatttagagaatttgtattcaaattttggtttatgaaatttgttcggaatttattggtttttcaccgaatttcgcgaaatttcaaattccgccagtggccaaaacgaaagggtctatcggaatcgtaaaccctgttggcaatatgaatgatagagtgtagatgtaattcctcgtttcaaaataaatttctaacaaacctatcaaaaaaaatgtgacactatctatcatatccagaaatttagatttatttatttaggataaagaaaatataagatactgcctccatttcatattattacctccgtttcatattataaaactttctagcattgcccacattcatatagttattaatggatctaggcacacatatatatttagattcattaccatatatatgaatgtgagtctgctagaaagtcttataatatgaaacgaacgaagcaagaaaggaggaaaatatagtatacaaaataatactataattctctatcttaaaacaaaagcaagcacacgcactactacgtcattttagctaaagtattttacttcaataattcaagacaactcaaacttagttggcacacatgtactccaccccctatcactagagttgttttcttttttgtacaagatcatcctaacattcccacaaggacataaagaaacagcagaaccttcccgggaaaatttcactgagacaggtgcattccgtgcacgtacaataatcatcaccatcatcgtatcatccaacctacaggaaaacgcaaattcaaggtactcttgtccaaacctgtaggtggccagtgatttgctcccatcggctacaactaccagactcaaaaaaactagacacaggtatgatgctaataagcttagcatgatcgactgatggacagacagtaataacaaataggaaacggagggaactatatgtgtcaactcgatgaactctataatatatggatgatttccagcgccctcctggcaaaaataacgtcctcgtaaatctatcgtcaccatctaaaaccacttgaagaggatgcctccatgggtggcgaagaacggggcaaacacgagcgactcgacagccatcagcttgatgaggatgttgagcgaggggcctgaggtgtccttgagaggatccccaatggtgtcgccgatcacagcagccttgtggcagtctgagcctttcgggcccagggtccttgcatgctcagatgcaccagcctaaaaccagggagaacgagagttataatgtttggcgaatatgggaggggaaaaaaactgcttgacgtcaagtgttgctgtgatggaagatggctgataagttcttacctcaatgtacttctttgcgttgtcccaggcaccaccagtgtttgatgcagagatggcaatctgaaaggaagcaacatggttatgaatgcaatatggcaagagtaagtgatgagagtgtggctgtgaaaaagaatgtgcgaacctgaacaccagaaacgagagcaccagcaagtagtcctgagagggtctcgacaccaaagaagatcccaacaatgagagggctgagcatgacaagagcacctgggggaatcatctccttgatggatgcatcagtggagatcttcacacaggttgcgtagtcaggcttggttgtgccctccatgagcccagggatggagttgaactgcctacggacttcctccaccatcttgagcgctgcgctgccaacactcttcatggtcatagcagagaaccagtatgggagcatagcaccaacaatcagtccaatgaaaactttaggtgtcagaacatcgacagtggagatggcggcacggctcacaaaggcaccaaagagggcaagagacaccaaggctgccgagccaatggcgaaaccctacaagtacaatcatggagatgggaattaactttaaaattgtgacatttgtaacaaaaggaaaaatatttacaagtgcaaacacaattttaaatttttaattgacttcagagtggaaatgaagcataaaaacaacataaaaacactttcgacaagataagcagttttaccttcccgatggcagcagtggtgtttcctgcagcatccagagcatcagttctctcacgaattctgtgactcatgccagccatctcagcaattcctccagcattgtcactgatagggccataggcatcaatggcaagaccagttgcaattgtgctaagcattccaagggcagccacagctacaccgtacattgcggcaaggctgaagctgaggaaaatactaaaagcaatagcaaaaataggaataatgacagatttgtatcccagagcaaggccaaagatgacattagtagcagctccggttctgcaggaatcagcaacgtcttggacagggctggacaagggaaattcaaggtgtgagggacatgagggactagaagcaaatatataagattacagacaacattgaatatgatcagacttataagcacctgtaggcgttgcttgtgtaatactctgtcacaaatccgatgattagtccagcccaaagaccaaccgccacacacaagaaaagttgcctatcaaaatcagggaaatgaggtcaatgattttaacaatgaagttctaagtaaaagatggaattccaatttaaatatgggcataccagttatacacagtcttctgggcaccaaagttgaatattgtgaaggaatatgggaggcctaaccaactgacaagtgcaatgccaaccgtcatcacaacggtggaaattataagttgcttcttgagggcaggctcaatttcatcaacagccttgatctcaaaaaaatcagtggcgaaaagtgtggttatcagacaagcaatgataccaactgagctaatcaggagcgggtacagcataggagtgaattcatggttaattccaaaagaagagattgaagcaacgacaagagcagcacaagatgactcagcataggaaccaaagagatctgaccccattccagcaatatctccaacattgtcaccaacattatctgcaatgacctgcaaaaggaggaagaaatgatcattcttgcatgcacataaattcctatcgatgttttaatgctttgctcaataacacaaatcattatgaaaagaacaaaacaaattatttcaagtaatattaagaaacaagtttttaaagcgtcaggaaagaattcttacagctgggtttcttgggtcatcttcagggatattcctttctactttcccaactaggtcagcaccaacatcagcagctttcgtgtaaataccgccacctacacggccaaatagggccatagaagaaccaccaagaccatacccagtgatagcctcaaaaagaccttcccagtcatcaccataataaattccgaacaagttgatggcaatgtaaagaacaacaaggccacttgcagcaagcaggaaacccatgacagcaccagagcggaaagcagtaatgaatgccttcccaacacccttccttgcctcaagggttgtcctggcatttgcataagttgcaatcttcattccaaggaaaccagatacaagagaggtgactgcaccaagcacaaaggcaacagtactgaagatagcatttgcaagggcaggcttgcacatcctatccttgctgtagtggcaaggttgactctttgtgctgaatccctcaacagatccaaggaagaggaagatcaggaccgcgaaaatgcccatgaatagtccaacatacttgtattcagtgaagaggaaagaagttgctcctgtttacagtttaaaaaaaacagtatttagatcatagacgcatacaaatatacaacaattagtcaatgacaagaaaaggttagcgataacaataataatagctgaaacataaaacaccaaagctagcaacgcataaatatgtttataattagaactgaacctgtttttctaattgtagtgtttgactggactccataaacatgagcaccaaaatatggtaacaaaggctaaattaaatagtgaaatagatgggactttggtcactggtcagtaacccaatatctcaaatatccaaccaattgaaaccaacaaaaatgtatttgattaaacaaagttccaatcctagaaagtttccacaaaaccagattcacaaattacaaaccatgcaaactattagcatatctagcatttcctgtgaaacagatcatatgcatagcaggactccacaagtaaggcacactaactgcaagccctatagtcttctaagaaagaaatgttgaccaaacaaatatttccaaaaatacgtttgaactttactagaaaaggacagaacctaacactttcacaatattaaaactcacccaagcatcgctagagatgaaacctgccaagaaagcaggcgcctaacataggacaaactacataaatcaccacctctcagcctgcaactgtccttgaattataaccttacatgtaaggtttatgattaatgaatggaccacaagatcgtcccgtccatgtgcgccgcatctaggattccttccaagctaggtggatacagtcaaaatgaaactattttctccctgcttcaataatgcaggtgcgcagaaaaatcgttatcttcttatcctcctaagagcaataagtaggaccactggtccaataacttgtcctcctccatcagtaaattctcctatccccacagcatggccaccgcagggctttacgtgagggcctctaagaactgagcaattcaagttctgatctaccccactaaaaatatctccccaataaaatatctcagcagacgcaacaaacgaacttaattgacccgcgattagcacgcactgactaagaattattataacatgtgctgtgtaaagtgggaacatgattgtttaatgtttctgtagatccaactaacaatgtaacagttcacatctagcatactagcatagttgtagtttcgaaaatactatgcatacgatttctgcgtacgattctagtatgatttctaactgatggtgaacgccgtgcgtgcatcactagaaaacaggagacaaacgttacgggctttcgctggaaatcgttagtcgtacaagtatcgtacgtgaaaaatcgtatgtgtagcagctctcgttatagtttaggcacacagtaaattcaatcaaactcagagaggaatctcatgattccacacaatagaatactactttagccacagtaaattcgatagaactcagaggaatctcatgatttcacacaataaataaagtaacacaagctcacaagcactactgctagacacgcaactccgcttgattaaaagcagcgccatcttaacctgagctttataatctcttcacagcaatataaaaatataaatcctgtgctgcaaattccccacaattatatcaatcttgtgctgcaaattccccataattgatgctcggataagctacttttgaacatgttcacgccacaagcaaccaaaaaaaaacaactaaattagcaaaaattagcgccagtaaccgctgcgacggcacgagatctacacaactacgcgcgtgctcagatccacccaaaaaaggccaaaaaaaaaaacacgaacagcacacgggggtgagtcagtccccctccctcaccttcggagatggcgtgctggatctcggagcacttctcgacgacgttgtgctcgttgagcccctcctcctcctcgatgaggtactcgctggcggcgccgccgtccttcccggcggccgcgccgggggacccctccccgccgcgccgctccgcggtcatcttcaccttggacaccagcacccactgcaccaccgcgaacgcgatgccgaccacggccgccgccgggaccagcacctgcgtcgccaggtccggcagtatcgccgccattgctacctgcgagatcctcgcgctaggattcatgtactctcctcttctcggaggaggattcgacgcgaagaggaggaggagaggagaggagaggaggtgggaggaggcggggttttataaggagaggaagggggagaagaagtgtactgtagtagtactactcctacggtggggaaggtggagggtattttcgtaatttttcagtcgttcggattcttgactaatttgactgtattttttagtgggtgatttctcgtgtttatccggatgaaacggagcaattcgggggttataatttaagctatttgattcaacggaaattcatataaattttagacgattttatttctataggaattttttctataaaactctttgaatcaaaggaatgaaccctatggaatcctatgaaatttctatgaaatgactctttcaatataagttttggaggaattttaacaagaggtagaacctcatgaaaaaaatcatttgagtctttatctcttctcaaattccggtatttttcctgtttttcctgtgttttacaatcctctgttttccacttacattctatcagaatcttatgtttttcctatttctctgtttttttattcatgtgattcaaaggggccctagtagtaccagtagtactttttataaacagtactagtactaagtgagtatggttttatcgtagtgatacgtagtgttgttttgagttgaagcacgtacgataggtttgtgggtttatcgtatcagcaatgaacatttgtatgaccttattttggcataaacgcgtaataagatcactggtctctcgtaaataatttaattaatcgtattgcatcagaattactttgtttctcaacttctttaacttttcaatatcaattgagttggttggtttgaactcctgccgttcaaacaaaccttgtactacgtctcacctaatctgacgtgtattagcgtgtaggaatactgtttttttttaccgtgttttaggataaggaagtggataatggataaacacaccggcaaagctcttccttctttcccggagatttctccctattttttttctctcgaatgacacttaacgaaaatattttactacgagagattacgagacgaagacatcggagtacgtgcagaaagcttggttaatttctctcgtacaccaactcgttgaataattcggcctaatagcctaaagaatgggagataatcatcgttgatcgaggtgatcttctggccggtgatgactcatcactgactcgactcgatcatgagttagtttaatggtgaaattgaccggttacagacatctggtttgaataacgaacatctttattttttctcatcaacctaaatccgcacacgggacacacggcacggtacaattttgactcgcattgttcgtgccgatttcgcgttaattacagtagtagcagtacaccatctccgttttaaaatataaaagtttctaaaattagacgtggatacttaaaaaaataaaattaaatatgagaagaatgtaattgttaagaggagaaagtagatgagtatttaaatggtgaaatattataatttgttgagacgagaatttaagtgaagaagttattatatttcagaacaaattttgaatattttggcatgagggagtagctagacagtagtagaactagtgtaggagtatagtcttaagaaaacgatagtactaatatgtcgtgatatattaagaccctctttgtttaggcttataagccaacttataagtcgaaaagtctaagcctaaacaaacaagcagcttttccgtttggcttttttgaagccataagccactctaacactattaagccaaaagctaggttgaagaagcttttttggcttatgtgaggtagatgtatgactcaaccactaaacttaggacattaaatccaccggcttataaatcatataagccaataaactaacttaaaagtctagaccaataagtctaagcctaaataaagaggacctaaatgtaaattagttccgggatcgacagataaaaagaagcataaatgatggacgaggtgagccggcagagcgaattaattccacgtggaacttcacccttcaatagtaattccatccattatccactatagtagatatcgcttttgcaaaagttagctgatgcacggcatgcacgctgatgtagcggcacttatctgagatgattgaaatgtcaaaaccagacctttgttaagtagattaagctattgtaaaatctagtacaggtaactagtaaatgtactgcagatgatggttataagtattatattcttttgacaccagtgattaaccattcatccctattatctataagcaatgcctctaagttgatgcaattttcagagagagaagaagaactgaaagctttcaccacctcctattgcagctttagtaagagtaaaaggcatctttcaattataaagagtggaaattactgtcaccaccaccagtaggtcgagtaaaaagcatttttcaaaaaaaaaaaagtggaacaattactgtcaccaccaccaatagactttagcaagagtaaaaagagcgtaattaatatctgatttaatctgtatggacatggagcccaaaagatgatgcatgcatggtccctggtgatagcttgccttacaactctgcacacacctacaatatgattgcattagcatgcagccaccagatggatgctttcatggagcaatgtgcatgcatgcatatttggttgttgttatactatactactcctactcaattatttggactctttgaagcatctcacaaatcaatgtcggtgctagagacgtgtaacactgaatatattttggaatccacttggagagctttgctgcagttcacacaaccatggatccatcaattatagctggatttggattaactattcctagctagttgaatagttaaatcaaagaagctatgtatgcaaaattaacaaaggccgggtttagttccaaactttttcttcaagctttcaacttttccattacatcaaaatttttctacacacacaaactttcaacttttctgtcacattatttcaatttcaaccaaactttcaatttagcgtgaactaaacacacccaaaaggtgtgagagatgtgcaagatcaagctcaaatggtatcctatacaacagagcatgtgcttagcttaatttaatcgtgtcttgttatgtaaccacgcacactagtactgtactgtactgtactggacagcaatttatttgagtattagtagctaggaagcagggggatcagtggttgttaaggggaagtagtgagaagagatgaaattaaaggatgtaatcacatgctgcatgctgctggtgaggagtaattattttacaaaggctgtcattggtttggtttgaaggaaacatcacttgcatagctggaattgaagcagtcgtcctaatattaggtagatctaggtccagatggaccagatttatgacaatttctttatacacattaagatacaaaatacaggcatgctgcaattatacatgacaaataataaggcaccaaaatagcaacctttacttctcttatacagaaagataatatgacacccacatatatccaaaccaaaataaatgccaattaaccatctccaaccttgcgaaaaagaaacgcttaactcaaactgctcaatgaaatcgatcggcacatgttcattaatatcagtgatagttttgttgctaatgacagcaggggcagatctacggttctaggaccgatgtcaggctacatcaacgactttcgacaaaatatataacaaaactgcttattcatatgttataatataattagcatactatgacaccgataggcacgttatgatatcaacgaatcgatttttccgccacttaatgacaggcaaaaacactacagataaaacaaagtacaatgaagctttcaaacaacctactggcgagcaaaaaacgttttctaaaatgataacacaaaaatttgtgatgcagatggcagtaccaatgaattcagaaatacagttggcactgagttgtaacttgtaatgttcgacaacaaacaacaattcgaatgcgactcggtggcgaatttgaaacaatagatccagccaacaaagaacaattcctgtagtatagtgcagctagctgtgcaaaagctttgctccataaatgcatattggaacacttcacatgtagttgggtgcaaggaaaattggatcaagaagaagatcccatttctcatgtgagcatatgccttgtgacttgtgagatgctagttaagtagtaacatgtaccatctcatagattaacacaaagtaaagcatatggttcacacttatgcatagagataatctctcacacacatcagcacacatccatggatggtaggcaggtctaagatatttttttccttgtttattgcatggatttggatttatatactaatcataatttaatctttttgcaatggtaggtgagacacttgatggtgatgttctgtctatactctctctagattcatgggagcaacccattttccatcacgatgttgccgacactttcttctctacaaggaagaataaagaaagatacagatggtaaatacagcacggcatacagatggtcagatttggagggaagcctaactgcaataattcgggttcatgtagagctgtatcagtatgactaaatcagcaagtcagaaactaagctgcttgggagaaaattttaaatacgagtactttccttgtcttctttagcggttatgaaagagagctggccaaaaaattgacaaaaaggacatgacaattgatcctaaaatcaaattttatgctgatgctttcccaacttcccaagcaggacatgtttttctacaaatgaatgaattaactcttataaagttaaaaaatagatttaaaatattttctaagaaattcatatacatagaaagtttatatcaaaatcgcaccgtttaggagcccacgcagcacgccactgaatggaatggttccatttcttagaaaataaggcagatcccattgtcttttcctatttgcttgctcctgttatgctccattttactgaagatttgagagtcaatataatggatggtcatggtctcatggaagaaaagagatcccagtaggtattttatccgtccattgtcagtactgatgagtagagtacagcaagtggactgaaggagcaattggtacagctcaattgctcaaatactatcttttttttttcttctaccactactatcttcatttgatcatttccttgtcacagccattactgctgctgcaagtggtctcctattttttatatattcttgtgaactttcttaaggaatatattccaggtttccagcaaaagaaaaaggtcaattgggacgaagaaaaggcagaaaaaaaatgccatgatcctttttgcacgtagcttgcatgggacgccatcgttgaagatgatatctttgcttgcaatggcaagctcggaccactataaacgatcagggtcccatgcatcatacctcctccaatcccccaaactcagacgaagatgacgatgacgaggccatttttgcgaaagaatcagtcgaattggctaaaatacaaatgccaggagacaaattagtccaaatccaaattcaaaatgatgggggtttgtgtctggttgttagaatttgtcttgtgttcttgattcttcagcacaaaaggttgtgtgattctgtgaatgggacacatcattttcatgaggtgcaaggtaggtgtgatctggttcaggcggctcctggttcttttggtgccttatctttttcaggccattggagagcacaaaatttcccatggttgtgacttgagtgtgaccagttgtgtgaaggtatgtagtgagactctgagagtatgcatggattgtactctagtggaacatgtcccatctggtggccacatgctactagcctagtatgctacacaagtgtcaaattaagcaggatttcaatcaaataattggtttccagctttctttcggcttaaaatctggcaagagttgtagtatagacagatacgtagacatgttaatcaagtgaagagcaagcaagcaatttgagtcacctgcatatggacatggcctaatgtttatcaagtcgagagtacatcataacgtcatgtgactaatagcaggtcaacatcaagtatgagtatagctatagttgattcaacaaggcgtgaaatatacgaacatccaaaattcaacacacttaactcagtctgggctataataattcaataatgcatcgctacttcagttagattcagaaggttctacccccacaaacctattacatcttaaagtacaataaaaatggagaaagagtttccaccttgtgctagggaaagattctattcaagtgtggtgttcagtactgctcttcatcccatcataaacttaacttaaaccatgcagtatccccgtgtagtatgtctagctgtttgctcttgctaataggccagagaaggatggaacaggggagttcctcatttgttcttgagcttgctttatctcctcgggatcttcaagtgtaaaacagagacagtcaggtagaatacatacataatatcaacaagtattataaggtaacatttattaaaaatatatacatcattcatatcaccaaataacataagctctttcagccctttcatgtcagcagtacataaatattttgtaaaatgcgaagctgattaaagaaacaaacagctaacccacaaatgttttgctcaaggagctcaagaaaggaaccactgtaaaaacatatcatagaatgaagcaacgaactgtaaataaaaaactgagaaggtacataacaggagtagacaatggcaactaaaaatatacacaaatacaagctaatttaaaaacaaaaaggcacttttaccaaatatatgctttttaccattatcttgcatcctaactacagtgatggtgtgggtattaattatatcgccttgctactttgtctttgcatggctgatttgttcttgattagatacagaaaagcaacgtaattaggtaactataatatgtcatgcttgtatgctgcatgcggtggagccccggcaccagactaggttcgctgggccttggctccacagctgcgtggagcaaataatatgcgacaataatctgatgagtaagcagaaaagaacggggcctaaatttacaaccaatggaacagaatgagagatgtggaatgaacaacacaattaaatgtaatatctttctgcaaaagtatgatacgagctacatggtgcaaaatgtctattgggcttgaatcctgttctgcatagctgctacttgtgggcacaaaatatagtgtaataactattacattataactcaaatttggacataaaaggctaaaagtgtgcagcatacctatgttctccatcattttgggcataacgaagaccattatgaccataaaaccaagcatcatacccatagggctcttcaaaagtgacataatggagaaaggctcccttttctaggaaaaagaaggggggaaattgactgcttattaaatattatacaatagaaagtactgaagaaataagaaacatgaggttagtattagtcacctcgtagtattgctcttctctgagaggttccaacacaagctcatttagaactcttctgttttcagtcaatgctgcttgaatgtgcccaggattcctggcactgatgtctacccgaacctatcacccagcataatagagaatgaatcttgatgcccatttaacccatgttacagaaaaaaaaatgactaatgaacacttactggtgaaaataagtagcccaatgaggagacctcaattaaatgagtaccagctggcacattgtggcttaagcatatcatgtcaaggaggaacaaaaagcaacatagtatgctcttctaacattgtggcattgctgcccacaaggaaacattggaaaaaaaataacaaacaagaatactacaacaacagagctagatttatttctattagcaacccagaggctatatctaattttcaggaataaggctacccataacagataggaaatgtaagatatgagacatccaacaatagagcaggctaattaaatttaatgaaaaatgactaatttccctaatccgggaactcaaaatggagctgaaaggttgtaaacatatggttttgcagattttgcaggatacaatgcaaagtagccatctggcctggcaaatgtaaccctctgaccaccgttaagtatcacttttgtgtttgatgtcttggctggaagaccaaagccctttgcaattgcacttgcagctataagcacataaaacagaaaaaaaaaacgacatcaactggttatcattataataattagtacaatttggcttcacgggtatggaaacttaattccagataaggagcaaatgcaagatccctgagtgcaaagaaaactaagacttgccttgacaatctgagttcacatgaaatatccagcactgaaaaacccatggttctatccacaagctaacaatgttttcagcaagagaaaatgtaaaagttaaaagcggtctgaaacactatacagcagccatttattattgtggtctgaattatttcaataagcatggttgggaaacgtgggcttcaatgctcatgccaagttgccaacatatctatcgaacatgttgtaacgcaggtagagactcgtcctagaaacaaaaagtgccggataaactatgatggcaatcacaacagtacaacacacggtttttgcaattcaaaattccacgaaagctcactttcaaactcttgtaaaacatagctaaaatcatcagatattcataatcaaataccccctgaccaatgaaagctcagctaaaatcagtcaatacgaataccaactgtcatctaagcaaaccccatgagactaagtaaccaaaaccaggggctcatcgaactgtatcagtgcatgatctgaaaaacagcttgcacaaatgcaatgaattccacgagtgcctgaaaaatcactaactaaattaacaaaccctcaaagctgctaagtagtcgatagctaacaaagttggctagcgctggcttgcgctaagacggaactagatgagctcgataaatagtgtatcaaatctcgttagtcactaccttaagtacaaagttagggacactttaatcggcagatctcgaaaataattccagcaaattgaccatagccaactatgaaatcgaatgttaaaaaaggcttttatccccaaacaaccctgacacacaaagatatctgatgcacctaagctacacgagtacgatccccaacgatccgagcacaacaacaacctcaatgcacgcatctggcacaaaagctccacggaattcactcgagccatagggtgagaatagccggagactaaccatcgatcttgatgcggcccgcgatcgtgtgcccctcagcagatctggagaaccaccaaagcgagagccgtggtcaactcgcggtcgatttggattggatcacggagcaaaacgagattgggggtggcgcggcgagggggggacatacccgggctgataggccgccgctgcgcctacgcgcgctgccacgacggcgaaaagtacgaggaggaggaggcgcgcggccatcgtcgcggcggaggtcgtcgtcgccgccgtgctcgtcgcggctgctcaactagacgaggcgaggcgaggcgaggcgagagagagatccccttggacttggtggatttggtttggtattctcgtcgcgggctttcctgcggcttgtgggcttcgcgagcttccattttgtggggtttattacttggaataagtccacctagactccccgatatataggttaaatctaattcacgcccctcaaccgtaatacggatatcttgatccttaactgttaaaaccaatgtaattgactcacaagatagtatttataatggtatttgctaacgcagctcgtattcacatcaataccactatgaatactatctttagagtcaaattataacggttttaataattgagatgtcaagatatatatgtagcatatcttaatactagcaaagtcctactacttaaaaaataattagccatgaaagtctaagatttgagttcaagtaaataagtctcattacgaagaatctagctagataagttacgctgactttagaaaatcaaagttgtttattgccgaacgaaaattagattttacgccgttttctccttagattgttaaaagaacagctccatatgataaaaggataaataaatcgattttgatggaggcatatgaagctggcctgatttccacccatgccgatgacggtaggggagcggtatggcagtgacttcaaagtttgttaggtttaacggacaaaatatattgcatcatcttgccatgtcataagctactttctcaaatataaaaatactaaatctatttggttggacgtgactacacagctaatggtagctggtttgtttaaatcagctaccactccatctatgagagatcatattccacctatacttcaaataaaattttctcttaaactactcatccaatctacgatccgattacaccgttatgttcgtaacaattaaatctttataacaagagctcacatgattatattttgatgaaaaattataaattacttttataatatatctaaattacttttagatttcactaaattacttcttcgacatataaaagtaaattcaataaagcttaagtaatttacatatattataaaagtaacttataacaaaaataaagtaactttaatgcattcatttttttttcattggacgtgactacacaactagtggtagctggtttgtactccatctagtgtttcctttcaacttgaaaaaaatgcaatagtatgtttccattttgttttaagatacttttataatatatgtaaattacttttagactttattgaatttacttttatatgtctaagaagtaacttagtcaaatctaaaagtaacttatatatatgataaaagtaacttatgtatataacaaaagtaatttacaaatataaatattttttcatcgtaatataatcatgtaagatcttgttgtgaagatttaattgtaacgaatacaatggtgtaatcggattgtagatcggataagtaatttgagagaaaactttataagaaggaaggaaaagacatgcatgtctaagaggaaaaacaagcatgcacgccagcacatgtagcagttcttctcacaaattggtttgtcgctggttaacgctaaaccgataggcttctcggtttagattttgcctatttggtttatctttttaaatctagattccatgattggctcaaacaagtgcgatgtgattggcctttggtagccaaaacataacctcaatatgccaatcaatgaatcaaacaatcctccagatttggtatcgtggtgtgtcgagatccatatacttccaatacttagtaggagtaactaataaccataaattttgttaaaatatattgaaagccttgtttattcaaagttaatacacatcttgtgagctgttcgcacgagaaagcattcgtgtggttttatcatgatactaacaacacatcgaggctgatgcacatgccatcgatataaacaatactaggtgaaaccccgcgcattgctgcgggaatttagtatgataaaaaaaataacgtgcaagataactagataacatcagattaagtaaattaatgtggtttatgataatttaaacttaaatagtagaatggtgattcaaacgtaaaaagtaaggtggtatgactttatggaagaagaaaagtagggagatagtttggaccgtagattaatcatctaaaggctaaaaacaattaatgtgatacgacttaattagaggaaaaaggagaaagataatttggaccatagattaatcatttaagcactaactaaatgaggacttatataggatatcataaaacataataaagatatacattgaaacattatgtgaattatgttgtatgataatttaacatgtttgtatttgaaaagctcctaaattataaaaactataaagatatagcatgtttgcacgatgtttaaacatgatgattgttagtggatgatgatgtggcgtcttgttaattagtgaatgatgatgtggcatcttgttagtggatgatgatgtggcatctttgcatgttaagcttaaggagttagtggggaataactttatagtaaaataggatatgtgacaaataatttgacaatagaaaattttaaactgtaattaattatatgttaggcaattcttgaattgattacttttaaaattatatcattaattgctaccaaatactccatccatcccaaaaagactcaattcttgggtttccgtgtccaacgtttaaccgtccgtcttatataatttttttttatgattggtgttattattattgttaaatgataaaacatgaataatattttatgcatgacttatgtttttaatttttttcaaataagatggacggtcaaacattagacgcggaaacctaagttttttttttttttggatggagagggtatttcagtaaaaaaaaccatcaacaaccacaaaagcaaaccgtccatccaacctgtattgcaaacggaggaaaactggaggagcaggctgaaaaaaggaaaggaaaaatactccacaataccctaccatcacttgaaaggagcggtatggcggtgacttaaggtttgttaggttgaagcaaattccatcatcttgccatatcataagtataactagagcggtagcacaattcatcctatagattccaattccatcatgactcaaacaagcgcgtgtgtgattgccttttgctagccaaattgtggttttatttcattggccaaaactgtagataagttaaggcatacaattattataaatattgacaacctcagtataccaaccaaacaacagtaactaatgcctgccataattttataaatatctattgaaatcttaagttaatacactgctacaagttgattacataggaaaactattcgagtgatttcgtaaagaaattagtaatacatcaaagctttaaagataagagattgacacacaaccgataaaataatatgattatagaaatttaattctaaaattataaattagacatcttttgagctaaatgattttaaaacgatcattaattgctactacttccatggacggaagtagtaacagatatttagatatttcagtgtgtccggtacaaaaccatcaacaaccacggaaacaaaaccatccatccaacccatctcgcaaacgaggaaaactagcaactcgaactgaaaaatgaagatactaccaatcacactactatgttatttattttccaacccatctctcttctttctgcgcacacgtttttcaaactgttaagcgatatattttttaaaaaatatataagaaagttgtttcataaaatttatattaatctattttttctaaaaaataactaatatttaattaattatgcgctaagtaggaaaggtcccaactaacagccgtctcgtaacaccaaacatgatcctctctctctgtctccgtccccaacccagcgcgagacgatcccctcccctgcacggtaagcgaatcctcccaccctttttccagcttcgcttcgaatcatcctcctcctcgtctcgacttcgaatcagtagatcctctgcgatcctacgctttctcctccattttctcgccaccaccgtagtagacgagccgtgcggtatacttgtactacagagtttgcttccgtgaggtgtcagctttgctacgccgccttcactcctcgcctccgctggtgggtggtgggcttctctcccgctcgccatcctctccgtcgtcttcgccggcgaggcggcgcggcggcgcggcccccattccaccggcgcgtccgtctcgggaggttcgaatcaggtattcgtttcttcctcctccgcgcttcgcttggtgagcgggcgcgaggcgtggattgaagatccatccgaacttggggtgtgcttggattgggtgccctctggtagtacagcgccatagctgttcgtgtttattctgtacgaatctctgctggttgtaccagggaggtccaggacgacacaccatagccatgtggctgattcatgtgcacaatttttttatttttttaaaaaaacgtttaatccctcatttcgagtattttctgtggtcatactcgtatgaatctcaatatctcataggtgtttgttttggtctcaattgaacatgtaacaggttcaaaacggggatcggtagtgttctgcatcagtgatgggctggagatttgcgttgttactgttacatgttcttctgtgccttgtcaatggcgtctcctgtggccgcacgagctcttacgtgcgtacggagtacccatcgactgatatacctctagaaagcgaatggtttgcggttccaaacggctacaatgcgccacagcaggtatctaaactcttctgccagatcagttcattgcaatgaatcgacggtgttttaattgattggtctgctgccaggttcatatcactcaaggtgactataatggaaaagctgttatagtatcatgggttactgtagcagaacctgggacaagtgaggtgctctatggtaaaaatgagcaccagtatgatcagagagtggaaggaacagtaacaaattataccttttacgactataaatctggatatattcaccattgccttgttgatggtcttgaggtactagacttcattttcttcatatcgtttaggctttgcattttatacttgcatacaattgtagaaatatttgtccaacattatgtttacccatgcaaaatactaaaatagaataacctacaacatcatgtttcctttgtaaacagcttagacatattctaagtaactatcacacaaccttctcacttataattccataatgatctactttagctgtaaacttagagttattatgcacaaatttgatttgacagagaacttttcttcgtcaaatttcaattgagtaaggttatcatgttgaaacacgatgctcacctgcacaaattattttcacacactttcttagttctgtggaatagttctactattctagtatgatgcattaacaaaatactctgtgtgcacattattttgttgttagttccaatttaaaattgtaaatatataaaattactatattgttttgcagtataacaccaaatattattataagattggaagtggagattcagctcgagaattttggtttgaaactcctccagcaattgatccagatgcatcatacacatttggcataattggttcgtcttttgttttctcaagtatttttttgttaacagcatgtgtcatcgaattactttggatctctgcaacatctcttctaggattttacctaggttgcatgagtcatataagatagatctcaacaagattatactatcagaaggactggaaacacatcctctgttcttgtcaaacatcctagctttaggataagggaatacatgaacggaaaaaatggggatcaatgacttcatggaaagaaccactatgtcaagatatggttatagtgtccgagcttgttgatactaaagtcttctggctgtgctttgctaggtgatctggggcagacatttaattccctctcaacccttcaacattatgagaaaagcgaaggtcaaactgttttatttgttggggatttgtcatatgctgatagatatcaacataatgatggtgttcgttgggattcttgggggcggcttgtggaacgtagtaccgcttatcaaccatggatttggagcgctggtaaccatgaaattgaatacaggcctgatctggtatgttaacattcttctcatctatacaccagttgtttttttttaccacatattcctctgattggaagtagtgatttctcgacattttgtaaactcccaacttttttggatttttccttgctttagcatgttcagaagaggacaattacaggcaaataatactgaagaaaatagatatgtgatctatagatctttgtattagtttattttttcttatagctggctgtacgtggatttacacactgacaaggatctgtgcttataagctactccgtccgtctcattttaagtgcagccatggttttccgcgccaactttgatcgtccgtcttatttgaaaattttttgaaaaaattaaaaaccataagtcacaagtaaaatattattcatgttttatcatctcataacaacaaaaatactaattataaaaaaaattcaaataaggcggacgatcaaagttggacgaggaaactcatgattgcacttaaaatgggactgagggagtaataacttatccattgttcagaataacactgcagttccacctgagcattttaactagctgacatagttgtctttctttaaccctgaccgcattcgtatttatgttttcagggagaaacttctacatttaagccatatctgcatagatgtcacactccatatttggcatcaaagagcagttctcctatgtggtatgcagtcagacgtgcatctgctcatatcattgtgctttctagctattctccattcggtaagataaagatcctttctctgacttgctttgttttgtatatgccattaagtctgtacaaaccaccagatttagtggtggcggctgtggtggtgatagtgacttgggagttccaagtgcttcacgtagttcaaaattccaagtcaaggaggggcaaaagtagcacttcttagacaaaagaaattatcgtgttactgtcttcttgtcttcttactgatccaaatgtgagtatgacgatattctttatctctgatgcggatggatagaaacataaagtcttctctggtttgattgaaagtttgaaactactaataatgcaaggttccgcgttccagctgtttgaaacctgtaacattgtgtggggacaggcatggatgctcccttgaatgagtgcagatctactagtatctttttttcattggcgtaatatcctgaccatcatctactatatttagaagtgattatgtgatgcatgtatgatttgatagttggatgattcttttcattgaatattttgttgtatgccttataagcttatctctgatgtttaccagtaaaatacactcctcaatggacctggttgaagtatgaattgaagcatgtggatagagagaagactccttggcttattgttctcatgcattctcccatgtacaacagcaatgaagcacattacatggagggtgagagtatgagggctgcttttgagaaatggtttgtgaagtacaaggttgacttggtatttgcagggcatgtgcatgcttatgagagatcggtaaatatttacttaattctttggcacaagcttctttgatattaaaaaaaaagagctgaatttggtctgaatctcgtaaagttatattttgagaattgaccagaagaaattatgctagcctgttatttcatttctagtcgaagagctctgaactttgatttttgtttcctcgtaagtacctttctatatgtctatgtttgcagtatcgtatctctaacatcaactacaacataacatcgggtaatcgatatccagtgccagacaaatctgctcctgtgtacataacagttggtgatggaggcaaccaggaagggcttgcttcaaggtaaaggcaaatgaatttatagcggaaaacatactatttgtaatattgttgtttacgcactcctacggttcactcattgttcaaaatcacggtgttgcaggttcagtgatccacagccagactactctgcattcagggaggctagttatggtcattcgatcttgcaactgaaaaacaggactcatgctatctaccagtggaatagaaacgatgatgggaagcatgtacctgcggacaatgtggtgtttcacaaccagtattggtgagtgcagtgatcgataacgcttcaattgttcacaacgctcattggttgcccctgttcgtaatgctcactgaagctagtgatttttttttttgaactagagcctgtaaaggcccccatttcttttactagaaatgatcacattacaaagtctgactgaagctagtgatatgcagaccttcactcttatttctagtttttgttgcctagatagctgattaaaaaggacattgtttggcagggcaagcaacactcgccgcaggaggctgaagaagaagcattttcacttggatcaaattgaggacttgatatccgtgttctaggagttgatctttcagaacactgcatcgcagactttctgaaacggtggcggaatagctctgttgccctttggtcttgagcctcgaccgagtgaggcagaggctctcggctctcatgtaaaggaaccatgcacaggtttgtgggattactattattgagcactgtattgtatgatgaagacaatccgatcagcagatgattagtgctgtacacatgtagcatttcacagccagcgacagtttcgcaatgtgacagtatcttcaataaagtttcaaagggttgtgaaccgagattgcagcattagctgccctctgttcgtaaaagatcttatttctaactatgtatctcgacattaaataaggtcttacagggactgaagggcgcatatagctagaattttccatctaaacgtcacactatctgttaaaccatggcagcttaacccagaaacgaacacaagttaacaaatctcaaaagttaaatggggcgcatttttttcaatttgtgacatcatgctattttccaagtataggtgattaagacaaggacgggtgacgaaaaaaaaaaaaagaaaattccgttctctcctctgaacctgatcctgacatggacgtgtcctgtggcgataagaatcgttaggtcaactgaaccattcggaggcgccgagctggcccaatcccgcgaaggcataacctcatcgttgccgttgcctttattacgaggaatcgataatatttgcatgatcctattcctaatcgacctgtagctttcaattactaagtttcaacgtctctaattaattcgcgatttgcagctgagcaaaaaaacatttctccgttagtcatctgacgggttgaccatcttccatttccatcgacttgtccaaatcatcaggcgttaaaaaggacaaatcaaaatatgcctggcacggttttggcttaaaatccgaagctggtttaaattttaactttggtctgaggattattaatgttgggtgttccttcgccacttccattgcctgcctggctctcttttgaattatttttaggaaaaatatattcaaaattagcttcaacttttaatccaaagacctatgccaaaccgttggatcgaatcttccccacacttcaaaaaaataattcaaaagcacctgacctacttcgtgttttacaagcaatgccacgaacagtacgtaccacacgttaggagaatcccatcgcgaacacccattggcagaaacaaaaattaaagaaagttctactaaaaaaaagaaagttctactcaagagctagccaaagctccaactgccgcgcacacacttaactaacaaattaagctcgagacgtactagatcacatatctaccatcttccgttcaaaaaaaacatatctaccatcccaagattaaccaaccaatctactatataagtaatctacaagcccttcctaagcctaacgactgctgtaatattcggtttaggggataagatcagcagtagattacccataattaaactaatctgccgctgatgctgtcgctgctgcacatggctaggtcagcggcaaatgatactaattagaggtggggggttagcagattagcgctaatcaacaagctggccaaaccagcaaaaccaaccaaccaatgacgcgtcgcttggcacacaggaaaaggcgaggagagaagggaagggtcggagacggtgggtgacaccggatggagaccgagctatagcgctactggcttttgcaactccaagttggctggtaaacaatggcaaattgggggaatatctaaagaggaggaggagtggcgacgcgacggcgacggcgacggcgacggctggctgtgcctttccctttgtgtgttgtgtccactggtgtgtggggctcttgggtttgccgtttctctccgccacttccttggcgccaaatttttgtttctttctctagaagttttgttctctgggtctctaggaattgtatatttgttatggtcttatggaagcagatttgaagtgcctttctttctttcctttccttttttttttggttcatggtgatgataaactttattgtaaggaaatatatatggttctggaccatatttagacatgttggtttattggaccatattctagagcctacatggaaacatactttatccggttcaaataattttttaaagtcaaatttctttaaattttaacaaattcatataaacatgtagtaatatgccaattttagttccattgaatctatttttatgctagaaatatttattgaagcacgtaacaatatttgtttcgtgttgaaaatgctatatttttcttaaaatttgttcacttcaaataatattaactcatggcaaaaatcttactatgtgcaacaaaaacaaataatacaactgacataattaaaaaccatcgctatagcatacccactccactgtgacgagccagtgagcttacaaggttatccccttttatcaccaagccccgttgagaatacacatacgggaaacccgcgacgaactacggttgccattatatgtcccacagcttataagccgttgctaaagtttaaattaaaagttaattttaagatttttttcatcgtagtttatttttcatcgttattggcttttaaatcactaagggtgtgtttagttcacgctaaaattgaaagtttggttgaaattggaacgatgtgacggaaaatttgaaagtttatgtgtgtaggaaagttttgatgtgatggaaaagttggaagtttgaagaaaaactttggatctaaactcgggctaagaaaatatgtatgaaagtttcgtcctcaaaatattttttttgtgtgacttatcataatcagcattaggccgaacgcattgcccttagttcaaaaatggtgggtgatgtgtgcaatgttactttaacatccgaaaacatttgcttaaagacgtagctttaagacattcttagcatctagaccgaatagaattgtgttctttgaagccatgaaagaccaaacttatcgctatcaagctaacaacctcgcattattccatatactatgatatgggagtactaatccatagttgaccaagactcttgaacaataatattatctggtctacaaattagactcttatttgagctctttcccttttcttaattcaaggcagggttgccctaaaggtcaaattcaattgccatggagaaggaaaaaatggaacaggtgagaaagtaaaagatgctgctccaacagtcctatagaacaggtgaaaaaaatgtattattatgtcttacctggaaatctggaactggaaactttccaaatctgtccacataagctaggagaaagattccagtgccatgtggttatagaacttttagagcatcaggtgagtgagaaggtggatcatggttagtgttaattaaacacacacatatctagaacaaaattaatggtatcaaagcaaatgccatggcctataaagcaggcaatagaccatgaggctgtacatataaatgaatgctcacctagtcaatcaaacaagctgtccaaataacacatcatttttttaggagaaatgatttcaataattaatgcatggcatattataattgttttgaaataaatgcaatgcaaaagttgaaaaaccagtcaaaaaccggacaaacactcgcttgtaaccatcgtggctaataacataccatattatactctgacaaacgacaaaagttatactaaaaacctttctaattttattacaatatcgtaaaagccatgaactcctacacgagttttctttaaggtttttggattcactttaaattagtctgaatttaaacaaaacattctcaaggttttggatccaaccctcacatgtaagcaaggagaaaaagacacacgagacaggttcctgaccgttagatcaaaatccaacggttaacatcggacaaaaacccaagtggccaactgcggttggggggcaataaccacgtccgatttattatttccattttcgattccatttttcgctatttatttcgcatcgccacctgttcccttttctttttttatttatttatttgccaccactttgccccacacacacgcccacgcccacccctcgtcgcctcgcctcctctcgatttcgccggcggcggcggcagcggcagcaaccgcctccgcctcgccgccggcgggggggcccccgcgcgcgcgggcgggcgcgatgtacggcaacgacaactggatcaacagctacctggatgccatcctcgacgccggcaagggcgccgccgcctcggcctcggcctcggcggtgggtgggggaggcggagcgggggaccgcccctcgctcctcctccgcgagcgcggccacttctcccccgcgcggtacttcgtcgaggaggtcatcaccggctacgacgagaccgacctctacaagacatggctccgcgtacgtccgcgccgcggtcctgcctctcctctccctccgctcacgcgcgccgcgagcgaatctcccggctcgccgcgcgtgaatttgcggatgttttttttttgttttttttgtttttacccccgatctgtgtgttgaacgggaggcgtggtgtcggcgcaggcgaacgcgatgcggagcccgcaggagaagaacacgaggctggagaacatgacgtggaggatctggaacctcgccaggaagaagaaggaggtgtgtgtatgtgcccttcttttttttttgtttttgtttttggttcgttgcgtcttctccgtagcacaagttcttcggttttgtgattgggtggggggagcgttggtaaaatcctgtctgccgtttccatttgggttccgggcttgttctggtttagtggagatgtggtttgatttagtgtgatattccgcgtaggaaggactaagggctggattgatcttggtatgcgttgcatttgagagagcacatggatctgttcgagggaatgcgttaacggaatgcttattgatctctttcccgtctcctctacgaatttgctgaggaaatggcatgagagttctgacataaatgtagtagcattactgcgtacctgcaatgctaggtagattctcggcccctatcagtttcgaattgtgctgggacaacatggcacggctatatataattgcgtgtgctgttggataatatgctaaattcgctgtcaccattcaccattatatggactccagctctttccatctctctctgtctggttactctcttagtttgttggatgctggtaccctgcagaagaagctagcagggattgcgacaaatagtcattacatattggttgcatagacaccacagtcaaataggctgcactgaagctttctactgggcaatctttcaaatgcagtttagttttgtttgctttctacgcgtgaaatagatgacaaaatgcagtgagagagaaggttgaagaccagtgttggagtgccatagatctagttggatcaatggagccaaagtatatgttctccattgttggagtagactgtataagtttcgctgataagggaactatctgcttttttagtgaaatctgtagtaattgtgtaatgcgcactcaagccagttactacctactacagactgcagagtagatcacgtggtgttcaccaatacaactttttatacaaatgcttcctgatactttcatgaaagtacctttgttccaagcagagaatgacacagagaatcgtgtactgaacctcagggtttgagaggagtgcgatgtgagtcatcaaaaatatccagaaccatgcattttatcagaagagaagattttaccataggtcccctgttttttcccttcattttgcacagcaaacacacacattctgatttctttgctcaggtatgacatttttacttccatatttagttctaccactttgttccatcctttgaatctttagaaagcttgaggtagtgtcttattttgttgaaggtgacatagacaaagccagtcttgatcaaaacggtctgcattcagaaaccctcccattatcctctgcttctggtcatcattgctatccacattcaagcaagcaaaactgcacagttctattgacacctcctgcaaacccattatttggcttctcttatttttcctctaatttgcattttgattgcactgaggcttggcaaagaaagaacacatacaaatgataatgttgatgactttattggatgcgtttgtggcaacactggggcatgggtgatcactcagtgtgcatgtaccttacaacttatgttgatttctcatccacctcatccatgacagtaatcaagtgagctgttgactcttgcaagtgtgggtctttgattgaataaattggaatatgtagccaagtaagattcacattagaactagagcggcaataaggtgcgtacagtacagttgatcgaaacaataccagattgtttcttatgtcaatatttagatgctcaaaggtcataccaacgggaggaaaatgtgatgtgtttcaaaaaataaaaataaaaatgtgatacatcactaaaagtcgtatgctcacttgttgatcatttacttgtcttttggttttcaatttgtttcattcatctaacatgctggataacttctaacttcggtggaactatttttcttacagaagagccttctatatcaaccattgtacataatgaactagtgacatatatcagtagtcttattgctattgtctagtccatatgttgtttgcacatggcatgctctcacaccacctatttcttgtactaatcagttgattgatgcattgtcctgaggtttgaattgttccatcatttaaagaaaataaaattgccatttttaattgtgccatctcaagttgtcagatttttacatttattcccaaaactttcaccttttgacacctttgaggtacattagatatattacattttatataggaatatttgcactgagcgctgatgtttctttcacttctaatatgtaatccatgttggtcctcaaaaagcaaagtttccctttccaatttcagttcctaagttttgtacctcttccgtttttgtgcatttgtttatttctgaattattttcatgctcagttggagaaggaggaagccaatcgcttgttgaaacgccgtctagagacagagaggccacgggttgagactacttcagatatgtcggaagatctctttgaaggtgagaagggagaggatgctggtgatccttctgttgcctatggtgacagcacaactgggaacacacctaggatcagttcagttgacaagctgtacatagtgttgatcaggtacacagtagtttctttaatatcatcatattgtatccttttaagtcaatgtgcagtgtaggttcttggtacacgtaaaaccctgtttgcaatcaattcatatgcactgagctgctatttacataaaatgcaaacatgacatagctaaaaaatgacctagaggaaatcaacattgcaaatttagtgtacaactgataatcaatcccttagactcagaattagtgataatacctctttctcctattttgcactttgatatatgatgaaatttgcaggtttgttggtatgtatgttcacatgtattggccttataattcctttatgatgtattaatactgcagccttcatggcctggtccgtggtgagaacatggagcttggccgtgattcagatactggcggacaggtattgtttgttgcatgtgcttatatgagatatgcattccgttatccaacttgaacagctatacaatctagctttatcctgtagtcaagtggttgttagctattatctttattctgtcttacataaggtccaccaacacgaagaatctgtatggaaataattctttatgcatctgttgtgtcattgcataggtcaagtatgttgtggaacttgctaaagcattgagctcatgtcctggagtttaccgggttgatctttttacaagacagatcttagcgccaaattttgatcgtagctatggtgaaccagtggaacctttggcatcaacaagcttcaagaattttaagcaggaaagaggagagaatagtggtgcatatatcatccgaataccatttggaccaaaagacaaatatctagctaaggaacatctctggcctttcattcaagaatttgttgatggcgccctcagtcatatagtgaagatgtcaagggccataggtgaagaaatcagctgtgggcatccggcgtggcctgctgtgattcatggtcattatgctagtgcaggagttgctgctgctctactgtcaggagcacttaatgttcccatggtctttacagggcattttcttgggaaagataagttggaagagcttctcaagcaagggagacagacaagggagcaaataaacatgacatacaaaataatgtgtagaattgaggcagaggagttggctcttgatgcatctgaaatagttatagcaagcactaggcaagagatagaagagcaatggaatttgtatgacggttttgaggtcatacttgcaaggaaactccgtgcaagagtcaagcgtggtgctaactgctatggtcgctatatgcctcgtatggttgtgagtatacttatgcatcataatcttttcttttttcactccgaaaatagtcaatggtaactactgcacaattattttcataattgggtaatttgctgttataatctgctgtagaggtttaatgtgcattagttccctgttccttgttctgcagatcattcccccaggtgttgaatttggccatatgattcatgacttcgatatggatggtgaggaagacggtccatccccagcctctgaagatccatctatttggtccgaggtcattttttcttttcttttttagattcatacatgcaagatcccacctactagttcacctaatattttctttagaataaaacttagtagtttgcacatttaatatttgagaacatttatttgcttattcatgtttatcctgcagttttaactttatgcactaataatttgtatgggtggcagataatgcggttctttacaaaccctaggaaacctatgattctggcagttgctcgcccttatcctgaaaagaatattactactcttgtgaaggcgtttggtgagtgccgaccactgagggagcttgctaatctagtaagacaaaactgcattttgatgtcttaatttcaatatcatacttattatgcattaagtttgattgctgctattaatctgaaacgtccttatatttaattagtactaacttatgatgttgcgttgcagacattgataatgggaaaccgtgaggctatttccaagatgcataatatgagtgcagctgttttgacatcagtacttacattgattgatgaatatgatttgtatggtcaagtggcatacccaaagcgtcacaaacactcggaagttcctgatatttaccgtttagcagtgagaacaaaggtgtgttatgtctgaacaaaagatattcattggtgatggcattcttatctttgctttgaatgtctagcacttgaagtagaaaacttgtgaccaataaattaagttgttcaaatggctgaaggattcagtatctgtttctttgaagtcaaaatcttatagcaaagatttgtaatgtttgtaggatttacagtacttctttagcaatttcctgtaccggttatattgacgctgatcatccattgaacatctgcagggtgcttttgtaaatgtgccttactttgaacagttcggtgtcaccttgatagaggtcattatcattgtatctaaattcagcttgcttccattactgaattttgtatctaattaacaccaatctgctattttcgtgagcaggctgccatgcatggtttgcctgtaattgcaacaaaaaatggagctcctgttgaaattcaccaggtatctgagcatatttattgtgcctttgttaaacttagatattttttacctaggaaagtattatcaactactagctgggatgaagatcaccatgtcttttccatggatgtatgcaggtgctggacaatggtctccttgttgatccccatgatcagcatgcaattgcagatgcactctataaactcctttctgaaaaacaactttggtcaaaatgccgagagaatgggctgaaaaatatacatcagttttcttggcctgaacattgcaagaattacttgtcaaggatatcaactcttggcccaaggcatcctgcttttgcaagcaatgaagaccggattaaggcacctattaagggaaggaagcatgtcactgttattgctgtagattctgtcagtaaggaagatctgattcgcattgtcagaaattctatcgaggctgcacgtaaagaaaatttgtcaggatcgacaggttttgtgttgtcaacttccctgacaataggggagatacattctctattaatgtctgctggcatgcttcctactgatttcgatgctttcatatgcaatagtggaagtgatttgtattatccttcatgtactggtgatacaccaagcaactcccgtgttacatttgcattagatcgtagttaccaatcacatatagagtatcattggggaggagaaggtttaaggaaatatctagtgaagtgggcttcttccgtggtagaaagaagagggaggattgaaaaacaagttatcttcgaagatccagagcactcttcaacatactgtcttgcatttaaagtggtcaatccaaatcatgtaagccttttccttccagagttcatgatatttggttggaattgtatttctttatatattctatgaactgctcaagtgcatccttttctaaaaagggtttaggtatattgttttatagcttgttagatgcaaggtttttcttaattgttgtttgtttatgaattgtagttacctcctttaaaggagctgcaaaagttgatgagaattcagtcactccgttgtcacgctctgtataaccatggtgctaccagactatctgtaattccaatccacgcatcacggtctaaggctctaaggtttgtttgattttcttattttcctcattcatttatctcttctgttcttaacatgttctgatgtaccagtattgttgtggttaacattttttctgaacttggctcaaaatgtggggcagttttgcctgtctgatcttttttgtgtgggttacgatcaatacttttccatagaagattaggtatatttcttggcctcttgggtgaggaaagactatattccaagtctttgtttgagaactccaattttacagaccactgaaattcaagtttccatggcttcctactccctccttcccaaaatataaggtattttgactggatgggacacattctagtctgtctatattcatattactaggatatgttccatctaagcaaagtaccttatattttgggacggagggagtatcttttaggaaaaaggaatgtgtatgagatgctgttagaccaaattagcaagcaacagtagtaactttttgctcatgggcttgttaaatagttttttatattcaattcccatttgcacctagcctagcagcatatatgtgtgctctccatgttgacaaaattctgttctaggtacttatctgttcgctggggcatagagttgcaaaatgtggtggttcttgttggtgaaactggtgattcagattacgaagaattgtttggaggtcttcataagacggtcatccttaagggtgaattcaacacatctgcaaatagaatccattctgttaggcggtatcctttacaagatgttgttgcacttgatagcccaaacatcattggaattgagggttatggcactgatgacatgaggtctgctctgaaacaactggatatacgggcacagtgacaccaagcccccatctgtttatcattaatatatgaagaaaaccagtggacgatacaaagacagcaaacaaacactagcatttccatacttgatggagatgccgattttgccatgtaagtcatgtagtttatgtgtgtggtccttgagctgtgaatagcattccgaaatctcatcccattgagattttggtatgtggcaattttggagtaaaaatcgattccatccaggaatacggacaaaagaaattggttacaatgttgataatgaaaaacatgttaaggaagcattaattcagcaagaaaagcttccaaaatcactacaattcttggccaagcttgcaatttccctttttttgaagtggaagcttatgttgtgtgtttactgctgggtggaccatatggccctggcagcccttctttactatgtttactccaggagggctgcctagctttcgtgtaagtattgtttgacacgatggttcattctatatatccaaagttttgttgagatcaatgcatttttgttgtttgtccttggatgggcaaagattagtactaccatctagttgatgtttatctgccataacagtttctaacttcttttttactgagaaacagcgtgtcttgtgtttatagcattgatttccatgtccatatgttgctggtggttatgtagttattgtggcaactataacgcagatgccaactccgacttcgtataaaatgcctatatttatcctgattaatatcattggtcaatgtgagttgtactcaacgcagctgtagtttggtgtagtagctgcaacaattaagccatgttttcttcaacttcttttcacactatcttccatctttagtttaaagtctgatcgtttcgcatacaactgataaaccgtaaaatgcttatcagtaattaaagaataatttatgagtaaaacttttatatttgtgctaaaataaattataataaaaacccttaaaatcaactataaaattaaattttagccacagttgataagccaaaaggcgaagattgaagatttgatctttatgtgaactaaccaattaattgaagatttgatctttatgtgaactaaccaatttttaatgctcttaattttgttttgattttgctaaaagaagagtttgttattgttgatgctaacttatacttgttgccagaaaactttaggacagttggggcgattggttttgggtattggttatcggtttatggttggccatccgtatcagcttatcagaaaggctagtaatacagtcgacctgttagctataaggttctgtgtagtcttctcttagcttacccatataatagttagctctttacagttaatacagggcaaacttatctctctcacagagtttcttggttcttgtgtcaagtcggctgtaagtttacagcccgctctcctctcttctctcctccacctcagcatttagccggcttgtagcctactattatacttgctctcaggggattgtgatacgtctgctcatcttgaacaatatctagtcaaagtcacatcttttttgcgtaatgtcgcatcttttttgcgtaatggctaatttaatttaaatctgcgaaaaaggttcctgttcggtcggcgagaggtcagacttcaaaaaattaaaatgggggttgccccaattgcctttttcttttctggtcagactgcagatttctgtccaattaatacatggagaacttatagtttcaaaataactgctatgtttttgctgacaccttcatatcaactagctgacatttacacaacatttagaagaaatactccttccagttaaaaaattccataaaaattttaaatgcttgtgcttttttaaaaaaaattggtatacttagattttccttgaaaaagactattataattgttagaaatataaaaaaatattgcccctaaacataaaatatttattataagagagaataattgttttttaggaagacaaattttgccacaagacactcagaatttgtgtaattgtttggtggacatcgtaaaaaaatgtcaaggttagaggacactccgaaaagctggtaatttgttaggggatactttcaaccgaattgaagagacaaaaatttcaaaaagatgataaagcccttagagccaaaagtttctaacttgacgttggagcaatgatggaatatacttcagctgacgctggagtgatgatggaacatacttcggtttgatggaagatttatggttgcataatttccaaattatcttccaacaccatggaagcttgttgctgcgggggcattctcatctgttttatgaatctctcttcatttggatcaaaaatgttgcgaactaccaaatttaggaatattcttcagccgtggcacatgttttactatatctatcaacaaattatacaaactttagatgtcttatagcaaaatttgcgttcaaggaatattttgaagctataacgcaaatcattcaagtatgcaactaggcaagatgggctagaagaagaagagatgtgcttgcaaaccaaagccagcgaactacaccgactgaaaaatatatttaagaaaataaaacgagagcaattctcttgcgtcagctttggtaacccctcctgttcagtgccacattcatggctaactcaccaatcattccatgcaaacctgcacgtttcctcataaggcgcaaaaaacggtgaagtactacgacgaatcggccaatcagacaagtcatctctctcggactgcagactgaaagtctgaaactcagccattctataccagtacgagtacagtacaagattgggttagctcaggttggttgtgagcttcccaactaatctgaatctgaacctccctgaagttgaattcagaaagctttcattatctctaatgaagcaatcagagcctcaattttcaacggttgcctgcacgccacagagagaaaattaacctgcagcttcttgctggactgcgagagtgcccattgctgaagaatttattgtgacaggtgggaagacggagggatggatggccagctgacacctacaacatagacgggtcaaaacttcagaaatggacccggagcaaacaacagctacctaattctatttcaaagcactttctttatgctgtcaatttgaagaaaaaaaaaaccctctactactccctccgtcccaaagaaaccaacctatagtactaatattgacacattttagtatgtccattggttttatatgagatggaggaaggatataacaacggaagggagcgtaaatatacttttataatgagagtgttatatccttggtctctttacaccgtgaatgtacacaattatatattcatgtaagtgcaaatacgtggtgtggttaaagtgataatgagcttgctatactatttggtgaaagaaaatataccgcctcctatcattaatatttgacgtcatataatatcgacataagtttgtgtgtagcgtcaaatataatgttagggggggggcatatttttgtaatgaaaaggttttatatctttattctctctacatcgtagatgcacatagtcatacatgcatgtaagcgtaaatatgttgtgtggtgaaagtgataatgaacttgctagactttttttgacacctagttatgctccctttttatgcactgccgcaccatctcttttctcctcttctctgttatcatcgtatatactacatattttacattgaacctattgttggctacgccattatggcatccaccactgctgtcaaactgtgtaaaagatgacataccactattaagagtgttaactataaaccaataccctcaggctatataaaaaatgatttcaacaatattgatgctgagcaataatgcagacacatcgaaattcttgagttaggtgtccaaaggcatttaatcaatatttcactggtatttgacatggacttttatagaagaaaaatacatcactgtagtagtagtatctttttccaagccctgttagcaacagtattgatgtggttgtcctcctactctacctgtatttgtcctcttccacctcataccaaataaaaccccccctctccattgttctcgcagcgtataatctcacccaaaatacacgcaatctcacgccatttgcacctacaaatctcatcatctcatcaatatccatttctacaaaaaaaaaatccatttcagtatttcattgctgtagcatcaaatttattggcattatttgctgatattgcatgctgcattgagaagaaaattaaagaaactgacttggatagcactgcactctagctaccattttcttggcttgtttgcgaaagctgctccatctcctgtgtcctaggctctttccctttttaaccccgtgccacagctagccagccaagcactgcacaaacctttcccctgaagaggccaagaagttatgggagaggaggcagccatggccaccatggagagcgcctaccatgatgagcttgctccggcggcggcgccggcgccggcgaagggaggagggagcaagaagaagaggaagcagcagaagagggaggagaagaggaaggagtgcaggctggtgagctaccacgagctgccggactacatgaaggagaacgagttcatcctcgactactaccgctccgagtggcccatcctcaatgccctcctcagcctcttctcctggcacaacgagaccatcaacatctggacgtatggatttcaacctgaatttttctgaatttgattctggttcagctttgtgtgctgtgttcttgctgctcatcgtgtgggcgttcttggtgtttgttcaggcatcttcttgggttcgtgctgttcttcggcctcaccgtcctgcatcttggccagtacttcccccaggttgctgatctcatcggacacctctcctggtgagtttgtgaaagcctcagtggaatttgtttggttaaaatcttggctaatgtgtcctggaattagtagcacgaaatagtttagtttttcagtagctgtgagatgaatattttaacgttttaaggcactgaataggattctacatcctacttgtttcttgttaatcaaattatgctgagtgatagcatgagagtttcgataaatctagctgcttgtgtatcgacaaattaaatctcaccaacaaattcactccaattccatacaacctggaaaatgacaagttgcagtttttatttcagatgtctatgtgctttgcatgcttaatattctgttcactgtctgtccctttttttttttctgagaattgtacttctatttgactgcaggccaatctcaaaggttgctgaaaatgtctccagtaacattggagatgtcctctctgtgagtaaagcttctatttcctgaaatcattcattcctgtgatagaagtagaagttactgataagaaaaaaaaatactggattgcagtaatattattgggctggttagatccacatgcttaggagattcattgtgcagctttgagtggctccacttttcagtactgtcctgtttccttctgtttgttcagatgtgcatgatttggactttttggatggcagctgggccaaagtgttgggtggggcttctgattgctttcacctttacctgatgaaccttgcccaattaggtccccttttactggtgcccattcatgacaaatcctagattaagtgttggccacttcacttcaccacaagatgttaagctttggtgatgtgttcataggacttggttgtgacttggtgattgtgatgatcaagtctacccgctacgacacgactccagtgtcgccgcgggttatcttttcttcttgaaatccttgtgccttggatgtctagattgacaagatacatcatgcaaccaccaaagggaagattttgagacttgaggggaagattttgggaggttaagaggttaggggtcactaaaattggcaaacattggggacacatatacaaggcgatatttgcatgaacgtggtagcagtttatcgcgtgtgatccttccctttgtgttttcataccaaaccttcttccatcctcacatggtaacagttgtcctctctttttgtgattgagactagttggtagacaattttgggcaaccatagtaaaccttcatttttttgcataattaattacttgctagctaaattcattgcttgtcatggcttcccaactgttcttgaccaaagaacagtgtttggtaaccaaatagaaattcttagataaggaagatgaatttgttcggagttcggacaccaatatggttagatgttctattcaagcgttgaaacgaatgtcgtcgcaataattcggtgttcccagtcttctaaattctaatgcatatgctttaatttggagagtatattgctttcagatgtttaatgacatattatacttcgatgtgatatgctacaatgatgatcggtgtccgatcagctgtcctgtcacgtcaatggtttgatcgagtttggcgtgtgtgtccatgcattggccagggcgcggcgtcgttcatgcaggcgagcccggcgtcgagcgccggcgccatggcggcggcgtggccggtgacggcggcggcggcggcgacgacgcggtggccgttcttcgtgttcctcgcgggcgccatgttctgcctgctgagcagcgcggcgtgccacctcctgtcgtgccactcgcaccgcctcaacctgttcctcatccgcctcgactacaccggcatcgccgtcatgatcgtcgtctccttcttcccgcccatctactacatcttccagtgcgagccgcggtggcaggtggtgtacctgtcggcgatcaccgccgccggggtggccaccgtgtacgcgctcatgtcgcccaggctgagcgcggcgaggtaccgcgcccaccgcgcgctgctgttcgtcgccatgggcctctccggcgtcgtccccgccgcccacgccgtcgccgtcaactggcacgagccccgccggaacgtgacgctggcgtacgagggcgccatggcggcgtcctacctcgccggcaccgcgttctacctcacccgcgtcccggagcggtggcgccccggcatgttcgacctgtgcggccacagccaccagatcttccacgcgctcgtcatcgccggcgcgctcgcgcactacgccgccgccatcgtcttcatccaggcacgcgacgagatgggctgcccggcgccatagctaagctagcgatcgaacacacaagaaaacatttctctccatggatcgatgaaccaaatgataattcgatacagcagagtacacaagaagcatatatatacagcggtagacgatcgaattaattgatttgagtggttttgtttttgtgaggtttttttttaaaatttttaagtttgtttagcttgcaggagtcggtcatcaagtgtgagatattaccgtgtcgtccggttaatgacaaggatttattgattgttatgatgtcgaaacttgtacatacaagaagcaactgttgcttattcgttcgttgtaagatgcaacaaattaagaagagagagagagataaggcaacaaaagtatacatgtgttgattgccattcctccatcaaaaactaatcccgttaagacgtccatggcgtgatgacaatcaatgctatcaggcggcctctgcgtattaaagagtgtatacatggtttaactgttggcccttaactgttagattccttataacggaactagcccactcgaatttagtttctagattttacatgggtactcatatatttacggttattctttttaagtgatagacgacgtatacgtaaatagcgagacacatataatgacctcgttaattttaagatatgccggctcagtctcttctgaaggtgttcataagatatgagtatgtgcgttcaaggagtacgtgttatagcgtctgtatttatattgcctttaaaaagagtgtatacaactagacacgcatatttaatgtacgtcatactcccatcatcaaacatttagggtgttttggaggggttctctccgacacgcaaaatgaagtatacattaacgcattattaattcaatatattagttatttttaaaaaaactaatatgattttttataaacaattttttatagaattttcttaaaaaataaattgttcatagaagtttggaaagtatacgtgcggataaacaaggaaggagaagttgtgaacataggccctgtttaatttctaaaaattgtcgcaaaaacatcacatcgaatctttggacacatgtgtggagcattaaatatagataagaagaaaaactaattgtacagtttgcatgtaaatcgcgagataaatcttttgagcctaattagtccatgattaaccataagtgctacagtaacccacatgtgctaatgacgacatgattaggctcaaaagattcgtctcgttgtttccaggcgagtaatgaaattagttttttcattcgtgtccgaaaaccccttccgacatctggtcaaacgtcctatatgacaaccaaaaatttttatttcaccaattaaacaggcccataagaacccaacataatgcaattagacacacgtatttaatacacgtcgccacacgtgtttgttcagcgttagtagtattattctgatttgaggatatcatttttgaatagtcgaatcgaatagggtacgggccgtgggggttcataaatggccgacctgtgatgtgagtcgtccacaccccacaccccacccaacccgagcctcagccgaccgactcgacgacgtctcgcgctaatcgcaacgccgacgcccatttatgaccagccttcgcttggctgcacgtctccgtcccgtatcatattgccgtctcagcgacccagccgccgcgccccctaccactgccaacccaatccatctctctctctctctactgctctccccgaacgcgctaccgttgttggacccgacgacgacacacgcggtgggtgcgtgcagtgcagccaagaagccaggtggtacgcgagagaaccagacgaggcccgtgaatctccgcgatttccatcgcgcgcaccggcccgcgcgcgggcaaaatcccagcggcggccacgcggaggcgaactacaccgtgcgcgcgcgcggcgcctcttccgcttgggccgcgcgaaatttacgtgcgctcacgtacgcgaacgggacgaaacgaaacgaggcaaaaacaaaaaaaaggccacaacactgcggcgggcgctgcttctgctgccgcttgggttgggccacgcgagcggctcagcctagtacacgcggctcagcaaaggggataagttttttgacctcccttaactcttgctgttgattgaattgcatccctcaaccataatagcagagaacaggtgagagagagggagaggagaaataggtgagaaaaaaagagatgagattaggatgattggcatgtgagctgatatttttatctttttcctggctaatatgtgagtcctatgagcgtcacgtaggatgaaaccgctatcaaaatagctgaggtacttttatttactccggtttttgaaaatggagaggccttatacctggtattatagttaagggtcaaagattcaatatatagcaagagttgagggaggccaaatagacttactgcacaaatcaatggtagtggtggtgaacttgagggggcaggggaggaggtaggtttggtttggggtttgggggagggggagggggaggggatgccggagctgccggaggtggaggcggcgaggagggcgctggaggcgcactgcgtggggaggaggatcgcgcgctgcgcggtggcggatgaccccaaggtggtggtcgccgccgccggggggcgcgtggcgttcgagcgcgccatggtcggccggaccatcgtcgccgcgcggcggaggggcaagaacctctggctccgcctcgacgcccctccattcccctccttccagttcggtcagtacctgcctcctcctcctgcagttcgatcgattgctttttgctactagtaaattggagtgacaaattgctgtgtgtgttgcagggatggcaggtgcgatctacattaagggagttcctgtgaccaagtacaagaggcatgtgtaatttgtatgctggggaatttgttatacagtaatggactacatgctgattcagaaaattattgcagatcagttgtcagttctacagacgagtggccctccaagtactccaaattttttgttcaagtaagatctcctagctgtcacagcatcttttttcagtacattgctgctatgtgagatcaaaattaacagtttataagcaaaaggggatatggaattgttgttcatcagtactgtactgtactactttggttgggtcttataaagagagagatggataggtagtaactgtcatcgtttagcttggacacaagatcgatttgttaggctatatagctcagaaaacatgttttggctgagcctctagcggactagctaatccaaaatgcggaagaacaaatcgccacaaacagtagtgcttttgtgatctccagaaagccagaaaggaagacgtgccatgtctcagggttaacatgctatcatataaacacgtcaatattacttctgctatataaggtttattgaatagtaatagaacacgcaatgcatgcctaggcattgttgtttagtcaaaatttgatctcctcttattgtttatgtccttttatgatatcataggttggctcttttaatgttggttgtttctaatgcatttaacttgttccagcttgatgatggcttagagttttccttcactgataagaggcggtttgcaagagttcggttgtttgaagatgtatgtgctttgactagttgaatctaaatcttcagagtcttcctttcatgttattttctaatgatgtccctaatcaaataacgatttgcagcccgaaactgtacccccgatttctgagttaggaccagatgctctctttgagccgatgtcttctgacagttttgcggactcgctgagcagaaagaagattggaataaaagctcttctactcgatcaggtgattttattaccataaaaccaatatgagtttttagctccacaaaattgtttctacaatatacgggattaggtccttgtatctcctatacaaacagaagacttgattttttttttattgaacagagcttcatatcaggaattggtaattggattgcagatgaggtgctttaccaggtattaatacaaatattattagagcttgaatgaaatgcataaattttaattatgaattcatgttgttttttcagtcgagaacccatccattacagattgcttcaagtctatccagggagagttgtgaagcactacaccaaagcatccaagaggttgtgtaatttgacattattttaaataattttagtgtattctactgatgtacaatcacggagaacttatgcctgaaataaagcatatttcaggttgtgaaatatgctgttgaagttgatgctgattgtgactgctttcctgtggaatggttattccatcaccgatggggcaagaagcctggtaaagtcaatggtgagattgtcctcaagttttatcatgaactcgttattgtcttgaataaaattgagcaaagcgttcgcttgtagttttgctgatatatgatggtgtataatcgaacatgttaattattacccactactttaaatgtcttgcaggacagaaaattgagttcataacagctggtggcagggtaagctcttatctgcttcagtactactacactttctagtgctacgaacattcatgcatctaccctctgatttgtactctcactatttagactacagcatacgtgccacaactgcagaagctgactggaatgcaatctagcaaagtagtcattgctaacccagaacaagtggcagagaacgatgatgcgaaggaaatagacacagatccagaagatgctgataatttgaatacaaagaagcgaggagcaacttctagggttgccaggggaaagcaaaagagagatgccataggtgccctttccagaaagacaaggaaaaatggtggtggcaaggagaaaccaggtagtgactatagtgaagatgatggtgagactgctgaaccaaacaaagttagcaccagtagcaagggcgagaaggcagatccggtgagaagatcatcaaggaccgcatcgaaaccccgccaggtaaataaattaaaagaaagatagcaagagatgaagagactcgctgatgttcgcaaagatcattttggtgtgtgtatagctttagctttagatgctctccgatggccatattggtgaaatccttgtagccttgattagtgagttcttttctctgtgtcttgtgcgctactgtaccagattattcaaagatgccctcttggaaattggaaggtgtaatcgttccatactgggcaaaacatatgcttctcctgtgcaacatgaacaatgacatatctaggctatgttgctcgtgtcaaaccaccacctaggttatctttttttatttttttttaagacggaagaagtaaggatgaatgtatacacacatgcttgtctatcattcttaagatttgagtctcttggggacagagagtaatccatagatttaactcaattagtcacttgtgtcatgtctgcactcataactgtgcagttccatccttgcctttctgcaagcagcacactagtgagtactagtgatcatgtgagaagaaccaagtaccattttatatggaaatttagttgcaaaatatttcaagccacttgtatttacacagttggctatctttatatattggccagtacactcacgagcagccttttcaaagtctgttcagtataaaatccaaggtaagatcacatatggccattgcccatttgccgtgtttcatgcacagcccagagctactacaaacagaagacaacaaatgacacggggttacatgtccatcacatcaactcagttactgctcagtattcgctcacgggcggcatactgccaacggagtctgcacatgctttgccctcacttttgcaccaatcatgcctctcggttaccctccagagaatgcagaatatcgatcgagcattccggctcctatgcagtcgtcaaagtattctctacagtatagttttctctcgctatccgaccgtacttgactatactagatctccttgctagtaatatgtcacagctcacaatgtcatgcatgtgagattttttcgatccaagggctagctagctctcctagctactccttccgttccaaagaaaaaaaaaaccccaattttaaatttaaaactggacacaacctaatcttgagtttaaacctgaacccaactcattgtgttcaggtttaaactcatgattgttttttttacggagggagtagctccgacaactattctatgagtgatactcgtccgtttcattttaaacacaaccgtaagttttcgagttcaattttgatcgtccatcttatttaaaattttttttataattagtattttttgttgttattagatgataaaacatgaatagtactctataagtgacttatgttttttttaatttttttaaagattttagattttctcaaataagaccgacgattaaagttagatacggaaatctatagttacgtttaaaatgggacggagggagtacgtgtgttctctcccaatatcagtgccaaaatcaaccacaaataaatctgtctgaagaaaacaggttaattaaattaatctcagacatattatgcttagatccgacacattattacatcagattgcatgcactgtccgcacatggaagtatgtaggattacacgcttaagtcaggctgcaggcattattaattaatttcttgataggatacgatcttgacggaaacaatttctgaacagttgctgtcttattgatcacaccacacaatcaagaagaggaagcatgcaattaagctgaaacattgaaacaaattaaaaaaaaaacacagcaatacgaacatcaatctatcgttagcagattgatccgttcctctagctagctagcagacgacatcctctcatgtttccacacactaacaaattaaaaccaacaataaattaatacacctcgtactcatcattaacacatcaataagccgagatcgagtagccaacctgcatattccatcaaaaaaacacactatatcagtatcaaatcaaagacaacatatatacctcctctctcaaaaaaaaaaacttttacacacgaatctagacataccctttgccatttcaagattcacgtataaaagttatctgttttttttcgagagagagtaattatttctgacgttttttattaaataatggatagaaatcctgcctctaaatccacaagtagatacacatagcaaaattatttctgacgcttatttgcgatgggagaagagagtaacacacttacaaacaagagcttgagcttgggcgccatccatggcgaggcaggggaatggcggctgaactagatggagcaggtgtagccggggggagggttcttgccgcaggtgaggaggagctggagcgcgaggggcaggtagatgttgatgttgaggagcttgagcctgatggtggtgcagaggcacacggcggcctccagctccacgagcccctccagcagcgggcagcacttgttcaccaccgggtcgccgatccccacgtgcaccagcccccccagcaggtccacgcacgccccgatcttcagcgagtccaccgggcacctctgcgtcgccggcggcggcggcgggcacggcgtcgtcgtcggcggcgtcgggtacgtcaccggcggcgtcgggtatgtcaccggcggcgtcgggtaggtgaccggagggccgacgacgaccggaggggtggtgaccggaggtgtggggtaggtgaccggcgggccgacgacgaccgggggggtggtgaccggaggtgtggggtaggtgaccggcggcggacgggtgacggggcccttcggcgggtgggtgacggggaccttgggaggggcgacgagcggcggcgggcgggtgaccggagacgggtaggtggggcccttgggggggcgaggggtagggttcttggggcccttggggtggccgggagagggagaagggtgcgagggcttggggtgcttgggcttgtcgcagtcgcattccgggtcgtactccgcgaggatggaagccacggtggtggagaggaggaggagcagcgtcaggaggaatggccgcagcttggtgctgcccgccatggctgctgctagctctgagcttgctagcaggttgtggtgagaagggggggggggggggggggagaagaagaggagctagaagtgtttgtgcgatcgatctagggtttatggcggtgtggttatatagagtggcgagctcgccgttgtggcccgtgaactctagggtttgcagctgctagagtgctagtagctcggaaattatgcatgtgtgtgtggcaacgtgagtgaccgtcactcacagtgcaggatcttcatttgagccttggagtactgtacgtctgtaccacgaagtctagctagggtcataagtctaaaattattctttttataatgtaagtggctctaggaatggcattgttttttttatttcagaccttgctactatctattctagctctcatatttatttcaatttgtgtggaagtacacaatttaacaatgaataccagaatctagaaaaaaaataaaatcccctctttcccctcttccgtcactctctcgattctctcctcgactcctcccacggcagtgaccgcatctcagctcttatctcgtcctcccatggcccacgactgttcggtggctctcctactctaatcggcgcgtcgacgagctcggtgatgtgggaagggtggactactatgagctcagcggcagagagtgggaggtatagtcgctttttcctttcctaaaattgctgttgatgtccctcccccatctccaacaacgagctccctagtgccatcgccttgaaccgggtgaacatcgaggagattgacacgacgacgaaaagaagcgacgaggaggtcaaggcagctccgacggagcggctacggacaggtcgaggcggtcgtcgtcgagctgcttcttcataggtcgatcacgacgataacatcggttggttcgaggggcaacaacgagcttgacagtacggaatggggacaacaatgaggtcctaaacgctagatccgccgcctcctcttcgtccaccatttccatcttcccttctcctcacccgcgcacgtctctcactaggctatcgtcgctgcctcgtcgagctcgctagatcaggcattgggcttgcctcgatcagtgacaaccacgagtggagcaactcgggacgaccgccaccacctcgaatcagctcatcgtcgctggctccaacgggttatgagggcatcgcatggggcaacacttctcccaacgtacaacgctcgctgttcctctccccctccctgaaaaatccctcatgaatattaataaggaactcgtgtctcatttgggatttccattcttcacttggtaatgggagaagcagatgtgatgtgaaatcttttatgtggcaagttgatgttgaatgacgtgaaatcttttatgtggcaagttgatgttgaatgacatctatatgcattgtaaaagcccttactaccattccttttgttccaaagtaaatgaattttaatttagaatttaaaatttatacaaatattgattttaatgcacgaaaatctatatatttttcagttgtttacggattgatatctaataatcaaaatttcaccattgagacaacgggaaaggaatctctctcttaatcttaatgtttttagtaaacaacctaaaaatgattgtattgtaaaaacagattgagtacgtagttactggttttgtatgatttgcctaaagaacatcatgatcacactcaattgggacgtagcaactcgatcaacatgctaattgggtttttgggtggaatcctatatacttatatagttatccccactaagtatagttaatgctatttctctcttctcttattaagccatatcacctcaattatttctagcctttggatgatagatctatggtccaaattgtctcttttttcttctctcttacaaacatgcaatctcaattatttttaggctcaaaattatataaaattgtttagttttgataatcaaattacatcttatttgtacatattatgcaacctaattttccgcagcaacgcgacgggttatttatctagtaaaaaactatttttctgtacaaggacctctttagattgcagacgaaccgtaactggtcgtgtttataaaaattatcctcctattttcgcgtgcagacccttaaaaggaccacacacaaaaatcgattttcgcatgcggacctcttaatggtccgcactaaaaaaataagtctatttttgtaggcggacctcttaaggggccgtgattttcgcatacgggtctcttaaggatccgcataaagcctaggttcccttatctttccttctcaacacttcaaatattttcatccatatcctctcatctcctctctgtcactttctcacctcttcttcgcacaatctcactatgcgttgctctcctctctcactctcctctcgcggtaggcagtgggcccggacgacggcaggcggagggctcggccggcggcggagggctcggtggcggtcagatccgcctttggcggccatgcgacgggcggcaggtggcgcggtcaacggcgaaggcggcggctcccttggccctcccgcgcggatctggcggcgggcttgagtgggaggccagcggcggctctcccctgccatcccacgcgctcatctggtgacgggctcgagcggaaggccagcggcagctctcccccgcccgtatccggcggcaggcgcgggatccggcctccacatgcgcggatccgctggcagcgacgacgggaggtgcggatccaccggcgacgatggtggcagcgaccggctagggttagggttaggtttttgtgttttggaattttttttttcgattttccattttcgtgagaaaaacttaagcgcccgcactcgaaaattcgattttcgtgtgcggatgcacgtaaaattgcgattttcgtagaccctttagtatgtgcagcagtgcgggtagccagccatgtcgcacgcgaaaaccccttatgggtcatctgaaaaaaaatcatttcttactagtggaagccagaagacaaatacgtatataggacgatactattactagtacgtctaggtgatctgcatgtatcgcgtgatgaactgacgatggtgatggtgatgcatgcaccatcgatcgtcggtgttgtttcttcggccgttcttgtgcgcatgcttcactgcatccggcgcacgacgatgcagggcgaaagtacagtacgtgtactatcatggagtactatacctcgcaagaaccgatcgacaatgggtcgcccgctgcgtcagtcggcgtgcgccgcagcgcccacagactagctagcagtcacgagccggcgatcgatcgatcgagcatcgcaacggagtgcaatgcattatgcatgcatgtggcagatgtactgttcgaccataccgacaggtctctgtactcaacagccagcaagtctgccaagtcccaacgtactatacgtactgttcgaccaccaaaaatggttgtaattttctttaaaaaaatgtcattgtagagtataatggcatcgtctatcactccaccaaaaaagaacatccttcgcctctagctcgcctacctccgccataaaccttcgcctcatatatgaatgtcgtcatattttaagaatttttcataaccatttaacggacgaggagacatagggcttgttcatattgatgtcattttcaaccataccattttttttataaagttgccaaaataatatacgtttagtttgttgccaaaaatttggtaaatatggaagaaatcctagcaaaattttggtattggctacaatctgaacatgcccatattcttaagaaatcaaaacatttcttttcctatatggatgtaacaccatacactatcactcaactcaatatattctttttcaataatcaactttcagtcctcaaagaaataccaatcaaaattctcaacgtgagatgcgtgtggagagatctgtccaagtctaccatccagtctctcgcccgccaccgcgcgacaccatcttaccatcatatccaaacaacgtgctacccttgtcgatcgatcagtgatcgatgttgagacccgacagatat

SEQ ID NO: 4738 - DNA, 3708 bp, Oryza sativa
ctaagatctgatcctaatggccatttaacaattgtgtgaattagtgattattacagcagaagtgtgtgatcattgagtatgtttattaaaattctttgaagtggtggaatttttttacactgccaccacatgtttgtcactgttgttggtatagaaagtacaaattttcattctatgtgatatcaactgtttattttcaagcccattctttggtttgtcaaggtgggaaattcaagtaaaggcttgttttgataacctcttgtgcaggatttattttcaatttgttcaaggctgttggtattgcacggaggaaattcattacctactttttttttaaccttgcaatgtcatattgataacccatgtatccccgcaaaaaaaatattgataacccatgtaatcatgtcatcaactcatgtgatatttggagtgccttggagtgtattggctttgaaagctttgctatcctgtatttcccatggttattcatcaacagacgattgcacattgttgctttctactctgctagtggagggtatgttaattaagtccattgttggtggatgattatttgatttttgaccatgttaatggattaaactaagatcaacatgctatctgtagatatatatatctgacttcatatggaaattcgattgtatattaaacaatgttatgaactccaaaataatttgcatattgagaactgcacaagctcaagggaactttagtctggtctattatagaaaaatggcaaaaactgaggtgattaaaatgagaggtatgagagaaaatagaagagtaatacaatttttaagtaaacaatgcaacggaaagtaaacggttgatgtaaatctccgaacaaacgaatacagtagacatgtgagttcgaatagtttgctctatggttagcagtttccttttttttatatatatatttggagacatgtcgcaaatcagagtaaaaaaacagatttgctaaaaatatgtcgccagtttttgtcaaaaaatagtcgattttgtgacagtacgatttacatcgagattcgtgctagtgcaaagtgtcgtgacggagggttgaacccagaacttcgaagtcggcagacagagctcctaacaaccgagcacggtattggcattcactttattgccaaaacaaattaatattgaattttgaagtacttatacactaattaccccccacattcacttacacggcacttacgctataattacatatgtatttattcacttacacagcacttgcatatcacttacactataattacatatgtaatttagggacttacaatgtaaatacatgctgactattttttaatgaaaaatatggttccataaatatagctactcccgttaaaaaacacacaaagtaaaattatcacaacataatccaaacacagccatgcgctttccaggtgccactggatcgcaatgcttgcgatatacatgtttgagcctagatattattattattctttctaaaaaaaacttggacaacagttgatagtgtgatggcgcaaaaaagaaagtaaaatcatttacatgcacctagcaacaccaaggtatacttgcccacttggttggttgagaattgcgtatgccaaaggtctagagtttaactccctccataataagcaacacttttttaccatatatttgttcactgtttcagcattcataacattgtgttacttttgttcactgtttcagcattcataacattgtgttactacaggcgacagcaacatatatgtaggtgttactatacagttcaagtataacataactcgtatgttttataacacacagcttgtgttgctattgaactatcttgtaacatatgtcttaaagtgttacaaatttatattgaactatcttgtaacatatgtcttaaagtgttacaaattatgttacaatatgtaagttctgtaaaatgggtgcacgatgtcattccagaaacaccttatgccataactgaaaatttcatgaacaaattattcaatgagtataataaagattacattacccatggtgagtttgaattattcaatgagtataataaagattacattacccatggtaagtttaatatagattacattatcatggtgatgatccttgtctgctctcagatggtactgatacatatgcccttgttaactaatatatagtcatatttcctccaaaagtatatatagtccgatcataaatggtatggacattatcatgccgaaaaccaccctttaacaacaaaaatgacaaaagataacaattttaagacatattattgatttggttataaataattaactctgataattaaatctaccagtagaaacttacgccgtacttaggacgtctgcatgcaatccatattccaaatataaaggatgaaataaactgaggtattgcagcatacactcatttcatgagaaaaataaaaaatatgaagaaaaagttaaacaattgatcacaatatatcttgttttcaaaaagaaaacagtgacaaaaaaataactgattataattaaaaagatcaatgaattaattaattacactcatttagtttttaaacttcataacacttgcaaatttcactcgtaaactagtagcagttaattgtgtgtacttgtatgatggctactcggaggacatcaccacggatggcaacgacggcggatcctatggccatggcagcgggcccgattatgaacttcagaaaaaggcccagaagtgtaagtcttggtccacactacataatcctttcttgctggcccatgaataatccttaggaaaaatgaaagaaaagaataagctggtttagtacttttaatgtaaacgtgcattttttttcttgacatactgtggacagagatatattatagcccttacatacatatagactaaatgacatactgctatatgtttagaagtgcatgtgtgcaaacctacccatactgaacatagccagccccagccctgatcttgacattatttgcaccgacccctccaaagctggtggcaaagtgaggtgcgacctgctataatattaggcacagatgtatatattagtacatatagattaattatatttatgagcatgtacgtacggggatacttattactcgtttacctattggagatgcaagcccaggagatgccgattacactggcgtgtagattgggattacaggctaacttgcgtgccaccgacttgaagagcggtaacctagcaccattcacccctgccactgtcactgcctcctcccccttgagatcttggttcgtggcatctgaaaccccctcttcgaggctttgcatatcttcgctggtacccgagccaccgacaaccgtatcatcatctatgaaggacccttcttcatgtctgttagactcgtcatgagcgtcggagacgaaagctttccttacttccaggaccaccacgagtgaggtgagccacactattgcctggaagattgatagttgtaccacaatttgccctgcccagttgccatacatggccctcgccatgggcatgcccacaaccaaagaattggtgagtgacgcaagagaaaagccgcttatacaccagtcggtgacagcggcgcataatccctctttccggaatttcaacataacaccaatgctgattgcggcgactataattaactttgctatgctatcagc

SEQ ID NO: 4739 - DNA, 1240 bp, Oryza sativa
tgcattctttaacccgaagggcattgttgtataacaataagttcctatgggggtaatgaacgcagtgttttcctcatcctccctagccatgcgaatctgatgataaccagagtatgcatctagaaaacacaaaaggtcacaccccgcggtggagtcgacaatctgatctatgcgaggcagggggtaagggtccttaggacatgccttgttaaggtcggtgtagtcgatgcacatccgaagcttgccgttcgccttgggaacgacgaccgggttcgccagccacttcggatggatgacctcacggatgaatccggcctccagaagtcgcgccacctcctcacggatgaaggcttgacgtttcggggcctgccgccgcactttctgccggaccggccttgcgcccggccgcacggcgagacggtgctcaatcacctccctggggaccccgggcatgtccgccggtctccaggcgaagacatcggcgtttgcccgcaggaaggagacgagcgcgtcttcctatttgtcgtctagaagaccaccgattcgtgtggtcttggacgggccgtcgcccagggcaacctccttgaccgggacctcgtcacacgtgatcatccgctgcctcggggcggcagggacggaggtgctgagcctctcgtcgccaccctcgggcttggacgccgcggcgaggtggtccgcgcgctgctccatacaagcgagcgcgactttgtggtcgccatggacggagatggggccaccgggacccggcatcttcatctggagataggcgtagtggaccgccgccatgaacttcaccaacgcgggcctccccaggaccgcgttgtagggcagactgaggtccgccacatcgaagttcacccgctccgtgcggaagttggcgggtccaccgaaggtgaccgggaggtcgatatgacctagcgcccaagtgtgccccggcgtcacaccaatgatcggctgggacggccggagcatcatccccggggccttgatggcgtcaaaggctgcgggggaaaggatgttgagggctgctcctccatcaatgaggacacgccccagcttcacgttgcaaacagtgggggaaaccaccattgcgatctgtcctccccgggcaacgcacggtgggtggtcggtctggtcgaaagtgagggcaacctccgaccaccgcgcctggcgcgtcgcctcatgagtaggggccgcggccagaagctctcgcttcatggcc

SEQ ID NO: 4740 - DNA, 680 bp, Oryza sativa
ctagtgtaaattttggtagctctaataccaggtattcgaaggtagtaaattttcaagtgaaaaatcttgatatctctaggtatttctcaaagatcataaaatttctttaataaaactatgaataattgcttcccatatattattgcaagtaaattcagataaaaaaaagctgcaggtgttcatcatcaccagttattcaccaaattgttgtggactgacatgcatctaaacaatactatcagagaaggaaattacttacctgtgcacataaatgttgtaatctctccctttaagatactcctctgtaatatagggatcctgcccattaggcacctctggggcgttagcagcaatgcttgatgagacggcataggccatttgtacggatccacctccaagatcaatcacgcctactgttttcgagtaatcttcacccagtctatcaagaagatagttaagagcaacccacatgtaagatccttcttgagatcccgtaagaacattgatccagtttggattgtactgaaatttgctcttggtgtggacaacatctctgacctgtactatgaatcaaattaagtaagtggtctgaaggcatttcatttatgtagtatatttttttcttaaagtatacgcaccgcttcaagaatctggtttgccttttcatctccaataagtat

SEQ ID NO: 4741 - DNA, 8083 bp, Oryza sativa
tcatgaggctcttttaggatgaagcaagatgaacaccaacatgcgcccgagttgcaacgtcgttgcttaataaggcttccgcttctcaatcttcaggattggggccatcatctcagctctcccatgggttcacatgtgcttctaggacaagttgataacaaatataatattaatgagaatgacaatcccattcatttggaggatgtcacattttgaggtctagttcttggtcgttgtaatgtcttgtctattaattatgttttttcggaaagtttattaattatgttgtactaaggttgtgacttcttgttttatttatagacaataagctgaagaatgagtttgctatgagggaaattgcctctactgcaatctccacagaagccaagcgcacggtcatctctacggaagaggggaagagagaatatggtcccaaggcagcaacacctaatgatgcttgtggattcctggaaaggtaagatgatgatagaaaaaggtttgctagatgaacactaaaacgtaggatatttattttggaaaaaggacagaatataccattaaacttgttacctcttttatttgctatatttttccttttttttcacatgtgtgttatataattctctctgacttaaacaattcttgctttagaagcaaatacaaaagaagataacgagtagacaagtaataatgttgatcaaatgtttttcttgattagaaggaaccaatgggaaaagaaatgcaaaggcaaggataggataaagcagttaagaaactaattagcacaataaatgcctattattaagtagtttttgtgcaagtcatgctagttgccgaaggactttctggtattgatatgtttgttgatgtttgtttttctggtattgacatgtttgttgatgtttgttttgtagtggaatggagtacaatttgcctcatagccccttctcatctcctaccaaggcttccaatgttgcagcaacagctcacactagtaacatcagcagcagtagtagccctcataaggtggcctcatctctattcctcccaacatgcacccttgagctgccccctacaactcatgcttccttcaagcgccaaggtaaaatcccaaaccaaatctcttccctaaatcactgtacatttgcaattccatgttgcatttgcaattactgcagttatataagatagactattttgttgtatgtcttcagattctctccttgctgaggagtagttggtttataagactacacatagtaaaggagagggggcttcatctttgctgagtaagtatcagtaattccaacctttttggagtgaaacaggaatcaactagtcaatattatgtactatatataatctgcctcctgtccaagtcttgatgatcgtgttattggtttgttggtgttatgtgcagggaaagcattaacagatcatacataacgagaagaatgccgacaaagaaaggaaaaaaatttagcttgttttagctatagttcttgggtatatggtattactatagtaccagtctttcagctcggtgtcaagaacaaagtatcaacttgtatgctcttttaaaagtatgagacaatataataaaaatatatcgtagctcatgtagtaataacaaatactagcagtgtgaagtggcactgctacatatacaaacattgaagagagcagtatatcagcatctgctactaaccaactgtttctatttagataaaaatgcttcacgaattgcttgatacctgggtcgtagcttgtccagaggtggcagatgttccttcacgagtggcaagcccagaaaaccctccatccatgcagacagccaagggaacttgtcgctggtgatcagcctgacaccggtgatgtcctcatatatcggaatcacatacgacagagagcccagagacaagtcgacgaacccgatcctctctccaccaaagaatttattctcatggagcaccttttccagaaccagcagctgctccatggcaacttcctatgcgtcctcctgctccttgccttgtgtggtgaaccacttccaaatcggaggtgacagctgcaattgtggatcaatgattacttgaaagtttagacttgcgaaaataaacaaaaaaaatcgctgaccttgtccagcccaaatttggaccagaaacgtgccatggcacgttcatagtgatcttcaggcaagatacggtggccggagtcagtggcggatccacaaaatcgattcgttggtgtcataacgtgtctatcggtgtcatattatgctaattatgcttagattatgatgttataacatatggataagcagttttgctataggttttgccaaaagtcatcggtgtcgcctgacaccgacctgagtactgtagatccgcccctggccggagtccttccaaacgtcatcgatgaactcgattatgacgtctgatggtttgccttgatagatcagcacagggaccttctgatgcacggggttgcactccagaagcaggttgcccttattcctcagatcttcttcgatgtcatactccacgtgtttgatccttagtgcccatatcactttgacaacgtaggggctcgaccatatgcccaacagcttcatcttctcagctccctcttctagttcttggtgatccatggttaagattgcagagcaatgctgtggagtgagggtttcagtttgattaatctgctacatagtgctaatggttttcttgtgaaggagattagtttcaaagtgtagctaactagctatgagttagctttggtagcttgattttgaagtactctgtctgcactctgcagtggcttcttgctttgacttttaagtaatatgtctgcatcatgttaagttccactctatccaaacctgaataaggcaataggtgtaaattccatcatttttattacagtattgagatatttgtttaaagatgtacaattaataaacttcaattggatgcgttgaacacttcataatctatctgctcataattcgtaatagtaactgccacttaaaatgagcaaagagcaaacaaaggagtcagacatgagcacaactatcttgcgcattacgattcagattaagagcaaaaaagttaaaagaaataacaagttcaggatatcagttccaggagattatatatatcaaaaccatactaattttctaaggtttatctaaaggaagaaaaataaaatggagtcactgggaatcagtgatgcatctcatttgcattttgcaatttgtaacttttcctctttcaatcttgataacatttggtcgacctccttcagccaacccggcaaaaaataaacgtcaatttacctacagttgcaaatgtgggttgcagcatatctgcttgatatagattctcaatagctactcaaggaaaagacaaagattcagaaatcatgaaatatatatgtttgatggcaaaactccatctttcagaaagtactgccaactgaaacttctaacaatccatcaagtggtcaaagatacacttcactaaatcaactttagttcttataaagggggcactctagggcttaaagtggttaagtgggtgtgccctataacaaaattcatcaaattaacacttgtaatttataatctgccaccgaattattgtcatacttgtaaaaaaaaaaagaagctaaaaacaagtaatatgaagaagatttcctgaagaccagacagtaagaagaaagcgaaatgtccaaatgttttgtttggtgagctattctcctcgtataataatatcacaaattcagctatctagttcaaaacttgagactggcaacctcttcagctatctcctgaagttccaatcctaaacccttcctgtacataccacagatatttcagctatcatttatcatctcaaaaaaatggatttatggagcaaaaagcttcaatcaaatgctaaattcctatgtgcataagataaaaatgtgtagttacactgcaccgactcgactccagaggacaagtgattagtacccaagtattttgaatttctgatacatgtagaatgaagtgcagaataactgcaaatatgtttgtttggttttttctattacctcgaggtggaagatgtgtgtcagccggcggccgtgccgacagcaccgccggtccacgccgaggatgtctggatgtgggctttctttacatgggctttgtgatgggcctggcccatcaccgtcagcttctccatccgtgcggcctctcttcccttcccttctccacacgaatcggacttcgggggttcttccgccgccgccgccccgccctcgccgccggcggcccggacgatgttgggccacctccggcgatcctcccaccgagtactcattgccaacctcgccgtctactcataagagcgattccttttcgctgttcctgtgctaaagccctttctctttttattccgcccctctttctttctccaaatctactagttgccggactactgcttgcctgcttgtgttcttgctccatttaccaacccagataatgtcatgatgcagccttgttttgactgtaggcacgccccaagtctgctcaacattctattatttgttttactgggcactagttgaactagtgaaaaacataggggtttttattgtctttcctctaattctccaagcagtgtgaacactttaagtaactaacccctaccctttggaggtcttcaagattctcacatcgacagattaatgtaacaagcactttgctaacggtagtttagcagtgtctgagagattagtctaacatgtttaagttgttattgatccaacatgcattcttaaactggagaataaatcaggagtttttagcctttctgtcactgtaatttcttgaagagattgcttcttgctacctttgagccattggctaattctattactaatctcactgctctctacattgtgcaggatacagagttcacaaattgaggtactattctcctttgtcctttccttcggacaacattttacacccattttacaaagtcatccttccatttatacacctgtttttagttcatagcaggctggtgtagcaaccataccaccagaaatttctctgcagatacaagtaatagagtttcaaatgatcgagggcatcaatcaaggagttgaaaccaagtcttgtgaaggtatgtacacaaagttaaaactgtatacttatctttgtgtgtctttcatccacaagtttttaactttatgggtatttcttagttgcttagtgtgccaaattggtccagttacatattcctgtcatccttatggagttttgggataattttctatttcttcacagttaatctacatcccatgttaccatggcacattcccttgtttatgttccaggttactcccctaaggcttaacattcaacccgtttcatttttctaatccaacagtttcactaagatttctgtcattacgatggttttgtttttgtctatattatgactcgtcttttgagactgctaaatggttgtttttagacaataggcatagactgctggatgtttcacagtcctagagttctaaaagatcgatgattgattattgaagaaattgtctttgtattgcaggatgatgttgcaatcatcgaacgcatacaaaacagtacaaaggaattgagacaaggcccagttgggaaaaatctgtcatcggcggagaaaaggaaatttcttgtcaacactgtacgtgcagctagttttccatattgtctggtttattgtttgactgcatcaagtctccacgataattaggtttataattgcttcctggtacacatcaaatctattttatttttatgagtacataaatctactaactactggaacttccaaattgtagctgcttgacctggaagattcaaaagaaggtgtttacagcactctggatgcttgggttgcctttgagcaggattttcctgtggcctcaataaagcaagcacttgtagctcttgaaaaggaggaacagtggcatagaatcgtccaggtttcggacattatgatttgcttgattttaatttaactttgtggatctaatttgaaaaggaggcttcgtttgtgcacccagaattaaataaatggctaactgcatggttaggtgataaaatggatgtcgagcaaaggacaagggaagactatcagaacatatgagcaattagtgtgtgcacttgagaaggataatagagcggatgaagcttgcagaatctgggagtttaagatagcccatgatctacaatcagttccatggcggttttgccgtcttatgttgggtatttactacagaaataataagctagatagacttgtcaaggtatggatctcaagcccttgtccatcaagtaattttttattgttgtattttaagttgatgatcctctgtagaagtttgatgggtcttgagtgatcaatgatgccgcttagtctcttacagattgcatagtatgataaaacctacttacgtggattacattacatttccctgtttttggtgatgatattagctcttcaagaatcttgaagcatgtggccgtaaacctccaagcaaagatatcgtacggaaagttgaagatgcatatgaaatgcttggtttagtggaggagaaaaaggaattgcttgagaaatacaaggatttgtttgacaagccatcgagtaatgacaaaaagaaaggccggcagttcaaaaaggttgagaagaacatcaagccggcttagacatgtgatgggacacgcctgcacctctaagcttagagcatagaacggaaacatctgaatagaaatctgccagtgaagttgttactctttcctttgggatgagaatctgattatcaacagttaagattagaagtatgcatggtagtgcagttaacattgttgtgagtcattttccttcgtccagatttgttgctgacagtgcatccatatataatgggatgagaacctaatctaatgcagcaagtaatagtatttgccgtatgccctctgattgtgaatacaccttgtgtttgttaactgatgcctcatgctcaatctctggccgcgatccttcatcagcacttagaaaaaagaaggcaaaatttgctacaggacatgcaaaaaacgtgtaattagctaggagacaccacaaaaacgtgccatggctgatggatactaaaaaaatcgtgtaattgactgtaggatactggtcatattattttattatttccagatcaaaagaggtgagatattttcctaaatgcccggattgtctcttctctttccttttctcattcgccgggaacgcgcgcggtggggcgaggtcggcgcgagctcgacggcgatagcgggcggcagacgcacagcgcaacggcgaggccggcggggccgccgccgacgacggcgaggtcgacgggcctggagcaggcggggcgctgagtgtccgctgaggagctcgcgccgaggagcgggacgaaagcgttgagtgagtcggtgttcgcggcgaaggcgctgagtgtccgcggcgaagacgacaacgacggcgagggcggtggcgcgtcgccaccaactccctctccggcagcagctcacgggccatcaacatctccctggacaagaggaaaactggccagctagtagctagcagcagccaagcacacgccggcgagctcgctccaccagtaagaagatggctgctagctagctccttcagacttgagagcttgagcaggcaacaatggtgagctccttcagacttcagacttcagagcttgagcaggtagcaaggaggcagctgcagccggcgaggggctcgatctggtctctaatttgcaagtcggcgcacgcacagacgcccgcttgtgcgtgccagcaggcagtccgtcgtcagtcacaggctcataggtgcgagccagcagacaggccgaccgccatcgaagccgccgccgccggacatatgtgggccgcaagccgagcggcgcggatgggcgcccatgcgacgtctaccacgcggaagcacctgcctccaacaccggcaatggcgatggatcaaatcgatggaat

SEQ ID NO: 4742 - DNA, 9154 bp, Oryza sativa
  unsure (1)..(9154): unsure at all n locations
agggtcttgaccgagagcaatcaggagtggagttgtgaagatatagaccgggagaaggatgactgcacaacagaagagaactagccatgagcgttgtagatagacacccaacatgtgatattgcttggcgccatatgattgtccacacaatgtttctaatgcgctcgccatgccaagctgcaatttacaacaatgtgcatatacggttaatttgtagtatatactgtttttatatgcatatcaatagatgacttatagtgcaaattaatatttagtaaaaagaagttttcataggagtgacttgtagtatggtctggttatgttttatttgtatattccgttcaaaaaatctaggtaaagacttttgctattgttgcacagctagtagacagaggtagtacaaactactttaattacagaagaaaaaaatatatatcagaagatccaacaagaatacacatgaaaaaagacccggcaaaaagaatacatgaggtagatgctatatactccttccgtccctaaatatttaatgccgttgacttttttaaacatgtttgaccgttcgtcttgtttaaaaacttttgtgaatattattaaaaaatttgagtagtagtagtatatttaacaatgaatcaaatgagaggaaaataattaataattacttattttttaaaataacataaacggtcaaacatatttaaaaaagtcaacggcgtcaagtatttagagacggagggagtactaattaatgtctggagagaaagccgtgcaagggaaggatggctaggtcaagagtctacttcaaagttttactagtaatttgaaaatccaaggaggcaaggtctcacatgattaattttcttcctgcagtatgtactatatccatttttttttaaaaaaaaaatcgagcctatagcttcttagctatagtacaacaatgctggacaagatcgaacactctgttttgaacctataaagacagcaactgaacatccattgtttgtctcaattaatcgatgggcaaattaaagcacaacaaaaaacttccagcgcgcgcggcgctgttagtctctgaatcggcacaattaagtcaaaacttaacgtcatcaaagtcagcttttagaaataaaaaacagctagttgccgaaaacacgaaacaggtaaaaagaaagatcaatttgaattgttacaacgtagtaataataatttaaacccaaaactgtgtaatgataactctgtaataataagtaaaaagggaatcagcggcatgacttaccaggatgccattgctgaagcgcatgaggacggtggagacgagggcgtagcggcgagctcggtacccccgatgtgtccgatgaacgcctggctgatgacggtgacgccgaaggaggagaagcgggcgcagatggaaggacccgccaccacccacagcttcttgttctcctccaccactcgccgcctcaccgatccaacctcttcttcctcctcgttgctcgccggcttaggctccagcagaggaaccgtcggcctctcatcatcctccgtcgtcctctccattgctactctgctctgatagctagctctccagtgcacaacaatggagatcgatggagttaataggagcaggaatatactttgagttgcagatattagtagctgtctgaattgaagaaggctgcagggagggaaaagaaagcatccatcgatgatgctcaggtctccccatctaccgtttaatggcggggccagagacgatcgagcgaggaagtacatgattggccctgtggttgctgcagatggtgggtaggtagggagggcagtgtgggaagaaattaataaacaattacacaagccctgttcttttctttaaaaaaaattggataaaattttggatactagtaacacgcttttcgtacgaaaactttctatacaaaagttactctaaaatatcaaattaattatttttttaataattaaaacttaattaatcatacattaatactatcttattttacgtaaaatacttaattatctcatccaacgatgccaaccaatgcgtcccggaaaaaggagatcacgggaaggaaaacgttacatcattgcatggagacaccatcgacatcgagtcgccgtctcgtgtcggccatcgatgaacttttttttcgaacctttttattttttaaaatttaaaaatgaactcttacaaaatttaattttaaaactagaccttttaatggtactggctggtctgatgtggcgaaataatattgtcaagtcaaatgaggatgaacatgatagtttatgatagtttagtttcgttatgccagccggggtggcgtggttaaaagttttaaattttaaaaataagttttgggatgtttatttaaaatttaaacacaaaaaaggttaataataaaaaaaatggccatcctattcatcaattcatgccctgtgaccttgttctcgtcaacccatcggcagcacaccaccaccagctaactcacgatttaattcaacatcatggaatatagttcaattgcatcaaatcatatcttctgctatctagtagctgtgtgaattgaagaagggaaggctgcaaggaaaggaaagcatgatgctcgcgttttatatccgcacgttttctaaactgctagtatgtattcttaaaaaaaagttattttaaaaattatattaatttattttttaaatttaaaataattaataattaattaattatgtgtttgtgacttgttttgttttgcgcatattttcagtcctctctaatactcttctctctaacacaacctgctgtgagattgcccctaaattatatatggttctgcagatggcgggtaggtagggatgacagagggggaaattagttgtactaccttgtaagtatgattaggattctccgacaacgagtgatcaaattaacaggaattaacagttggatcgtgtggcaaggagggcaagcacgtgttctttgctccaacaaaaagttggactccaaccaaaagttggataaagattaagatttttatggcacgcttttcaaactgctaaacggtgcgttttgtgtgaaaactttctatatgaaagttgctctaaaatatcatattaatctatttttcaagtttttaataattaaaactcaatcaattatgcgttaatatcacctcattttatgtaaaaaaaaacataatttttatcttcatcttcacaagaaaagaacaccacctaatgtgctgtcaatgttttcttatcctactaaagctttctatacgtagtccattaatgggatgtttgcccggccnnncngcannntgnnnngatnnnnnnnnnccacccctacccccacgccccccccccctccgccacccgactccggagcagttttggtccaacgtggcacacacgtggtaatccagtcagcataaaaaaataaaaaatggtagggcacttatcagttctgcatcttttctaggtcaccacatgtggacccccgtttttataacaggaatcattcgtgtaaacattaccatttccctggatcaagtagtctggtacacacgagttcatagctgaaataccaaaagcacatacacgagagtctagtgctaattattacatcataagcccgcaggcattgtcttaaatcatcggaccgagcggtccggaatacatccaaaagcagaaatagataaggcagcggaattcaggcagcggcatgccattgccacaggcaacgaccgtactaagacctactgagcgccatcgtcttcatctccctcctggtagtaggcatagggatcctccgaagcttcatctcccgcttctgattaattttatatttgcaagggtgagtaccaaccgtactcagcaagtcaccacagcaacaatgcatatgaaaggggtatttcaatggatggctatggctcttttgcgctaagccagttatgtaattcttttcacaaacctaagacctagcattgactgatcaaattttagtaccagtgtttgtatttaaataacgacggttctgtccaccatccattgtgatcccaaggatagcttcccgccattgagtcgtcatggttttctgaggacgtccaccttccctcctctcaggaagtggctccatcagcataaaaatcatcatgcaatatcccatcccacacaggttaagaatttagagtctagccaagtgtaatacacgtcccggtgcacaataaccgcgagcactgctaatcgaatagatttggtttactcacactgcagtggatgtacactttacccgcactccgcgactgcccaacacatgagcctcgtcccaacacatgagacgcgccacggcaaagccttttgataacctcgcattggcagtacccgctccatgaacttaaatcctcatgcactctaggcgtccatgtttctagcagtgagaggagttctggcgctcccaggaaagagaagtctcacacacatattaaattatggttcaagttaacttctctctctcacacactcatggcagtcctaccaatggcgacaccgatgtagggcacgcctctcggccctacctcaacggctgtcccaccgtagcgcacctgcctcactcaggggtgaaccatctatgcagtgatactgcctccgctcggctatctactccaataggtctatactcatacgagaagtgcggttgtacgggggtcgtttcatgcttaacttcatggctcggtccttaattgaccggggacgatactagccttttccagataccacccaaatcctccgtctgccccagtcgaaaacagttatttagtttatttctcctttcacaaatcatgtcctcaatatcatggcaatgtggcgctcatgtctccacatgccgcatctcaattaccttcccaaaggtaattgcccaagcatatagcatttgacaaatattagtatgcttgattctagaatagcatttctaagcatttgtcatagttgactagggactcatacgtaaacatggttatgaaggaataaggggtaaacaataatcaaggcatggcataatcgcaagtaggatgttcatctttgcatgcaattttatttgtaaacaaaaacaatttcgcaattgggatcaatatgttcaagaatagtgatgacttgccttgctcaaggtcttccgggtcttggccttcacccggatccgcggctccctcggtctctaaaattatgtgcgaaagaacaatttgaattcaattagaattcaaataaaatccaaataaatccaaatgaaagtcgaatgcgaaagtcaattcctttattttaactttattattcgcgaactaaggcaaacccaatttcgattcaaactattttgcgggtataaatattttgttgtcataagtttttaatttaatctacccgagcattatatccatataataggttagagatttctatcgcgagctaaatatcggacgaaatcctagaaatattatatgatttaatttagtctatgactaaatgattaaatataatacacggctaaaatccctagtaattaaatccgaatttctaccgtgaatcgattacttatagggattacccaaaaataatctataataatctataagaattcatctatttgtttagttattaattacatctaaattactaccgcgaattgattccttatagaaattaccaagaataatccataatttatattaaattttgcaattctacgactataattaatctataattaaattctaattattttaaattttctaaacttccctaatctccctctaatttcctatttatttccttttcctttttctccctttccttttttttctttcctttctttttcttttctttttctctttttctctcttttccttttcttttctttctctcctccctcccggcttctttctctcttcctcggcttctccctttctctctctctctctcggctccctgctacccggggcggcgacggcgaccgagcaaggggaggaggcggcggcttaccgacggcggtggcagcgacggcggcgcgacgacggcgcacggtgcatggcgcggcggcacgaaggcggcggtgcggcggcacgacggcggcgcaaggcggcgacgcacggcacggcggctccggggtgacggcacggcggcttcgaaggtggcggcgtggcggcacgacaacggcggcgcgtggagaaggggaagagggagaggaagggggagatggagtggggaaaatggggaggggtggagttttataggggagaggagggggaaagaaagagaagggaaggggcgacgcgacggcggcgcggcggcgcggggcgcgaggcggcgatgggatgcgcggcgacgggacgtcgacggcggcggcgacagcggcggcgcgcggctcggggcgggacgcgacgggcggcgacgcgacggtagcgcggcgcgacggcgacggggcgagacgacgggcgagcggcgatgggacgggcgggcggctcggggcacgaggcagcgcggcacggggcgcgtcgcggggtgatggggcggcgcgcggcgcggggcgcaaggccggctagggcggcgcagcagcgatggcgacggcgacaggcggcgatggcgacatcggcgcagcggcaggcgacggcgcgacgggacggtgacggcgacggcacggcagcggcggcgcggggctcggggcatggccaggcgcgtggcaaagaagggtctagggctaggtaccgaaatcgaacacctatgaggcaatgaaaagtgacttttcctatttatcccgattttagtgtattttccatataaatttgattccacaattcctaattttacatatgtgcattttactcaatatttgtgttatcttaactaatgaattcaccctagattaatattactcatattttatttttatataatttatttgagttttaattagggttaattcttattccatcgtatttaaatttaattgatccaaatatggtcgcgataatattttatttatttctatccacacctaatctttattttaaatttatatttattttaccaatttgtttttaaggtttattcctaattaactattctttactcacgattaataatcttcgagatcaaatccagataaaataggcgaataagatcggcatgatgcaattaatttaaaaaggtttttgaaaatctgtatttttagagttttgattttgtcggtcgaattttcagggtgttacagataatatggtgacctggtggagttcatggttggtgtcttcaatggggatgtggcagcgaagcaggaatccaagcccagtttcagtaggccaacatgcagctggagcaagactgtaagaggcggcatcccggtcgggtggcctgagatggatcagatggcgtcgcataggcactgtattgccgatgatggcgccggcgggctagggtgcacggtggtggcaacgaattgcattcagcggagcgatggttgctgggagaaagtcggggagaggagaagcgctatttcagggtggtgcagtgtgggaggttggtaacgatcgctatttttgtttttaatcggtggttacatgttgcggagcaggagattgctaattgtagggacggatttaactcgccacataagccattggatgaaaatatctaatggttaaaagagaattatgtacaatttagtggataaaactattacattttatatcagtatatctctactatattatacaaattgaagatgtttccgctggaattttgatacgtcattcgtgttggtttttcagtttgttgtacatcgtctatacacaattcgacgtaagtatagaataactattatacactctcctcctatctcaaccactcctcctcccagcccaccccaactggcccacaccattctatcagcccatcctgcgtgcctccactcagagccgcaggtgccactccccgtatcagtgtcttttttctttcctttttttcgttttcttttctcttgatcatcctgatcctctccctatccttccaatctcctctcttttctctccatgttctcttctttcctcttagttatctctttcaaatttctgttatcataaaaatttttgttttgatattatcaatatttaaggtatatgtggcaagtttgtaactttagaaatgtttttcatctatattaaaaaaaactttcactgattgaataatcaaaatttcaatctttggtcaatgaggtatagagaaatacgcatgcgtcaacttatggaatagccacccaacgatttgtgaggctatggaaatgtgtacaaaagagattctttgtgtgatgcatgaagcgagcgcaactaggttcaatgctatgtatgattcctgattttgttttgtttgtcttatttcggtttgtcgtttaaattagtggagtttttatcaatcatgaaaattatcttcacttgttgcagtattttttgctagtatacatatagatataaaattgattctttggtgcaaggttttgtgccaagcatgaaacgctatgattcgctttgtctcttaactctgaacgcgcaatacatttagcttgtagtaatatatgcttcttttattttactttcacactatctgaactcttagaaaaaaataattatgatacgattgtgtcaggtcaaatactcaaatgtgcaccagatgttcagtcttttacatacaagacatgcgtgctcatgacacacgaacacaaccgatgatttctatgatagtaattatatatagaaagctgctatatattcaaacgtacacaacttggagtctaggacaaagagcatggccacctcgatctattgatagctcgatccgttattaacatactacttatatatcatgatactcagttatactgtaataaccagcacacaaacatcgatcatacaaaaaacgatatcctaacttccaaagtagctagtacatcgatctcaatatcatttgtatatttctcgaagccgttttttgggtgacacagcttcaatagctgtacccaatggccaagccgcgtcaatgtagtactccccatgcttcaccttgtctaccagcgttatctccttacttggatgtagacctgacatcc

SEQ ID NO: 4743 - DNA, 4685 bp, Oryza sativa
  unsure (1)..(4685): unsure at all n locations
atttcttggtactgcacgaagatcatcttatccagaacaaacaatattacctcttgctcctgccgagtgggactcgattgatttcaccatgagattctctaggaaacacgcatgtatagagaaaaggtgcctaaatcaaaccaaggtgaattaggaggtggggatttacaacgaatcttctaatgagggggcatctctcaaactcagagtgatatttgagagtggtttttgcaattttcccttaaaaataaaacacagtgttgcccatatgacaggcagcaagctagcagtaaccaaatgatatatacgtgtggcataagacttatgtgcaaaatttagctacttcaatataatacttctgcaatcactatgctcagtacatatactccatctgtttctaaatatttgacgtcgttggcttttttaaatatgtttgatcgttggtcttattcaaaaaatttaagtaattattaattcttttcatatcatttgattcattgttaaatatacttatatgtatacatatagttttacatatttcacaaaattttttcaataagacgaacgataaaatatgtgctaaaaagttaacggtatcaaatatttagaagcggagggagtaactaattattttgatcggcactaatttctggtagaaagatgaaacaatgtacgtacattcagtgcttcagtgagcagtgggctaatataaattgagtggttatcagggcaaatgaggcttgctacaggtgcttgactgagaatttatcaagtttctagggtgcacgggttgacagatcagtttatgctgctataaatttgaggagttagagctagcaaaaggaaataaggtatgtttgtacttagtttcctaattatgattgtgtatgcattgatgaatttgggaaacctatgcattgatgaatctggtgagcatagtggacttctctttttcttgacacaaattcatccatgtccatccattcggtttctcatctcagtggatttagagaacatcatcatagtttgtaaaaactccttacagataattctctatgaatgcttttagagttcaatttatacattggatttagcttgcatggtgtgtcgatgcattgtagagtgcttcgtaagttcttcgaatgattctttaccaatatgttatttgattgccccatagagttttcaaggttaactatgctccacatgatacacaaactcaattttccctctttcattgtatatcatttgttttgcgaacgcaattgtatatcttttatggcttttgaaaattttggcccaaccaatccaaatccaggtctttttcgtagactggctctatcttttctcgtcaaaaagaaagtatttatataataatatatatatatgttgcttgctctacctttattcttctttttttacgtagactgattctacctttttccgtcgaaaacaaagtatttatgtgacaacatgcagctagctagcttcacattgatagcactcccactccataacaaacacaatagttggctttggactgtttgctaagctactttattaattatagacaaaattacagagtgaactcttttatcaggtgccatgcatgtgaaagttccactccatccacctctttaaaatccaccctcttcattagtctttgcactccagaattgggcaataatagcttgcaatggcggctcatcatgtcatgagcatcgccgcagcagcagtagccatgcttctcctgatggcgtcgtcgccggcagtcgccggcacggcggtgctcggccggaagggcggcgccatgactgacgacgatgtcgtgggagggcaggcggcgacagggccggggaagtacgccgtgatattggacgccggcagcacggggacgagggtacacgtctttagnnnnnnnnnnnnnnnnnnnnnnntcaagatcggcgacgacatcgaggtcttcgccaaggtaattaactaatctactactactataattaatctacctctctattgattactccctgggtgatttttttttaagaaaaaaaacataatctctctataaaaaagtataaaacgtattaattttatttcgttagaataagacactaataaacaagtaccgtattctaataggatattattttgtggtaaaaattaatgtgagtatattcgaaaatacttaattttaattacacatttatgtgtagtatagtaacgactgtcggtggaagtttcatcctaaccaactaaaataagtcatatatttttatatttttttgatagagaaagtacttgtaaagataaataaaaaaagtttctttttgttgttacaggtggttcctggactgagctcgtacgctggacgaccgcgggaggcagccaactccatacagcctctgcttgataaggccatccacgttgtccctaactggcttatgaagaaaactccccttaaacttggggtactacttacctaacaaatttcaatattgttcttcatctaatttaacaaaacatgcaccactgccatacaattattataacaaaatttaagttttctaaaagaacaggattcaattaaatatttgatttggcccctcgttctgagatctgtgcaactagttcaaaacaaatcaatataatatatacacaagaaaaggcaatgatattttgggctctgtgatgaagtagttttcttggatcctttacccagaagttgaatactccatccgttcaattttataaggcatatttgatttttaaaaattcaaactttgaagattttgaccaaagattagtaagcgtacaaataaatttagtttataaaagttaagcctatagatttgtatttcaaagagctttcacatatataatattggtttcatgcccattaagaatatatattatgagaaattgatggtcaaagtttagtcccgaagagtttttttattcgaaatacaccttacggcttgtttggtaactcgatggaaggggattgggagtttatacaagggaattgatgatgagattaagataagaatttgatttttaatcccaatatcttgtttggtagaggagatggaaattgatagagagtttagttggagattaggtcattaataaaaacggatggctgagatttgcttagacaaagtaaaggataaatttcctcccaattacctgcccctacccaggtattgaaaaggagggagttccttcctcaattccccatccctatcccaccaaaattctcatgtctcccaaccaaacaaaacacttaatagcctcatcactctaaactcccaatccctcctactccctccaactaaacgggccgttatagaactgaacggagggagtatcgatcattcaagctcaaaccattttcctactaaaatattgtaaaatgtttctaacttgctaatcaaacatttaaacctacaggcaactgctggactcatacttattggagatgaaaaggcaaaccagattcttgaagcggtgcgtatactttaagaaaaaaatatactacataaatgaaatgccttcagaccacttacttaatttgattcatagtacaggtcagagatgttgtccacaccaagagcaaatttcagtacaatccaaactggatcaatgttcttacgggatctcaagaaggatcttacatgtgggttgctcttaactatcttcttgatagactgggtgaagattactcgaaaacagtaggcgtgattgatcttggaggtggatccgtacaaatggcctatgccgtctcatcaagcattgctgctaacgccccagaggtgcctaatgggcaggatccctatattacagaggagtatcttaaagggagagattacaacatttatgtgcacaggtaagtaatttccttctctgatagtattgttttagatgcatgtcagtccacaacaatttggtgaataactggtgatgatgaacacctgcagcttttttttatctgaatttactgtaaataatatatgggaagcaattattcatagtttttattagagaaattttatgatctttgagaaagtacctagagatatcaagatttttcactgaaaattttactacctcgaagtacctggtatctagagctaccaaatttcacactagaaaatatggtatctccttaaggatttacacttttactaagatcaatcagcaataacctgcagttacttgcattatggcgctcaggcttctcgcgtagagatactgaagagaaagaatgggccatttagcaactgcatgttgcgtggattcaaaggtgtcaagctagttttccttatttagttcaagatgcaaatatagacaaatcaaatgtttggccaatgcttaataattaatcaagtgatgtttattttatcatgggacaaataaaaggcaaattcacctacaacggggagcagtacgaagcaatggcagcaccacaaggtgcagactaccacaaatgcagacaagatgtggtgaaggcactgaacctagactcgccctgcgaaaccaaaaattgcagcttcaacggcgtgtggaacgcggcggcggcgttgggcaggacgagatctacgtcacatccagcttctactacatagcctccggtgtacgtctcattaactaaccggtttatactggagtaatcaatttatcag

SEQ ID NO: 4744 - DNA, 5257 bp, Oryza sativa
aatccgatcccccctttattttcttttccaagggaattaataattccttttcctttagacagaaaaccaaataatccttagaaaatccatatcttctcaaccgctcctccgattgactccgttccacttccaataattccgtaaaattgagatctatctaatggcactattaattagtctaaatagggtttttcttttggtatttttttaggttttcgattgtttgcgtatagtcgcggttaccggattttcgtcgatcatggttttcttgaagattcgtgaagctttgtgaagaccttgagcaaggcaagtcaccctttgacaaattgctcctataattggaaaatcattattattttgtttgcaacttgcattattagaatcacacacttaacttgcttggcctcggtttgcgtgccaaaccgacggacctacccagtagtcgcactatttcctgtaggttgtactaccctgattccttgtcgctctacccttgtggtacttcggtatccgtgctctctgagcgcgtataccaaatatcccacatacaccgttgattgtcgaaaacttgggaaatgggtttgagaagccttgaaacccgacatgtggtgtcggtgtgtttaaaaataaaatgaattgtgaaaactcgcgatgcggggattgtgcctacgtggcactgtcccgtattcgcatataaggaccgattcctgtgggaaactcatcgaacataatcaaagtgcaaccacaaggtggaatgggacaccctagctaagtaacttgtcggttcagggaaacctcgcatgccaatagttgggaacgccggggcggggtcggttggagccaaaccgggttcctggtaaggcaagaacgagaaacttgctaacttaccgatcgaggtggttggagtttgatttgtgaaaactaaaatggcctaaatttatgtgaggatttgatccttctatgtggcatgaggtatccctgggtcggcttgggaaaggctttgttgcgaacctccgacaccgacgggtgttcggaataagttcgtatcttgtgggtaaagtatacccctctgcagaggttaactaactgttcgaacagccgtgcccacggtcatgggcggatgtgaggtggttcccgttgcgtagatttttttgcctgtgctttgtgaaaagttattgtggtgtgggaatcgtaaccagaatcagcctatgtggcagatggatgacctgagtggtcagaaacgaatctgtgtgattcgggatgtctgcgggcatcatagactaggcttcccgagtgggagcggattgttgtgctgctgggcagcaggactctgggagtccgagaaaaaggaaaaaggctctgggagccgcttaatcaagtgaaatggctctgggagccgagaagtaatgatctgacctgggtgatcggtacattaccatttgagttgttgaaaagcatctcttaaagtcaaatcgagacgcaagtctcttttcggcccaaacttagaaagaaataaatcacttagtgatttcaaaagtggtttcaaacaaaggatttgcaaaacaaccttgcctctcttccaagcttgcatcagacacctaaattcccgtgacgtgctgagtacgaaagtactcacccttgctctatataaatatatatagttcctccgccctgaagttgaagatgaagtaaagtgaagattagggtttcgtcctggttcccagccgtcgcctgtggtgttgggtgttagttcgttggttccgccactgctgctgttgttggtgtttcctcgtccgcgtcgtcggttgcattctcgggctgttctgagctgcaacctaagttaaggtaattaagtcctctatttattttaaggattgcaatgattcatatttgtcaccgtgggtaccagcactatgtcctgggactggtactgagatcgcggtttcgttggaagcggttcacgccgtttttcctacgacacgctcctgtcaggtgccgttgtacggcggtgccggattggggtgtgacagatagctaatacttaattaattacgcgctaatatatcggtctgttttccgtgcgttactgttccggttgggatccggagatagcgaacacagccaggcaccgttttttcagcttatagaaagagttacttgatcagttttcatgtacaagctttctaaatcattaaactgtgcttttttgaatgaaaactatatatatttaataaaataaaataaaatatatttttagatctgaagcagacatgcagttgatttttaattaattatgtgctaatctactttcttgatttagtggctgcactaccttgggacatgataaatttatagcgtctttcatggcgatatatagcagttaaaaattgacctgtttacggcaaccaggagcctctttcgcacttgagcagcgtcaaatttgcaaaatattcagcttaaactaccaaagggaaacgagtgtcaagttggtgtaagaatcaggcaatatattctctgtacggacaaatcagagatatgatctggaggcagtcgaaacaaacacgtcccagatccagagggagatcgatgcgatgcgatgcccacgaactcgacaggctaagagggaatcacttttggctaggaaggaaaatcaccaagcttcaattatgcagatatggaatgttcctagttaggcagctaggacctcactctttagggcaagttctttaggtaagtactataagcctctatatattgcccctaaatttgccatataaaattaggtgatgagctagaggagagaagttaggagagagaatgagccacctctcatgtaagggacaacctccacacaatctccaagaaaaatataagatgatgtgagagtaaactaatattagggtttgtgtactagaggtggtatgttgtacttgttacctcttaattaataagaatatgacatgatttaaattagatgtggcacacacctccattataaaacttgcccttaccctcccgagcggccacagtgcaaaaggtgttgaaggttcccacattgcggctttgcaaacagtgtctgatcatcatctttctgcagggtttcaaaagcagaaatttgcagcttcaagaaccttcctggagacaaaatcaactcgtcgaccaacaatccaacatatccatatggttcttgttgccctggagagcccaacacaacaacttaaaagaataaaagcattgtttccatgatttccaggatatgttttattccaggatttgagatggccgcactttgtcatggatggggaaaaaaagaaaggaaagaagagaagagcatcatgaaagcaaagatgatagtagtcgccgctgctttagctcgtcacctttcaatagctacctaaaccaggcctagtaacttttttaattttgagtactactgcactcaacaagttaaattcagtaatccagtcaaatgtacatgcagatcgacgagacattatgtaagcagcatcgtcaagagagtctacagactacagtaatatactagtagtgaattagaggtaaagtgaagtttgtttaattacagcggatgcatctcctggtcggtgtcagagtcgtcgtcggcctcggccaggacgtggacgtagcccttggcctcgaactgggcgcggatgacatcctgcctctggcgtatggtgacagcagagttcttgatggagtcgacggattagagcaagtttaatataatagagccaactacgagcttatagcttatattaagagggagactagtgcacggcattccgtctgaatgggataattaaataacacctccacctccccgagcaagatatggataaggatcaaagatggactcggctagcctgacgtaccaatatgcatggctctcacaaaaatctgcatgtaggaattaatgattggccccacatgcatctagcgcttctccttgagtttgtaggtcagaacatgcatgtgtagtgcatcatcaactattttattaccacgatattctactagtactaaggataagacgatttctaataggtatcatatgatacttgggagatatcaccggtgatacttatcaggtatcagacgattccaatcagatttcacgcgattttcaccaggtatcagttaatacttgcgaggtaccacctgataggtatcacctgataccggttaggtatcaggacatgatacctgaaagatatcaagacctgatacatgtttctatccaaacggtgatacttatcaggtatcagacgattccaatcaggtatcacacgatttctaccaggtatcatataatacttgcgaggtatcacccgatacctgataggtatcacctgataccggttaggtatcaggacgtgatacatatttccgtccaaacggtgatacttatcaggtatcagaaactggtatcaggattacctgatacatatttctgtccaaacggtgatactcatcaggtatcggatgattccaatcagggaccacacgatttctaccaagtatcaagtaatacttaagaggtatcacctgataccgtttagatatcatgaaacctaaaagatatcaaaaactgatacatatttctgtccaaaaggatatggtcctgtacaattcccggaatgagaaaagcacaattaaagtccgatgtcttctcagtgtgaacatgcacccataaatacactgatttgcctagctttatcatattgtattgtcaccaactcagatattgatgtgacatatctgctcgtgtcacgtgcccacgagcactcatgagggttgcaggtctgcaacacactttggttagctgctcgtgtccgcgtgtcgctggagacatgtgtgcacgaaatcagaccgtatcaaggaagtcatagaatacttccttaaactattccatttggacggtatcccatacagtagtttttctcttatattaaagttaacatgtatagtaagtgagctacaaggttatctcttttttttctcctcctctctctatctcttacctatacatttaatgtatttatcttgaagtatgtgaatagctagctcttgtatgagagctaaccctctccaattttcaaattctctttcattcacataagcttatagttggcttatagcctacaagtatacttgctcttagagcaggatctcgttgtgccgtgcaggcaccacgtcgctgcccagcaccttcttgctcacagaagcagcctctccacct

SEQ ID NO: 4745 - DNA, 6145 bp, Oryza sativa
ggttttcgctcggggtgtatgggttaggtgagcacagtggggctcacctaaccacatttattgcggtttggctgagcgtgtcacgccgcatgtaacgcagtgcagtgcactcatttatccggtctgtgaccagtcacagaccggtcagatcgcgggttaggtggcgacaggcggtctgacgcacgcctcgccccatcccgtcaggacgagggcttctaggcgctcgtccccagctggagctagcgtgttacctcccagagatggcacgttagtcctgatcagatatatgccaggctttatcctaaccattacaagcaagatattgtgtgaagaagggcgaacatgtagattgctaagctgacatgtggtggacaagaatgaccgacgtgactggtctgactccggtcatgtcgtcagcaggcggccacgattccacgtcgcatctgctcccggcgaaagtggaggtagttgtgggccgtcccatcagaaggtgactcggacgacaacgatacaaatctccgtccatttatgaaaaggtgggggaagtccccacaaaaaagagggaaatggtgcatgtggtatccccttaagatataaaaggaggaccttgcccacttagatgggaggtttttttggactggacttttccagattaggaacccagaacaagggagaggctggctcatactttgtagctccttcacacacgaatccaccaaaacacaggagtagggtattacgcttctcagcggcccgaacctgtatacatcgccggcgtcttgtgtgcttcctgtctcgcgaaccttccacagattgggagcttagagtctcacccagggtccccggccgaaccggcaaaggggggccagcgcggtctcccgatgaggagccccacgctccgtcatctggcgcgccaggtaggggactctgcgagtgatcttctgagctctcgcactccttcgtgtgcgccaagcttttcctgttcagcccaatggccgagccagcaaaggcgcacgacctctccccgagtatgagcggtgacgacggggagccaaacccacgccgtcgagctcgtactccaccgccccctccacgccaaagtcctaggcgggagaaggcgctcgagagggctgaaggatccgcgacttcgacatccacaggaggtggagaagggcggcgagatggggagcgtcgcctcctcgtctacggcgacggcagcacgccccagggcgcgctccaagctgcaggcgcgctcctacgtcacccgcctgtcgcccatgacccggagtctccagcccaacgttggctggacgatgtggccaaattggtcatgactgcaaggcagcgcctagatgctggtgggcggtcctccgccaccaaggcctctggtgctgctaccaccggctccgcgttgtcaagacgaagggcgcggcgagcggcagctgccgttcgccattcggccaccactccttcgtcgactccttcgacccgggaagatctgcgtggggggccggacgcccgcaccagcatcgagcggcggcgtaatgaccaacgtgctacccacgcaacggagggcgcttcctcgtccagagtgtcacctcaacacggacgcgggaatcagccctccgtgcccccggttggtggtgtcggctgtagagcctttgtggcgagtcttcggaatgtccgttggcccccaaggttccggcccaccatcgccgaaaaatatgacgggagcgtcaaccccgccgagtttctccaggtctacacgaccgggatcgaggccgccgggggtgacgacagggtcatggcgaatttctttcccatggccctgaaaggacaggcgcggggttggctaatgaacttgccacccgcatctgtccactcttgggaggatttgtgccaacagttcaccatgaactttcaaggcacatatccgcgcccaggtgaggaagcggacttgcacgcagtacagcgaagggatgatgagtcacttcgctcgtacattcagcggttctgtcaagtccgtaacaccataccatgcatccctgcacacgcggtgatttacgcgtttagggggggtgtgcggcacaaccgcatgctcgaaaagatcgcctccaaagagccccaggctaccgcggagctttttcagctcgcggaccgagtggctcgtaaggaggaggcatggacctggaacccctccggttccggtgtggcagcttcggccgcccccggatccgccgctcagacagggcggcatgataggaggaggaagaagaggtcagcccataccgacgacgagggtcatgtcctcgccgtcgagggcgctccgcgggccacccgaaaggggaggcctgcgggagacaaaaagaaggaggccggcgctcccagcagggagcgcccaaccggcaagtggtgcaccgtccacaacacttcccttcacgacctcgcggactgccgtgcagtcaaaagtttggctgagcggacgaggaagtgggaggaggagaggaggcaggagcgccgagagggcaagtccccggcggttccttccggcaatcggcgaagtgaggccaagcagaaggcccccgccgaggacatcgatgacggcgatgatgacctaggtttccaagagcctggggccaccattgccactgtcgatgggggagcgtgtgctcacgtttatcgccggagcctcaaggccatgaagcgagagcttctggccgcggcccctactcatgaggcgacgcgccaggcgcggtggtcggaggttgccctcactttcgaccagaccgaccacccaccgtgcgttgcccggggaggacagatcgcaatggtggtttcccccactgtttgcaacgtgaagctggggcgtgtcctcattgatggaggagcagccctcaacatcctttcccccgcagcctttgacgccatcaaggccccggggatgatgctccggccgtcccagccgatcattggtgtgacgccggggcacacttggccgctaggtcatatcgacctcccggtcaccttcggtggacccgccaacttccgcacggagcgggtgaacttcgatgtggcggacctcagtctgccctacaacgcggtcctggggaggcccgcgttggtgaagttcatggcggcggtccactacgcctacctccagatgaagatgccgggccccgatggccccatctctgtccatggcgacctcaaagtcgcgctcgcttgtatggagcagcgcgcggaccgcctcgccgtcgtgtccaagcccgagggtggcgacgagaggcttggcacatccgcccccgccgccccgaggcagcggatagtcacgtgcgatgaggtcccggtcaagaaggttgccctgggcgacggcccgtccaaggccacacggatcggtggtcttctggacggcaaataggaagacgcgctcgtctctttcctgcgggcaaacgctgacgtcttcgcatggagaccggcggatatgcccggggtccccagggaggtgattgagcaccgtctcgccgtacggccgggcgcgaggccggtccggcagaaagtgcggcgccaggcctcggaacgtcaagccttcatccgcgaggaggtggcacgacttctggaggccggattcatccgcgaggtcatccatctggagtggctggcgaacccggtggtcgttcccaaggcgaacggcaagcttcggatgtgcatcgactacaccgaccttaacaaggcatgtcctaaggatccttaccccctgcctcgcatagatcagattgtcgactccacagcggggtgcgaccttttgtgttttctagatgcatactctggttaccatcagattcgcatggctagggaggatgaggaaaacactgcgttcattacccccataggaacttattgttatacaacaatgcccttcgggttaaagaatgcaggtcctacttttcaacgtactactcgaatttctttgggtagccaattaggacgtaatgttgaggcttatgtcgatgacttggttgtaaagacgcgcaaccaggaaacgttactttcagatctagcgaaaacttttgagagcctccgctccgcccgcataaaactgaaccccgataagtgcgtgttcggtgtacctgcgggcaagcttctcgggttcttggtctctgcccgaggcatcgaagccaaccccgagaagatacgagctatagatcggatgcgcccccccagcaagcttagggatgtgcaatgtgtcgccggttgcatggctgccctaagtaggttcatatcgaggctgggggagaaggcgctacccttatttaagctcctcaaacgctccgggccgtttacttggacggaggaagctgagtgtgccctcactcagttgaaggcgtatctcagctctcccccggttctggtcgccccggagccaaatgaacccttactactctacttagcggcgaccccgcaagtggttagtgcggcgttggtcgtggagcgcgatgaggacaatcctcattccgcgcacccccaccttgtgcagacttggcccgggagagagcagggaggagaggcccccgagccgaacggtggcccaaggcccccgacgaccggagttggccctctgcccgcttgtcagacggtgctaggagcccccgacccccaggaaggccccgaggccactgtgggaaggccgcacctatcgccctttgaccccgaggctaaccctgtgctgattcgacccgggaaagagcagggagaagaggcccccgagccgaacggaggcctaaggcccctaacgaccggagttggccctttgcccgcttgtccgacgatgccaggagcccccgacccccaggacggccccgaagccactgtgggaaggccgcccctgttatcctccgaccccgaggtcatcagcacagaagacaagtgcgccccgggtggctgctcggacgaagagcgccccggagatgtggcccctggcgaagaggatcggccccgccgaaaggtgcagcggcccgtctacttcattagtgaggccctccgggacgccaagacccgataccctcaggcccagaagatgctttatgctattctgatggcctcaaggaaattgcgccattatttccaggcgcatcgggtcacggtggttacatcttaccccctcggccaaatcttgcataaccgagagggtactggacgggtggtgaaatgggcaatcgaactctctgagttcgatttgcactttgaaccacaccacgcgatcaagagccaggccctcgctgactttgtggcagagtggaccccagctcctgagcccgtctccgtccccgaggccagctcggacccctcgcagctgcctcacaccgcctactgggtgatgcagtccgacggctccctgtctcttcagggcgccggtgcgggggtcacgttgacctcgccgagcggagacgtcctcagatacatgatccgcctcgactttcgagcgaccaataatatggcagagtacgagggactccttgcgggactcagagtggcagctggactggggatccgccgcctcctgttgttaggcgactcccagctggtcgttaaccaagtctgtaaagagtaccggtgctctgacccgcaaatggacgcctacgtgcgccaagtacggcgtatggagcgccattttgacgggattgagcttcggcacgtgcccaggcgggataacatgatggccgacgaactctcacggctcgcgtcctcgcgagcccagaccccaccgggcgcctttgaagaaaggcttgcccagccgtcggcgcgacccgaccccttaggggagacggaagcgcctgaccggcccccgaggcccgtcggagtccaggcctcgggacccgaggggagtgctcccagctcccttagattgattgcttggatcgccgagatccaagcatacctcacagataagactctacccgaggaccgcgaagggagtgaacgcgtccatcgcatctccaaacgctacatgctggtagaagggatcctctatcggcgcgcggctaatggaatcctcctgaagtgcattcctcgggaacgaggcgttgtgcttcttgccgatatccatgaaggcgaatgcggagcccactccgcctcgcgcaccttggtt

SEQ ID NO: 4746 - DNA, 98190 bp, Oryza sativa
  unsure (1)..(98190): unsure at all n locations
agcctggcatatatctgatcaggactaacgtgccatctctgggaggtaacacgctagctccagctggggacgagcgcctagaagccctcgtcctgacgggatggggcgaggcgtgcgtcaaaccgcctgtcgccacctaacccgcgatctgaccggtctgtgactggtcacagaccggataaatgagtgcactgcactgcgttacatgcggcgtgacacgctcagccaaaccgcaataaatgtggttaggtgagccccagtgtgctcacctaacccatacacgcggagcgaaaacccacgaggggtcggggcgcctcggccctcggggccgaggcgggtgcggcccgaccccctcggggggactaagaggagggcgaacacatcaccctcgggcccgacgtcccccgagggtgccaggccacgtgggtgtttgtgtctgcctcaaacctctagtcatgatactcctgatcccatgtcaccgacaagatcctatttagttctaaaaacttttcataaaaacatcacatcgaatctttagacatatgtatggagcattaaatatagataaaaaagaaaaactaattgcacaatttgcatataaatcgcgagatgaatcttttgagtttaagtatttcataattagtcattagtgctacagtaacctacacgtgttaatgacagcttaattaggctcaaaagattcgtctcgcggtgtacaggcaagttatgaaattagtattttcattcgtgtccgaatacccctttcgacatccggtcaaacgtccgatgtgacacctaaaaatttttatttcaccaactaaacagatctttatatatatctctatctaaaatttattgtactcgaatatgtcacgttcaatcgtatattcgtttttttaatgaaacagaagaagtactaattaaagtagcagcagtataacggagtacttctatatcttcagaggatcatagcaaggtaggtcaaccatgacactgatagtcgtagcagtagccatcactccggattggaaagtgtagtactagtaaatcagcttttacctttctagccatctcgagaacaaaactgacgaaatcatggaataatcgaagtggtggaaattaagaacatatatccttttttaaaaaaaaaacaaaaggcaaatgtgtatcgctggcatcaaattacagcgtaaatttttattctctacgtgttagactatatttttgtggataaccattgaaattggttgttaaatagaacacaaatgctggagaagggtctggaaaaacactaggctttttagggagaaaatggtttcaatctgttcaaaacattacttaattgcttagctggtcaatgctacgatgctacgatggcattcccaattcacagttgtgagagttagtagccttttttctctaaaggaaaaggatgtagtcagtagccttttaggtgagcgtttgactcgatctaaaaagcttcggatataccactcctatagtaacaaaatccaatagggactcctctgtcctgagtcctcccgactccttagggcatgtacaatacaagccataagtaacagtggtcttaagataccacgtaggatagaaccacataaaggtcacacaacccacagtggtaatcactccaaaacatattttgcatttcagctcctatctatttatatgttagcccttgtgttgtatgttattatcaaacctattaaaactttatattttagaccctataacaaccaaaagaaatacatatgcaccccaaaaaaccataagaacccactgtcagcctcttccacccctcttccaccctatttcttttttactctcccccttctctctcccgttgcccttctcacacgcgaccgacccgctcctccaatccccttctccacctccaccgatgcctactccaccccgccggcgagatccctcccctctccggcggagctcgccagcttctcccctcccctctccggtgcgagacggcttctcccctcccctctctgccgcgagacggcttctcctctcccctctccgccgcgagctccccatcagcggcgctcgagctttggtggtggcagggagcggcagcggcggcggatctggaggtggcgttgagtagcggtggtggtggatctggcggcagcgttgagcagcggtggcggcggatggctcgacgccaccgtcctcctccccccacgacggcgcggacgagcttgccagatccgggcgcgggctcgccggatctggcagcaggggccataacggcagcggttcctctcctccttccttcttcgtgaccgtcggcggtgaagagtagcggtggcggcggatctggggattggtcgaggcgacgcacggggctccggctccgccaacgcgtggccttggaccgtggcttcgcccttcccgagcccaggcgcggcgcttcgggcggttcttctgcaagcgcgggatcggcttgcagagccacggtccccactgccatgggtgcgcgcatccgacgtagaggtttgagaccacaagctagggtcacgcgttgtacatggccttagcatcaggaactctgttcttaaaaaaaaggtttttttttacttgccacttataacaatcatcaaagaaaatatttaatatttactatatataattttaattataggtaacttttttacgtacgttgaaaaggatgggggtaatgtctttttcatataagaatagggagtagggaaggaggggagagaggtggatagcctagcgacagaatcagttcaaggtgaagttcatattaagagatgaagggagtgggagattaagaggccggagaggaaaagggccacgacggggtggacgtctatgagatgcgctactgtggattactatagctgaatatgaacttcaattttctcgttttctgttaacatgttttttaatttattaaatgatatgtttattataaaaattttctatagagaagctgttttaaaaaaccatataaatttattttttaaatttataataattaatacttaattaatcatatgctaataattttttctcgtttcccgtatttttttaattaaaacatgcgtggacattttacatacagtaaaactaaatcttcatcacatgaaaatgatattagaagatttatcattggaactattatttttagatcattgcatttttatgtttcattataacataattggaaaaggtatgtagcatattttttaaacaaattcatcaaaaagctttgctagaacatggcaccaaccaaacaagggggaaacaccagcggaaaaggtatatgtatagcaatcaaatacaaagcttaagtaaaaacatgagagagtatataggagtagctagtaactagttttgggggagcagcaaccagagtcgatgaaaatgcataatattcaagccaggcgattggtgtgtggaattgtggataggaaacgatcaaggggtggaaacagccaggctgggggtacagtactggtacagtacatggaaaaggcttgaaaggggcaaatgggatcagatccagcaatcagcatacatgtacgatcatatatatcagaccaaacatacaaactggagttgctagttgctacgaaacaaacgacttgatcacgagagtatccatatcggagggtatgcatatcaatgcatgcatatatgcttgacaagcaacaatatactccctccgtttcgaaatgttttgacaccgttggctttttaacacatgtttgaccgttcgtcttattcaaaaacttttgtgagatatgtaaaattatatgtctacataaaaatatatttaacaatgaatcaaatgataggaaaagaattaataattacttaaattttgtgaataagatgaacgatcaaatatatgataaaaggtcaacggcatcaaacattttaaaacggagggagtataatgcatcaagaattcaagattccatgcgaaatttgtgatacgaatgcgacgcttgcatacatcaacaaataatgctgctagcacatgcagatgtagcagacgtacaccagatcgatcgatgtgcggtgcggatatatatttaataattaattttgatcaattagcgaatagctaatactccatccgtaaaaaaaaaagaagacaaactctggattttcgtgtccaattttaattgtccgtcttatatgaaatttttttataatttatattttcattgttgttagagacacggaaataagggtttgtttattttttggacggagggagtatgcagcagctggccgggcatgcatgcatggaccttcgtcatctcctgcacgtttgcgacatgtgattaacaatatcccccatgcattttactttgttgtttagctctcgtaagtcgtaagttttgatgcatgcatgcaatacaagcagctagacttaactagccgtgtggttttaaccttaagcttccgtcttcaattcccaaaacactcataattttttattaaaagaagtgtcgggagggacatctgtccctccaaatctcgtcttttttttacttaactagcttagggtagggttaaaaatggttcagaaaatttctgatttcagacacatgtttttagaaatggaaaatatcggttagaatttttttttttggaaattttggaaacagaaataaattcagattttttctagaatggaaacgaatacggtaaggctactatccgatgaaaactagaatcgactgaaaactttctaaaaacaaattaaaaaatgaattcaaaacgttgtagtattgacaacgtttgcccgtgtagggagccttgcttgatcttccagctcgctactattttgcaaggcttatggtgaatagcgttggttgaacctggctttttctgtttttcgtagccttgtagtttagatttgtcattttctattaatttggtctagtagttgtggttttcttatagttttccttaattaactatgcactgtaaggtttggtcacgcgttttctcctcaaaataaaacaacttctttttttatataaaacgccggcaacggtctgaccgtttgaaaaaaaataaatatacgccgtttcttattactacaaaatttccacatatcattcatatctggatcgatatatatctatctactgcatgcttaggacaattaatggctaattgatcgattgagaatgatgcatatgtgctgctactatactggattgaataagtatatgatcgacagtgaagtttaattatagctgaatcgataagaggccgtggatcaacggacgttaattactggcagggtcgtgagaaaatgacatgaatatattatatatataatgtcgatctgaatagcgtgcaccgccctgcagggcgctggtcgtcgacagaatgccgattatttcgggcgacaagcagtaaaagttcaaactatatatggactatatatatgtatactacaacttaactatcacgtgcatgtacctgcgaccacactttgcatatccatcatttcgaattttcgatggatggatcgatcgatataatgtttcatttcttgaaggaaactaacatcgggagtgctgtttgctatagtgtaacttctggcgtttcatgcatgtcccgtgatacaccagtaacaattaagtacaacacaactcttcggcacgaatttagctaattttgctagcaatttgcttgttaattggagcaaattaacagctcatgagtcactctactgtgtacgtagtgcataaatcctgttccggcaggcgtgcataaatcctgactgtcgaaacacatgcaggtagtggtggataggcatgttggagttcatagtcataatccatatttttctttttggaaaatgaaaatcaattatttgacatttacttaaaaaaatataatcaattattacatagttcacaggataaataaatgtggaattactacacaattataacgaattaggtaggcgtgcatatagctaggtacgtagctaggcttatatatggacgtggcaatattctttgacatagccatctacacttgtacagtagtaacacacagacgtgcatgcgtgtgcctggcttcttacatcgatcagttatcgtactgtagactggccatcgtgcaatgaccaatgcatagtaaatatgcacccaatcgatcaaccggccggtcagaaccaagtccatccagagcgtgcagtggcagtcgcgcgacactgctactgtgcaagctgtgacacacgcacgcatatatacatactacaggtgtatcggtcattcacgccccaacagagcgtcacctcaaccctatagcttacatcctccagtcgtcctagccctggcctgactcgagattgatcattggcaccatcatgatcactttattatttattttggacaattataaatttaccactcgtttaaatcgttattacgaaaatatcatagaaaattaaaaaataccgctagaattgtcatccattcgagttaaattgttacaaaattaaaaataccaattataaattttcaaatgcccctatttatttcgacccatccctacctcttctgttcttaaaaaatattatctatctccacttagtgaaatactggaactagtaatctcgctgctacgaaaatagatatttatactccctccgtttctaaatatttgacgttgttgatttttttaaatatgtttaaccgttcatcttattcaaaaaaatttaagtaattattaattatttttctatcatttgattcattattaaatatacttttatatatacatatagttttacatatttcaccaaagtttttaaataagacgaacggttaaatatgtgctaaaaaaatcaacggtattaaatatttagaaacggagggagtaacttataatcacacctaaactgcacagtcggctaaaaagggtgagtggtgccacgtgcttgcccttatgacacatatcgactacccaggatagccaagctagatcgatatggtgcccatatattattaattgtatttgttgttcttgtataaacaattaaatatacaattcatccgatcttaagtacgtttgagatctcataataaacttattaggttttgtaaacttattctcaatagtataaaatagtaaccgagattatacttcaatgactttttcttttgaacgactcgcactaaacggtgcgaagttttattgatagagcaggaaaaaattacaagattacaatcctttataaggtcataaccaggaaaaaaaattataccaccacccacacagcgacagcgtcaacacacagatccaggagaaggctagcaccggaccggccgctgctaagcgtgatcgaccgccgctagaccaacaacagaacactgccgagatcacccaaaacccgacctatacaatcaacacaaaacccaactctatccaagacttcacgatttagggagagaaggtgagagagaagatgaaacacctctcccctagacactccgacgtggccaacttgtagaaactaggacgccgctacaagagggctagaatttagagcgtgcttgcaccaattgctcgggggtattggcacacaacacagtattaattaagtattaaacattacaaattaaatacatgtggtttcttatatataccatgtttaaccatgaacgcatatgcctgtgtgtatgttaatggatttactgtatatgagatggtcacgagagggttatgttgttgctggttaggcaggcaggcagcagtagatgggtagttaattctcgatccactgatctgatgtgagtcgcatgccagcgacgcttggcgtacatgcatcgtgttccccttgtccgttgctagtccacaccaccttggtatgagctctcctctgcagctttccccttgtatacttgctttgccctttggaataatatcgatcgtcttgcgctctgtgtaccatagtacttgtacctgcctgccaccatgtgacactgcgtgcttcatgtctccacccatgtaaactcttcctgccaagaacgatctagctagctagtagctactcttgtgcatcatagattaattgatcagttggggattggacaattaattagtcttaaatatgacttttaggacaactacctttccaatgtataaatattataatatttaggaattactagtactaattgttagtagctagcaatagctatacatatatgtatcctccatgtcattgtaaataatgttagtgcctgtttgggttagtgccctcgtaaaattttagtagtgcaaaatcttagatatgttatggcactactaaaattattattgacttggggcaaaggttgaccttaatccaaatatgtaccgtgctatattaaagttatcaaatgattcgtaggactaaatttggtatccaaccaagctatttcgcagtacataccaactagttaattagcactagctactatgagaggcttgtatacaacccgtctatttaaaaaatatataatgcatagtaaaatgttcttaataagtctatatatgcgtgtgtatattaattaatcgtaaccattagattaagctctgggcatagagtccagcaagaaatatatatgtaccaacccatgcaattaagctaaccatataattaaccttgtaagccacctgctatataaggttcagaaatttgttgtgatattttttgggtaccggtaatttataccccccataaaatcgatttttttttaaaaaaaaggaacacatgcatttgctgcttcttcttttcgatctggaacctgccgtcgatcgatcgatgaagcatcatatctcatgatatccagtcacgaatataaaggttgccacacctgactggttcctttcattcgcatgtatagcaaagtacaagctggtgatgatgctggtctgattagtggaccgaccgacctggaatgaatatatacgacctctcagattttccttcaaaaagacaaacgtgtcgctctagtacttagagatgatattcttgagatgcatgctcctctcattgtctgattgttagcttatttcgaaactccttttcaagtttatatttttattttccgtgggtggccaaacaactgtttttaccagttatgctttcgaaacctcaggagcggcatccgatggtggggacggcagtggggagctttgggtggttgccaccggttggggggagcagcatgtcggggatagaggaagggcggcgggggcaagcggagagcgggtgtggcagggagcgaagacggcggcatccgatggtggccgccatggattgggtaaggtggggggacctccctgacaacgtcctcctcagtgtcaccgcccgcatctcctaccgcgcgccacgtccgcattgggtggagccgcgcctcccaccgcccttcttctacagctggatcagcggttgtcgccgccatggtgtgcaggctggctgcgtgctccccctatgccctcgcgccgatacaccgccgcctcctccccctcagctgcgtgcacggcgccgctcgctcgagtggacactcgctctacctccgctccatccccgtgtgctcccccctcaaggcatgtcgcagccacgactctgcccacgtcgtccgtgtggcggccgcagaggcaagctctctcttcccccacccgcggcggctgccgtccccaccaccattgccaccgccgcctcctccccctcagctgcgtgcatggcgccgctcgctcgagtggacactcgctctacctccgctccatccccgtgtgctcccccctcaaggcatgtcgcagccacgactctgcccacgtcgtccgtgtggcggccgcagaggcaagctctctcttcccccacccgcggcggctgccgtccccaccaccattgccgccacaactcaccgccatccccaccgccgctctggccaggtgaagagaaaggccgggggagagagagataagagagagggggaggaggaagaagggaatgagagaagatgacatgtgggccctacatgtcagtgggtaccacaatattatttttgtgaatggcaaataagtcatgcacattcttttttgattttaatgccacataagcgtcacatcaacgccacgtggaatgaagacccggtcaataccgtcaagtaggtgccacgtcagcgaaaccgctctctaaaaccaccaagggagataaaatgcaccggttttaatagttgggggcccggtatatgcgaaacagattcagccattagtgaagggagtaaaagtaaacttattctgaagaatttgagttaagcccagtgcgtatctggacccatatctgccactgttcctttttgttttgaactccaattttattgggcctgaaattagtaggcctacgatatgctgtgcataccattatacacgtgaaatgtcattttcgtactactgtagtactttacaaatatttttgaaagtgaaactgatcctgagtttcttctgatatttccaaacctccctgcgttgttctcatcctcaggccctctaaataacaaaatgttgcaccgcagtgatgactgcttgattaacaacatgctagtatatggttatttagctttatttttccaagaactatgtttaagctttgcactatgtataaattttataccataatatgcaattatccacaccatattatcagctattcctacatctatctcaacggtcaccaattctagaaagaaaaattctccgatgatcgatgatcatacacccggtcgtgcccatggcctacgcccactggctgtcctctccgccatcgccacgctgtcgccgccaaaatccaccgacatggctcccgctccagctcccaccactgccaccggcctcccgtacgcctgcagcaccagcaccgacgccgtcgtctggaagtccttggacgccagcaggtcgccgatcggccccagctccggcgactcgctccactccgccatccccgccgtcagcccggaccccccgggcaccttcccgacgacgaacaggtccttgttccccatggcctccacgctctgtatctcccccaccatctcgctcgcgttgaacacgccgcgctccctgtactccaccgtcgcgccgccgccctcgttcgccctctctaggaagtcacgcaggcacccctcgtcggccttccgctctttcagcgcgtcgaactcgcttgcagtgaagcttcctcccttctggacgaaccggagcaatgtcaggtcgatggtcgggttcctcaccatgcgcgtcgcaagcgccgccacctcccggtcgtcgctcccgccgaagaagagcgccaccacgcggtacccgccacccggcaccgcggcgaggccacggtccacgaggatgcccaccgtgcacggcgagaagctctgcacgttgcagttgagcggctgtatcgccgggtgggacacctccaggccgccgtccaccgaccggtacttgtggaacgggagcaggatgagcgccgagtgctggttctccgcggcggaggtgatgtcctcgtgcatggactcgtacggcgagacggcggccatggtgcgcgccgacacgcccaccgactgctcctcgtacgccatgaaggcgtgggagatgtgcttgaactgcatctccgtgtggctgcgcccgtggacggaggcgtcgtaggaggacgacgacggcgcagaggcattgatgaggaggagcgccgaggagcggccgacgaactcgatgaggtggagggcgaggacgcccacgggcgaccggctcgacggcgtcaccacatcgaggagcgtcagtagcgcgggcacgtcgcgcggcacgtggacgcaggccagcacgcggagctctgattccgggtgagcccacgcgaccgtgcgccgcttgtagaacacgaggcgccgcgccggcttcaccaccatccccaggaaagggctcaccatcgccgtgatcagcgccgacacgaacaccagcaccgtgaacgactggtcactcatgatctacacaacacaagaagctacctacccttaattaatcacgacatgcaatgcactgcatggcgatcgattaattaaaatggattacccctttgttccttgcaatgttgaggatgacgagctcgatgatccccttggtgttgagcagcagcccgatggacgtgccgtcactgagtggcatgccaaacacaccggcgacgccgattgcggcggcgaccttcaagaccgcagcgaccatggcagcgaccatgagcagcacggcagaatgcatgttggtgatcttggcggtgtcggtgcggaggccgctgagggcgaagaagagcgggagcagagcacccaccacgaagtcctccaccttctccaccagcgccaccccgaccggcccgttgggcacggcgaggccgaacacgaaggcgccgaatatggcgtgcgtgccccctgcgtccgccaccagcgccgcaaccatgacgccgatcagaatccagcactcgcggtcctcgccgaccgcctccccctcggcggcgcgcctcgccagccgcaggagcatggggcggagcaggaggtagctggcgccgaagatgacgacgcccgacgtgagcgtccacgtggtctgcgtgatggtgcagcgcgagtggccgagcaccgtggcgacggtgaggccggtccaggcgaaggtgtcgttgatgagtgatgcggagagcgtgagctggccgacgtcggtgccggcgagcttgagctcggcgatgttgcgggcgaggacggagaaggcggtggaggagaaggtggagccgaggaagatggggaaggagagcttgttcaggaaagtgtcacccttgcgtttgtcgtcagtgctgagcgcgacgtagccggtgagggcgccgacgaggaagggcgggagcgcgcagccgacagcgaagccgaagctatggatgccggcacgggtgatggcggagacctcgatctcgacgccgacgatgaaggtgtagtagacgaggccgaggagggccatggactcaaggacgaagaggctacggacagggaagacgaggttggagaagtgagggaggtggccaaggatggaggggccaaggaggaagctagcgaggatctgggagatgtaggtggggaggcggagaggggagaggaggagggtggcggcgcgggtggtggaggtgatgaggaggatctggaagaggaggagaggtatggagaagtcgagcgggttgtcgcccgtccagacgccacccatggtgatcttgctcgggtagaagcacatcaggtgcgtcttgtccatcgacattgtgtgattccatagctcctctagtggatccgtcaccgtatgcgttgccattgatgaattccttgtttggtatcaactccggcaatgggtggtgttctcaggtaaggtgaggtgaggggaggagtgataagatacaccatcgatcactcgttcgatgtgagggaagggaaagaggagtgtgctatttttggatttctgcatgtagaggtttagatgggttgcatgcctatcaaaggaccacaatgggaggtacaaggtaccactaaaaatcaaagtgtttacgttgttgcttcacaaaaaataatcttaacgaaagataatctcacatagagaaaatggaggggaacaagtaatgttgtttattttttactccaacatcttttttttactgtcatgttgcatgttttgcttggcgatgtatcctttgcctttaatatccctctccccgcaacgcaaaaaatattttgggtaattggctacggttgtgttctttcccgtaagtttcttactcacatccctcattttccacgtgcacgtttttcaaaatattaaacaatacaattttttgcaaaaactttctatatgaaagttgctttaaaaattcatattaatacattttcaagttctttatagttaatacttaattaatcatgtgttaatctatcactccgttttatgtatggaggttaccaaccccttcaaaagaacacaacctaaggggagtgcctagggccacaaaataatgattttatttggaactagtgcgctatgttggtcaatctgacgttgtcgtaacgataatttttaaccataagaaattatctaccattatgtaggttatctttatgtgttccaatcgacttcactcttggtgtatgatgctttcacaggaacaacatgatgctatgcgtactggtgttgcactcttggaattggtagccacggagcttttattccagtttggatggtgtagtacctacgaaattttatgctagaatctatgtgattttgaaaacgttatttcagttgatacttttattagtggaagttgggggtttgtcccatcacatcttttttaattctttttttttaacttctgaaacttgttggatgtgttttctttctttctactgaaactagctgggtggcccgcgtaattgcgcgactagcacccaaacaaaatcatatattttttcgtatgattttacttaaaattatttaaatagctatcttattgtcttaagactttgaaagaacaaatcttctcatccccgaatttctaattaaatagtttttgaaaagtcacaccagttactacccttacttatgtcatatccttttttatttgcttgctcgatctactattatcatttattctccttggaaccttttaaaaattggatcttatagtttttagagtttattgtctcattgggtttcgtttttataattcctaaaagtctcatcaaacgccgccattatactcctctacggcccgtccactgtcttttctctttattgtcattgaaattttaaaaatcgaacataattatcattcgggttcattttttactttctagaagtcccgccaaaccgtcagcggctttaccattgtactcttttatggctcgcccgctgtctcccttctttattgtcattaagattttaaaatcgaatattattatcattggattttttttttactttttagaagtttcgaacctttaaaaattggaccttatagtttttatagttcactgtcttgtagggtttcattttttataatttttagaagtcccatcaaacgatgccactatactcctctacggcccatccgccacctagtctttattatcattaggattctaaaaatcgaacataactatcgttggaattcatttttttttattttctagaagtcccgccaaccgtcggcggctgctgcttctcctttttattgtcattaagattttaaaaatcgaatatgattatcattggggtttattttttttttattttctagaagtcccggcaaccgccttgcctgtttgcttcatggcctgcccatcgtccctccttttaatcgtcattaggattctatttggtgttttattaacagtttttatatgtcgtatcaaccgccaacactctactcctttgtagacatgttacttaatttatctcgtcatgtgttttagatggtattttctttcaatagttttttgtcactaaatttagttatttataaattgtattcataactgaaatctttttttctttttctaattttagaatttatttttttttcaaattttaattaattaataccgtataatgttctttaaatattcttatttttttatttttgaattttagttgtttcaaaattgtattcctacttaaactctcttttagtttttctaattttgaatattattttattttttattctgaattttaattaatctcgtattgggtttttatatggattcttctttcaatattttttatttttaattccaaattgtagttaattttaaattgtattcctacttgaacttttcttttctctttgctaattttggattttatttttattttattccgaatattaattaatctcgtattgggttcttatatggacttttttctcaatattccttgtttttatttctgaattccagttatttctaaattgtattcctatttggactctccttttcttttctaattttggattttattttaattttattctgaattttgaataatctcgtattgggctcttatatggactcttctttcaatattgcttattttttaatttcgaatttcagttatttttaaattgtgtttctacttggactctttttttttctccgattaatgtggaaatttctagcctccacagcgaacgtggtgccttctttcaaggctgttttaataatataatagatagatagatagatagatagatagatagatttgttggctgtgtatccatgagtagaaggccagagatgtaatatattttcattatattatatatatataaaatagttctaatgggtctctcttacaagaaggcccacaaaggcctactcctcctcggaaattttgggccgtttgatttgtctggtggcatcaccatcgttgccggcagtgtcacggaccggaagcagtttgcctctttcagggttgagttccacttccacaaacggcggtgagcttccgggggcggtgcagggtgcggccgcacggctcggcgtcgtcaatgcgggcgatggtagcctggtaggtaaggttggtatgctccgctcaggcctgggggtaaggagtttttcttccccttcttttcccaatattcttaaggtcggggagagatgctgctgctgcatttgctgttcgtttgttcgcataccaagtgagcctacgcgtttcttttcaggtttgcactcgtctggggggatttgagagtccttgagcaagtggatccgtagctttcgttggtatgtaatgtggagaattgaattttctaaagcatacatgtacgtttctgttctttcgtagctgtaccgtacacggtgatggttctgaccagatttcgctaagaccttttcttctatgctattagcctattattagccatgtaggagttggaattttactccatttggcatcaattcaatcctttcaagaaaaataactcatggagcaagactacttctttgtttgccttttagttgtatgtgaagtttatcaagctgcagttcacccccccactttggtaaaaagacaccaacagcatcttgtatcatcccatcatcatttgttaagacgaataatggcagatcaactacttgtcctaaaaagagaagcgcattatttacaaaattgtcttaagagcttaatttgtttcaagtaagaaaaatgatgggatgagtattaggttcagacttcagtctcagagaggtgcaggctgttgtcacaacaagctttgtagagtacattcaactaaccacatgaacgtggagcccagggatttgccaagatatgcaaggcacacctaatccaacataacctactacagttctctgtcatcagaaagttgaaagtgtttcttgtgttgtatttatacccctcttttggcagtagaatagtcacagtcaaagtaatttgcttgaaatttattcaacaaaatatatacaaatttcacatagtgaatttgatattttatcttgactgatacctcctccctttcatctgcggtagtctttagtgtacaacacatgcttttaagaccttagtgtttttaggaagcaagttgataattacaattgtttatacttgtaacaacaaggcttgattttagcattgaaagtatctttccagaaataaaaacctattgaacaaaaagtggtcacacataggcaaactgtcaaacatggagcaagtatctcaagacagtgatctcattgaaactgtccttatttctttttcgtaagcgcacaggtccacttttatcttccttcacatgcttaaaggcttaaagctatccctgctgtttcttcctacaattctcaacgaatctgactctaacctccatttcctttactttcccctcgactcctcttggtctttcaccctactggaacgaccatacagatttagccattaatcatccacctcttccttcctaacataggccatcatcatctgacagtaagaatccagaggtgggtgtgacaagaagatgctgaagaaactgctatcaaagcctaagagcaagaagaaggaggctgcctcctctgcgctccccactttggatcgtctccatgaggttgttcatcccttttcttttattccttttctattctcgattactttgtattctgtgttgtctccgcagaaatttatcagctgtgggactattatcaagctatctaatgttagcatgacggggttgggagtttatggctgcacagtttgaagagatagctaattagttttagtatccccgaagaaaagctttagtaaaaaagaagggtttattttaacaactgaccaccttggaaatatatggaagcaaaacctcatgaccatgcattgcccaagtaaataggcaaaccaatctcatgaagctaccctgaccatcttatgttgaaggcagcaatgaatgtgattgactgtgtttctgtgtgttcttaaaatggatctctagaagacaatactgaatgaaaaagcaatatcttaagttcagttttgacatggccaaacttgctagccagttgtatatcttgactgttagttgcgctgcatctagaagaatatacttggttgaatctgggattcctctagtcaattttataaagcactttcctgttaaaacttacaaggaaataataagcttataagctacattgttgatggtgacacttctgatgtactcttgttcttagtctttatcactatgaagttcagtctacctctcagtagacatataataactttaaaaaaaatagtaaagtatgtttgaggaaaaaaatcattgccttatgaaaaggaaaaacaaacttcatattagggtgatcgctattgttccagcctagtccctgctgaagtggtatcaatatttatgccttcggtttgctattgctgcatatagtatcacaacaaaaatgatgtataatgttgaagagagccttagtttagctaaagaagatggaaatctcttatattctaaggagctttcagctgatactaacgagataattgctccagttataaatagaactgattttttttatcttatatgtaccattcactgcggcctaattttaatacaatttgcatgtgcagactctagaaatgctggagaagaaagagtgctttcttcagaagaaggcttctgcagaagttgaaaaggctaaggattatacaaaagctaagaacaaaagcggtaagcatttctttcaagaaatttttttgtttgttaagaaacatttacacttatatcacattttttatgtaaatgtatataatacataaacttgttgaagatgtttgtttgttatgcattaatacttgaagaactttgcaactaggagattaagaagcctgtaaagaacaatagcagttaccctgttttgttatggccaaatacaagcttcctggtcatgtcttacattacccatcaactcatgtatgataaagagtagaaaatatgtgggtcagtaatcttgcacatcaactcatgtatgatacagagtagaaaaactgtgggtcagtaatcttgcatgtgtacctatggtaatggttccttaatgatgagaaaaatatttctcaagcttgtgacacttctataaactatatgagagagtacctgtttgttgcagctgcaattcagtgtctaaagaaaaagaagctgtatgaaacacaaattgagcagctagcaaatttccaattgcgagttcatgatcaggtgatgagatatatgggcgcatattcaatcttgacttttgaagcattctgatattccagaaggttgttataaattcaaattgacaggaaattgtttgttttggtagataataatgcttgagagcgcaaaggcaaccacagataccgttgatgctttgcgctctggatcatctgctgtcaaagctattcatcagtcagtgtaagtctctgattgccctccattcatggtttctgaaattgaatcgttaatacaatgaattcagaagcataagatgctctaaatgccaaatgtgtgtacatttctactgtattgttgttccttttgtctttcacattatgaacttaaatatagatacaaacttatagcaagtagttaaaatcagcaagagtgtcagttaatccatacaggaggcaacagtctagttagcatcaggcatgtgcttggatcaactgataacaacatttctttcacaggagtattgatgacattgaaaatgccattgaagaggcaaatgaacacacagaaaatatgaggcagatacaggaggcacttgcaacaccaattggcgcttctgctgatttcgacgaggtactgttcatctatctctttcccctctggcgtcaattaaaacgtgtgcaagatggtattatctaactcgaaataggcatgccaccaagacacaaaatacataattgcacacgatgccaattttccgaagatgtttgactctcatattttctattttgaaggatgaactagaagcagagctggaagatctggaggaggaagagctcgaccatgagctgcctgaaccacctcagagtacacgcatggaaccatcagcgagagttacaacttcatctcaaccagccaatgatttggctgaactgaccaaacttcaagcagagatggcgctttaatcacagtttggagggatttgtttgtattttgctgacatcctgtttgtgtagtgtactcggaaataacatgttgtaaattcagtttgttgtagaaaaaaacccttccttttataatttgttcttttctgttaccttgcttcctaaacgcacgattttttttttgcctggtaccccataaatgagttgaaatcgaaaccctatgcctgtgaatgagggaagaggaagaagcagaggttcagtaacaaccacacaaaatgccccgattggactggcttccaaagtcttattaattttgtgttgaaaaattagtttccagtttcattcgtagttttctgtatagttgagatatttttgctattattctttgaccacttgctggaattggtgtcagcgtcacactgtcactcatacttgtcccgggtaacaaggaaaaaaagaagaagaggaaaaccttagtcattgtgctgagtgctgactatgttacttgtttcattgggtcattcagatcaagtttccttttgcatacaccaccatcacgaaggcaagaaatgctagtactccgtattcaatatcaacaatagacagtagtagtatctttaggcctctctgtttaggcttataagctaacttataagtcgaaaagtctaagcctaaacaaacaagcagcttttccgtttagcttttttgaaaccataagccactctaatactattaagccaaaagctaggttggagaagcttttttggcttatgtgaggtagatgtatgactcaactactaaacttaggacattaaatccaccggcttataaatcatataaaccaataagctgacttaaaagtctaggccaataaacctaagcctaaataaagagggccttaagctagaaacagaaccaaacacgtaccaaaaatgtcattttcagcttcatcttcacatttgaggtgctccacctgagtgtatggggctcgcatctgatgctggctgcaactgaagcagcatatgggcagcatatccaacgtcctaatcaatcaacaaaagttccatccgatgatcttagctacacagcacattggttagaatttcctgccatcgagttaattaatcatccttcaacacgaaaaagcacaacatcatttggtcggtcgggcggttagctgaaccaatccataaacccccatcctcatgctaatgtcgtgttagtgtgttgttattgtcgtttttattttcgacgccatacgtggattagtacagagtacagacaacagctccctccctgacgcgtgggccaaacctggcaacttcttcttctgctatgccacgtcacaccgccatgtgggaccacgctgattgactcattggtcccacgtggcagcgaatccccctcatctctctcgcggagctcggagagacaagagagagaaccagaggcttctcttctcccgcatctcccaccctgatctcctcgcgtcgcgccctcccctcacctcgaatggcgatacctcctccacccacgcgccccaatccctaaccctagatccctcctcccacgccctctcgcgcacgaccaatctccctcttccttcctgttgtgtctctctcgcactgtccaatctcccaattcattatggaggcgggggcggggagcagcagcgccaagctggtggcggcgtgcgtcatcggcgggatcgtgctgggggcatccgtggtcgcgctccacctcgccggccccgtcgccattcccgccctgccgcccgtcgacgcgctccgccgccggttccgccgcggacgacggcgccccgtgcgcgtctacatggatggctgcttcgacatgatgcactacggccactgcaacgcgctgcgccaggcgcgcgccctcggggacgagctcatcgtcggcgttgtcagcgaccacgagatcaccgccaacaagggcccgccggtcacgcccctccacgagaggttcactccaaaccctttgtcattctctttttaaaaaaaattcttgaatgatgcacgatgtaatcctaccaaactgttacctgatactggttgtgtgctttaataatgatttaggcaaatcagcctataggtagtgaattttcctctacatatcttgcagtgttctgtgggcatttcaagttcttaggggtaactgttgtgggttgttccttatgggcgatcttttacttgggttaatggtttagtcgagaagctgttgcatcaaacttcctatcttctgtttcaatttcagctgcacactgattctgtcctaatcatggggaatatgttactgcttttactatttcataacttaatttgtatcgcacactgatttgtttcagtttcgactctttagttgcgttcaatgtactgttgcacaatacaagttactagtggagcacttttataaggatatccttagattagtttttgaagctgcgacgttttccccccacacatcatatatgtgtctgtcggtcttaattcgagcactagtccagtaattctatctggaaacttgaaattgctaagggaaatgttgtgacatgtgggttgtagttagtcgtcggaccaagtttctgataactttggtggtggatgagctgcttatgtttctctaattcatttgagtacggattcaatatctgagcagtaacgaaaaagattagctctatttcttttgggtgcctgaaggagaaactcagaaaaaaaaaggtttgctctgctgaaagtactaaacaatgaatttttggtctgtacattcaaacaaatccaaaaaacttattaattcctaacgataaaccatactagacttgcaggtttggttctgctcagtttgccttaagtacctgctaagtgattccttgctttcctttgtcttgttgataatcacaagctgctcacatatgacatggtatgtgtggcattttagatgttaggtgctgcaacctttttttcctcatttaatcatcatcatggtggtttagcaacactataaatttgttatttttgctggttttcttttgttgtttactgactttcattgtgtctggttttccagtttaggagttactgcacatattgttttttttttctttctatttttagttgtgttaccaattttacgtgtgaccccatgtcatatggaattttaggcatttttgttcttttagacttgcagttttgtttctttgattgtattatgtattatcatatacccatattttccacttcaaaaaaaaccattttgtcttgaatgatttttttatgtttctttttctgatatacaggttgataatggtccgtgctgtaaaatgggtacacgatgttattccagatgcaccttacgccataactgaggatttcatgaataaattattcaatgagtataatatagattatatcatccatggcgatgatccttgtctgctcccagatggtactgatgcatatgctcttgccaaaaaggttggtcgatttaaacagattaaaagaaccgaaggagtgtcaacgacagacattgttggtactgattctgttcttttctgttttaatcattaaagtttttactcatagtgaaatttaacctaaaacttccatcgcaagggaatatatggttcttgttatgtactacaactttacaagttatttctttggctcaataccatagcaatttccaacattacaattatttctaggtcaaccaaataattgtttgtagacaagatcagtgcccacctgatttgtcctgaagtggtactttaggaaaacattcaaactattgctttattattatatgatgaactgataagctattaagctctccagacaattaactacataattcccttctgtatcaataaattgcttatggtcatgaataggttttattttcatgctaactgcccagctcatctttctagtaaataaactacaggaagaatgcttctttgtgttagagagagatcagcttctgatagtcacaaccactcttcactacaaaggcagttcagtcacgggcatggccagaaaattgatgatagtggatctggaagtggaactaggatatctcattttcttcctacatctcggagaatagttcagttctcaaatagcagggtacagctctttacattctttcacagaggatcattttctgaactgctcatgtaaaactttgaatgtcattttttttgagatatcatattttttgaaggcatgaattaaacattgacagcataaaaatgcctcatagatgttttttttttttgcctttaaacagtagagcgcgagttatttggctttcaggatcctgttaccattttactaatacttttgccatttgaaagacatttgttgtttggttgcattctttatctagtaaacattgagttgaatgacctgacgacaaatggattatttcacaacttagatttgttctgaggttatattagtaaagaatataagttatatccttgaacttccaacaagaactaacatgctgctaagctcaactattaattaatcattgcattagtcgtttatcatttatttcaagctgtttacatttgatactattcactagataaaactacttgctgagtacggccacttattctttctgttgactgtcagctttacctatgcagggtccaggtccagattctcggatagtgtacatagatggtgcatttgatctattccatgctggacatgttgaggtaaacgcaatgtcaaatgtctgtctcagcatgtagagcaacttggctatgcatttgttggttgtatggttttacctgtggttttccttttccttttctttttcttattgcaagggtgcaaactgaaatgatctctctaagacatagtgatttggacttcctgtgtatttatagtttcttctacttagatattgcgcctcgctcgagagcttggagatttcctgcttgtgggtattcacacagaccagactataaggtaataatgatggttttttttttccactgtctcaatttttccaagttacaatgcttggtactgtttttcagttttgcatcttagtttatagtcaggttgtatttgtattgaagcatagcatctctactcaattccgtcgtcataacattctgtttttgggggcacttggtgtttaccgtatttgccagttcaacaagaggaccacatcgcccaatcatgaacctccatgagagaagtttgagtgttttggcttgccgttatgttgatgaagtgatcattggtgctccatgggatgtttcgaaagatatggttagttttctgttctactttatcatgatgctctcttactgtagtaggaattgcttgatgcaactgctagtaatagttcattgaacatggcacaactatgcatgcacagttcaaagattgaacatgatatttatgctacgccagcaaaagccttgctcacagctattattgattttagatacagattaacagatatggtcggatttgtgcttatccatgattttctgcagatgcacgattgcacgtagcattaattttatgtcacagtcaaataaactaaaagtttaggagctggcttggttccaaaagtttaatttgatgtagtctaagtttccgttagatatgttgttaagaaccagattatgtatttgtatgcaatattatcattgaaattgaccatctgaaattcataccctttaactgttacttatgattatcagggtatgtgtctttgcagtgtggctggaggtagctaatttcctttttctgtgcagattaccacatttaatatttcgttggttgttcatgggacaattgctgagaatatggactttatgaaggttacttactcaatacattttcttagaatataaagatgtatagcattgatcattaacaactgttacttgtgcacctatcaggatgatttaaatccatatgctgttccaagggctatgggcatctaccgtagactggagagccctttagacatcactactagtactatcataaggaggatagttgctaaccatgaagcctaccaggtatgttatgtaacatggtatattggtgctacgtcaaattggcaggtgggagtctggtttttctgtttggtgcatgcagcatgtagtaaaatacataatcccagtcaaataaatgcgatttgcctgttgtctacttcatattaatgatgtgtgtacatgatttattataaaccgatgtttgtgataatgtgttagtgttttcttgaagccctttgcatatgcgcattaaatatttgtctgtttctctgggaccaattttttcatgctataactacgctcagcaacatgttgtttggtgtggggacttggtgtagtttgcatttatttattctggtccattgatgtgctgtggttttgttcatttttagtctgtggttttgcttttgcagaaacggaacgagaagaaagaagccagtgagaagaagtactacgacagtaaaagctttgtcaatggagagtaacttaggaacaggtcttgcattaatgctattgcccagaagtttagttcacaaccttctggcacaaatgcagcggttagatgatccacaattttacagtcttgtggtaactattctcatgttgctgatatagctcaggaaacttcagatgcaaccctgatgatggtgctgacttgggtgatgctggagaccctattttcctgtatatggggctttgtggctgccaataccagctgtgttattttgagatgggtagtttttttttttttgtttttttgttcaggattgttgtagagtatgaatgttaagcttgattaactattcctgatgctttatttcggagttgccaggtatatgtggcatcatcttatgagagtccttttctcatatattttggtacacttctgttatgatctggaactgagcaactgatatttgtgtgggtcggtgacagcaactgtgtctggaatctggatgttttttcaaggctgggttggtgacacgttgggatctttattatgatacacattgatgtgtgaatcactggaccttgacaaaatggttgcaagcagtggctggctgccaaatggtcgcaatctgctggttcagtgtggtatacgttaatcgccatggaaagggatgtgctacctgtgatctccaaacagtagcacactgatgagcagccggggcacgaggctctggggcagcctgtgcctgctctcctgtaagcaacttacactgtttctggccgctgattacttgatttgcctgccaatatatgttggcttggtttggcttggctttgattttggactgtgacacatgtctagtagcttttgtgtgtttatcactctatcttgctcacatgtgaatggacctgcagagctatggtaaatagaacagtactacgtgttatgaacacgcgtgacttgatggactcgagtgtctgttctgtttggtacaccatttcatttttttttcttggaggagacatgcactttctagctccagttgtacagagtttaggttttatcctttgctagagatgagatccaatctgttttcatatgaatttttctactatgttccaagctgagtagctgagaatgtagcttgcccctgtgatgaattggaattttggaatactgaactgtatatggagtggagttgaaacttgaacttgaggtagagcgtgacatgaaaagagaaaatgaagaaatgtgcaagtgttttgatggtgtcgccatgcgaatgcgatcctgtggggcaaggtgaagagatcgagctgctgcataatccaacgaccgcatctgacgactgtcgcagagcccatggtcacttattatttcagaaatgtcatctcgtctcatctcacacctggaatcctgtactactgtttggtttggtttcatttcatggggccggacctggactggaatgcaaatggaatcctcaatcactcactttgctgttttttcccttccggtcccatgcttaattagcatgtagaaatagacaggatgatgctgctggggccaagttgtcattgaggaaaccgttgagaatcaggttggcatggctacctcatccatggatcattgtctgtctagtgtgtaggttaaatgggggcctttaccacatcagaaatgatcatacactatgatatcaattcatggaccagcttcacacccgtgagcttctgaatgggtatggtcacattcgatatgttttggaagaagattattttttctaatgttattactatctgtaaaatttgtaagattgaatacagttgatttgattttttagaagtacaagaacatcagtgctgaaaagagttgaagcactatctcatgtagcatttatcttttcacatcttggatttttattttgattttttcagatgtagaacatataatccctatgagttgatttttagaaatgttcagaaaattctgtaatttttcaccacggcactgtcaagctccactagtgtaccaactcatggaatctatctgtgtcatttctatattactaaccatgtttataaacaattttacagttgatcaggccatcaaaggatccctctttgcatgcatgcacaactgaactgaactgaacaaaaataaaataaaatgcaggtcagctttagttaggctaagagcaagtttaatagtatgctataagccaattataagtttatgtggaggacagagaatttgaaaaatagagagagttggcctcatgtaagagctagcactcacatacttcaagataaatacatttaatgtataggtgagagatagagagaaggagaaaaatagagataaccttataactaatctactgtatatgttaactctaatataagttataaactcatagttggctctattattaaacttgctctaaacatgcacctcataactcacaaaattggagggcctaaaagcctccagcgaagagctttttggcgtggatcgatcagattagttaattatgatatcacatcagttaattacttcactaataattaacgtatcccaagaactctcaaaacttgcaaccatgtgcggacacgcacttgcaggcctaattaattccttaatcgcgtacttgtcgctactaatccatcacaaggaggtacgtagccgctaccgtccaatcgcttcacacgtatcatgacccttctcattacatgttgacatgtagctaactagctatgcatgcatctagggatgatttatctacaataatcgctgacaatctgtctgatcggcttgagagatggattcccacatgtttaatcatgaggtaactactagttccttttttatataggagtagaaagcttaaaatcactcccttcaatcacaagtgacgcttttacattgataaggtttctaaaatgcaacttgatttgcatacaattgtattgtagaaaattttacgaaaaaatagcatatctaaatgttgaagcagatatatgtgtttcttataggtggtgacaactacaacatgctatggctgcactgccgatcgactgccgcctatggtccgtgagctgtaaaaagtggctaaccaccggaaaatggtactccattagttgaacgttcaaactcgataatgccggccgttggctgcactactaggttcaataacgataggcatttctttactcggtcatctttttatttcttttatctcgcatggccagcttaaccttttgctctggatcatactctggattactactgtattttaagcctgacagttaaaggccatgagctactaaaagtagtgacagttttggtgctaaagtttattcatagtgtgatcttgtgccaagtgccatgaccagggttgaaaatttcggaccgaaatttcggtcatttcggtcccctccgatacgatattacttcggccgaaatttttcattttttcatttttttatgaattttgataatatttgttcaaattcaactaaattttgttcaaaattttcgaaatttcagaatttcggtgaggtccgatcaaattggccaaaagaaagagaagaaatgaagatgatatatactgcagcctgcaaccacttggcttagcttgatcagtccccagttgctgctgcctgctgctggtgtttggtggtaggctcggcctgcagctacacacccgtgtgatatggttgtgtgcacatgctgctggacatgcattgcatatttgcatggacagatattagccgatgcccaccatcttatctttttctgtctgtggtccttcctcttataatgctccttctacaagctagcatgaagcacatttcctcaatctcccattttcatgccaacttgttctttttttattgttattttgataagatttttgtgtgtgcaaagataggcagcatgctcttatggcacattttagaacataggattctcaaaacagggaataaaaaaaatgcatagtatagcgcttcaaatcttatgaatggcaaaatacaggaaaaggaaaattacatgaatagtcgtttagatggagcgcatgagatcaatagagataggcacaaaggaagattttcatgaggttgaatctcatgttaggaatcctctaaaattccaatgatcttgcctatttctaaggaattttatagtatctgtgggagctagtaattcttttgttccaaaggaccatattagaaaatttttcgtagaattaatttcttaaacaactcctttaaaaaaatcctttaatccaaaggagccttattttatattctctattttgtgtaaaattagacaatctactttgttggtagtagaagtagagttttagttttgttcaagtgtgtatttgcaaaaaacacacactggcatgagagatttgcttaactctagtactggacctaaatcttgcttttgggtttaagggcgtgccagttagtttgatcctgcaatcaacaagaaacaagaaaacgaagttaaatcctcaaacgatagccgatcggctaatggccgatgacgtctcgtttataacctagccgatggtacgtaaggtagatcggcaatgaaatataaagcaaaagaaagttagatctatccgatcggctgtagatattaacaatatataatatgtatatcgaaatatgtttaaactaagtgattgggatagatcggacagcttgccgagacagtataaatcacttatgtctaaaagtacttcaatataaagattatatatgtttatagcatagccgatgttgtagatctaacatgtatcggctaatactccgatacaactttatactacgatatcaatgcaagtgaaatatattaaacagatatcaatcgattgctaagataacttaacagattaacaacaagctcaatatattttactatagtgagatcttaatataaagagcagatttagcatatcaaatacataaaataatgaataagataactaaatcaggtaagataggctgaaactccgatgctatctctaatagcaatcataaaacaagttagatattataattctaaatattacttaataggtcggacccaaccgatgcagcattaagcataaggagatgtataagatctatacaagtcgatgaaagcctttcaagatggtagataaactatataatctaattcaacgttggtatctaaccctatcggctaccttctagaaagagatgttagctgatttgaggctagataacaatattagtctagattatatagaatatatgataaatcaacaacttatataaacaagactagagtatcatagagatggaagcactaatcccgagaacacaagccatcataacaagttttaccttgtcgtcggagatcgaaccgatgcagcctaacttgaaagcaagaactcgtcgaaagtaaactaaaacgaaagggtggcgatgcgccgagattgttattaaactgattgttaattaattacatgggtttgggctacttttatacccaaagtacataatatgtccctgtcggacacgacacctatctctattacaactcaaaatgcaaacaagtccctaaggtggactcttaccgacttgaaacataaggaatttacataaaataatctaattaatagatacaattgccttctttggactcaatccatgcatggctatcctcatgaggcatatcaacccaatccaacaatgactccaatatcatattgtcggaatcggcttcatcggctaccctgtccgactcgactctgccgatgtagatcgtagctgattcggactttagtcgatgtgcactctgtttccgaaacattcaatttcttttgattttgcttcggttttatctctatctccaatgcttgatttaccaaatttgatcgttaacatatgccccccaagtccgcgatatttggtaatgttgcggatttgcccaaatcttatctccaagaaaatctagggctttccgttttttgaccgttatggccccgctataagtactaactgtcacccccgagaaatttcacaccgttacttttcgtttcaccgcttacatcacacctgtcttctctctctccggcaactccctcgaacccctttggcgatccggaggcgacttccctgcagtggcgacctcacccgcgacgatgtcaacttccgctggtccttttgctgcaccatcggctgaattccccgaggtaagtccccatcggctagatcccttgttcttgcagtagattagttctttcttcgctcaatctgcctttttcctcttttcttctatagaacctttctcatcagatcgcaatcccaagtttagttcatcccaatcagtactttcttggtccgatcgacaatttggatccaactgagttcattaatgccgaaaccaataggatcccctttagactagccaatccaaacttaagtctttgaaaaaatacctttaagtcatggccatcaacttagaagagttagccggcttggtataaaagggtatcggctagcaagggttctcactgggaggaaattgggatagcccaagccctagctctgactgcagccaatatggctaaggatgaacctctgatgtcggcagcttcttatttctggtccaatgccatgaatggctttctgtttaaacagggaccaatgaccccaactttgctagacataaccatgataactggtttagacatcacttcatcggttaatccagtcggcttgaataccaaaaacaagtttgacttcaaaaccaggagcataggtggttggtcagggtttgtctcatcaaacatggggaatggagctgttactccaagagaacacacagcattccttctgatgtggctagaaaagtacttgttctgtggtccaagctgtggcccaactgtaaactggcaacacatagccgagtccctagtagaaaaaaaaggatttccattaggaaaatatctattaggttatttataccaaacactgaactcaacatcggctagaattgcttctggatcagcaatcgacataggtggcccttggtggcttcttcaaatctggttgaatttgcatactatgaaagttgtcgatagaccagccctgacagaagcagatttcccaagattcgaaccaatcaccgatgaagatagggaagaaataaccacatgccgatgcatgtcttttggagaggcagcatcaactaatgctggatccaaactgtcagccgatcctttcagagattggtttgcaagcttctacaatgggttccccagggattcaatagtttggtttgcatatgccgattctgatagctttgaacttccctcggacttcagatttgatgacattaattctgagaagtttgataagtctagagaagttttcactactgctatcagcccttgcatactctcagttggcatacatcagggtagaaacatccaagtttcttacgaattctatcaccccatgagtgctgccagacaacttggattgggacagctgccaattggtttgtattttgccgacaagatccagcatagaggggaaattacattggcattaatgatggatcggctgctaagcatccaaggacctccccttggaagtattgataatattgagctagctttgctcaggagcacaacatttgaccgatggtgggttgaatggaagaaacatttatttcatcaatcggtttccatgtatctcactaacatattccctgatgttatccctcaagtaagaatttctacttttatcaatttccttaactatctgctgatataaaaatttatccaatttatttctttgattgcagaccacagaatcttcacctcctcatcatagtgaaagtggtttggagatcaattatgctgcaggccttcttcctaatggtggtggactggctcctcctgtcatcggcttccatgccccccaagacaacaagtttgcttcaaggacagatgagagagcctatcccaatggataccggaaagaagaaaagaaccaagccatcggttgtagatccatcggctaccaagaagaagaaaacaaataagcaaaaaactttagcaaccgatgatctaccaactgttgatccagatgtcgacaaatttctggatgatgaagccatggaagaagacattgatgcagctgctgccgaagtcagtgacactagagaacaaacacctcctgccgataccccagctccacaaagaattcctccggcaccacctcaactagctcggcatcccagggtaagtattctaatcaaaacttgatgcttgcaagaatttcatatcccaatttcatcataacacttgtctctgcagaagaagaaatcggctgccagaaagaaaccaatactgcctccatcggtaacttatattttctcatttcctttttattcatataagccgattcctaataacacttttctttttagcctcctcattctccaactcctgttcagcctgaatcaagtgaacacaccccatcggctgtaggaagtcatcatgtagaagatgcagcagctccaactcctgctgtccctgtaagtacttatcttgatcttatatcggctgtttaaacattcgaacactttaaccgaatctgcatttttctttcttgcaggttttagccgatatgttctcttttgacataagacaattctgggatgaagaagaagaagacacctcaagcaaagccttagctcctctagccgatgatgttaagagaactcttatggaaatatcaaatcggctagagaattccttggatgtcttggtagtcgattgtggatcaatcagggcctggttccacgaaattcaaaatatgatcccagaagacttagccactacgctaactccagctttttatcttgaacaacatcaattcaagttggagaaagcaagacaaaggatagccaataggcgagaaagaaaagatatagaggcaaccatccaagtcaatcggcaatctgtcaatgaggagaaagccaacctagatcagctatcttttggcccttgtcgggaccccaattacgatccctctgtgtgtaatgtgctagtcccagatcaacgctagcacacacagtaacaaaagataatatcacaatcacatcacgattatattaataaataggaaacaaatataatttttacattggtcttatgaccagattttataatttctttgccacgcagggtcaaacagagataaacagaggaaaaagaggcgagaggcaccaacgacacaccacaggcaatcgactggggcacgcaacctattcgacgttcttagcaacagaacttctagaaacaactgaccttctctgaaatttggtgagacaacaagggtgagcacataaagtactcgcaagtgtacgggaatatgcaatatatgatacaaggcttcaaaggacggttagggttcatttgcataaaggcatttgcaaatttaaatataataaatagatataaatttaatttaagcaacatttgcaatcacaacatttttaaccaaccaaccaacccaaaaaggatactgtgtccacacaagaccaaaaggttctttgtccacacaggacaacacatctatattcattaattcctgcacacaactctttcccaaaattaaaactttcacaaatctacccctcatgtgaagtcaccgagcatgtccataaccgaggacgcggctattcgaatagattgacactctgcagaggttgtacaactttacccacaagatacagttcggtgccgctaaacaccaaagtgtaacaaagcgtttcccctacctcgccctaacaccggcttcccccatgggcggtcctccctacaccacacaggtgaaagttcccatggtacaaaccaaaaacctatcatctagccacctgggccgccggtgccaaagctaagcagtgtactaagctaggtccttcccatgaaaacatgtggttgcatggtaaggctcagatcaatggcgcacgaagtgaagtccttaactgaccagggcgacttgcttaaactaaggacctcaagcacacaacaaaaatggagcacacagctctggagcacaccgctcaatcgaccacacaggtcaatgataagcacgcacacagatggcttacctcccaggttcacacagatccaccatcgccccggtctaaaacattttccaccagttcattactacacacggtgcaacacatgccaccaagaagatagcacacagccacacaatttatataaaaacagtgataagtagatcattagtcaatattatattttgcttgtaaactagtgtgagtagggctaagcaaatctaagtacctgagtccatacccatatatgactcacatgaaaactagggtgacatggcatgaaaggtaatcaacaataattcaaaggcatggaataattaacaagtaggttataactacccacacaataatttgtgaaacaaatcatgcatataatttaaaacaatataattttgcaagttaggatcaacatgttcaagggtacacttgcctttacccacaggatcttcagacgaaatcttcacctgcagcagcaacctcttcggcaacggcgtctacacgattgcaaaaaggagaaaacaaataaacaaaagaaaaaggcagaaaaataacatcaaatgaagtaactaaataaatcaggaagtagagctcaatttcagaataacataggagaaagaatgggttgaatctgaatttggacggaggagataggaccaacgaaagattgaatttagagaacattttcatggagaagtaaatgaatgtttctggaaagtttatttgggatttctggaataaaggaattagttttggtggactaacgggtgtggcccatcctgttgagattatgggcatataaggatttaatttattccataaataaatcatgacattacagatgaaaactagcatgaacgcatcattagatctacacatgtaaactacgcagaataacatgaacagatcaaatatgcgcaacatattaacacgtaccgaggtgacgaaaagaccggctgcttggtcgaaacttttcgcaggtgtctacgaaggcacgaaacacgcgagcgaagaggaaggcgagccgtcgcgaacgaacagggagcagtcgcgcgaagcgcttcccaaaaaccttattgccgccttctcccggtgcaggacgtcaaaggcagaggttccggagacctgctctcccgatcgctggtgcacgccggcgagcgggatggagtagtctacgagcgacggcgcagtacagagtaggaggcaaaccctagattgattttcgcatatattgcgtgaagacggcgggtcggtttatatagagaagggtcgcttgatcagggcgcccgcacgatctctactgcgcgtaaccgaaccggataagtcgcgcgtaacttatccggactccacgccgtttgcacgcaccggatttttcggaacgtttccaaaacaaaacgaatccgaatttgcagcaaaacaaaactgcaaaaggaggctgcatctgcgcaagggtgaggagccaatttttcggaccattcgacgcgtacatcgtgcacgcgcgccgcctgccctgccctgccaggccaggccaggccaggccaggcgaggcgagcgagcgcgcgcgtgtgtttcccctcttctctccaccacacatgcttcaagtggctaggagggcatcctcccttttaaggaggtccccctctcctagaataagcaaggtggtactaaactccacatgcatgccatcccatgaggtgggcttttgtgattttccaaagaattaatcttcgagtgggctaaggcccattcattaattccaacaatcccccaccaaatctcaaaatcccactgagatttgccttttccaatgtactgtttatataccagcggttcgatggagaccaattaaggttgaacatccacctagaactccaagctacacttactcacaacttgaacaatggactacgccttgaattgcaagtcttgtgcaagcaagtttcactcaaagtcttatctggtactagaccgtctgtagactacccctcgggtggagcgtataagtcatactcctaggtctttagtaagcttcctagaagattcacccaaaatcttcatagactgcgaccaacagtcaagctcacaaaggtgagttccttcaagaatgctctgcaggacaacatctttgctaattaaagccaacagaactcattaaggcatagccaacctgccttgcagctcacaagagtatatgcatcttcacttggatagggtatatatatttgtactctcctctagtttattaatggtttgttcttcccaggatctaattcacgggatctccgatcacatagactgggttaccaccatagtataactcacatgggtctcaaacccatctccttcgatgcattgtctatcacatttcgtgatagtcccttcgtgaagggatctgccaggtttctcgctgtttggatgtaatccaacgttataactccggagtttcttaatttcctgacagacttcaatcgtcttttcacatgtctagacgatttcatattatccttagaactattcactttgacaattaccgtttgattgtcacagttcataaggatagccggcaccggtttttcaacaacaggcagatccattaatagatcacgcagccattctgcctcaacagtagcagtatccagtgccgttagttctgcttccatggttgacctcgtcaaaattgtctgtttgcaagacctccatgaaacagcaccaccacccagtgtgaaaacatatccactagtggctttgatctcatccacatcagagatccagttagaatcactataaccctccagtaccgcaggatacccagtatagtgaagtcccaattccacagtacctttcagatagcgcattactcgctcaagcgcacgccagtgatcatctcccggattagaagtaaatcggctcaacttgctcacagcaaaggagatatcaggcctagttgcactagccaggtacatcaacgagccaatgatttgggagtattccagttgattcctagcaattctcttgttcttgcgaagcaacaagctaggatcataaggtgttggagaaggcttactatcaatgtagccaaagcgattcaagatcttctccacataatgggactgcaagagagtaatcccattctcacctctaattagcttaatgtttaagataacatcagctactcccaaatctttcatatcaaaattttgagacaagaatgatttaacctcatttatcacctcaaggtttgtcccaaatatcagtatgtcgtcaacatacaagcacaaaataactccctcacccccaccatagcgatagtacacacatttatctgcctcattgactgcaaagcctgcagatgtcaatgttttgtcaaatttctcatgccattgcttaggagcttgtttcagaccatacaaagacttcaacaatttgcacactttgccttcttgaccttcaactacaaacccatcaggttgatccatatagatctcctcatccagctctccattaagaaaagctgtcttaacgtccatttgatgaacgagaagaccatgtgaggctgctagggaaagtagcacacgaattgtggtcaatctagcaacaggtgagtaagtgtcaaagaaatcttcgccttctttctgagtatagcccttagcaacaagccgagccttgtacttttcaatagtaccgtcaggcctaagcttcttcttgaacacccacttgcaccccacaggtttacacccatagggtcgctctgtcacctcccaagtcccgttagcgataatggaatccatttcactacggacagcctccttccagtagtctgcatcaggagatgcatatgcttctgaaattgacttaggagtgtcatccacgaggtacacagtgaaatcatcaccaaaagacttagccgtcctttgtctcttactccttcgaggagcttcactgacatcctcctcagagacaagttcatgtgtatgttcagtttgttctggtggtgtgattgaactgggaattatttcagagggttggttcgaaccactatgtgtatccttcattggaaaaaagctctcaaagaaggtagcatcacgagactccataattgtaccaacatgcatgtccggtacctcggatttaactattaaaaatctataggcaatgctatgatgagcatatcccagaaaaacacagtccacagtcttaggtccaagtttgcgcttcttcgttattggtacattgactttcgccaagcacccccatgtgcgcaaataagaaagtgatggttttctaccaatccatatctcatatggtgttttgtccttatttctgttaggaactctgtttaacacatgatttgaggtcaacaatgcctccctccaccatgccttaggcagtcccgcggtgtccaacatggcattcaccaagtcagtcagtgtgcggttcttcctttcagcaatcccattagactcgggagaatagggaggcgtcctctcatgtatgatgccatgttcctcacagaataagtcaaactcgttcgagaaaaactctccaccacgatcagacctaagcctttttatctttctgtcaagttgattttcaacttctgccttataaattttaaaatagtctagagcctcgtctttcgttttcaacaagtacacatagcaaaatctagtagcatcatcaatcaatgtcatgaaatatcgttttccacccttcgtcaacaccccattcatttcacaaagatctgaatgtaggagttctagtggtgccaagtttctctcctcggcagccttgtgaggcttgcgaggttgcttcgattgcacacaactatggcacttagaacctttgacaatggaaaacttaggaattaaacacatgctggaaagccgagacatcaagccaaaattaatatgacataaacgtgaatgccaaacattagcctcatcatccacactgccacaaatatggttcacagacttattgcagaaatcagaaagggaaaagcggaacaggcctccgcactcataacctttaccaataaaatatccatgtttagacacgactactttattagactcaaaaaccaacttaaatccgtctctagtcagacgggagccactaacaagattcctgtcgatagaagggacatgctgcacgttcttcagctgcacgatctttcccgaagtaaacttcagatctaccgtgccaacaccatgaacagaagcatgtgacccattccccattaggacggtggaaccccgtgcgacctgataagaagaaaacaatgagatgtcagcacaaacatgtacattggccccagtatcaacccaccaattagtagattgattaactgaaaaaacagtaggtaaattaccatacccgcttccatctccagtgttgccaatggtcacattagcagacttagaagtctgccctgcaggtgccttcatccccttgcgttgtggacacttcctagccagatgaccaacttggccacacacaaagcaagtcctctcatcctgattaggattgttgttgttcttcttctgcttcttgaagttggtggtctgctgagctttgtatttccccttgctcttgttctgggccttgtgcacaacattggcactggactgcccaccatcgcccttagacgcggcatctttttcccgagctttctcctcaacatcaagagacgcaatcaacccctcaacggagtattcctgtctcttgtgtttgagtgcagtaccgaaactcctccaagatggaggaagttttgcaataatgcacccggccacaaatttgtcgggtaagacacacttaaggagttcgagttccttagccatggtttgtatctcatgagcctgttcgactacagaacggttgtcagccattttgtagtcatgaaactgctccatgatatacagatcattgctagcatcagtagcaccgaatttagtattcagtgcatcccacaactccttagcgtcggtcatatgcatatacacctcgaccagacgatcgccaagaacgctaagaatgcatcccacaaagagagtagtggcttcctcgaattgcttctgctgttcagcagtaagaactccttcaggtttgccagtactcacccagaagcatttcatagctgtcagccacagagtgaccctgatctgccatctcttaaaatgcacaccggtgaatttatccggcctcagtgcatcggcaaaaccagccatagtaaaatcacagtgcctataataaggtttttggattgttgagattatgggcatataaggatttaatttattccataaataaatcatgacattacagatgaaaactagcatgaacgcatcattagatctacacatgtaaactacgcagaataacatgaacagatcaaatatgcgcaacatattaacacgtaccgaggtgacgaaaagaccggctgcttggtcgaaacttttcgcaggtgtctacgaaggcacgaaacacgcgagcaaagaggaaggcgagccgtcgcgaacgaacagggagcagtcgcgcgaagcgcttcccaaaaaccttattgccgccttctcccggtgcaggacgtcaaaggcagaggttccggagacctgctctcccgatcgctggtgcacgccggcgagcgggatggagtagtctacgagcgacggcgcagtacagagtaggaggcaaaccctagattgattttcgcatatattgcgtgaagacggcgggtcggtttatatagagaagggtcgcttgatcagggcgcccgcacgatctctactgcgcgtaaccgaaccggataagtcgcgcgtaacttatccggactccacgccgtttgcacgcaccggatttttcggaacgtttccaaaacaaaacgaatccgaatttgcagcaaaacaaaactgcaaaaggaggctgcatctgcgcaagggtgaggagccaatttttcggaccattcgacgcgtacgtcgtgcacgcgcgccgcctgccctgccaggccaggcgaggcgagcgagcgcgcgcgtgtgtttcccctcttctctccaccacacatgcttcaagtggctaggagggcatcctcccttttaaggaggtccccctctcctagaataagcaaggtggtactaaactccacatgcatgccatcccatgaggtgggcttttgtgattttccaaagaattaatcttcgagtgggctaaggcccattcattaattccaacacatccatcagtgggatgatcaacggagaatttgttatagggagtagagtggtggactgattacgtagatggccgagatttatttgtagggagggatgacttggattgatttgggtattaggaggtttggtctaaccatgaggtgtgcaacatggtgccgtggagcgagcacataataggcgtggtgatgataaagcactggatggtggacggatagctagaggggcttcaggagtcggtttggagtcagggacatcgaggtggagctcaccgggatgctcgatggtcgctcgtggtaggttggcgcggggggaggaaacaacagattttgtcacagcggtgcagctgctcaccaaccacgatggtgacatggctgtgcacgagaaggaaagagaggtggcaacaatggctcaaactcctagggacagtggcagcgaagcgagggaggatagtgcttgggcatcagcgtctcagcatacgtgaataaaaagaaaaagggccagcactagtaggaataagaagagagacaaggcgcgtggcggaggaagattatagaggcagtacagggaacaagatagtagaaacggttgcaacaacgacgggtagttgacgatgtggtgttggcgaggatgacagaagtggtaactccagtccttcgcttgtttggaacaatgatgatgcagccaaccgcttggtcggcgtgggaagaaacagagttgtgttccatatcgatagtggtatcggaagatagaaatttggtggaaaagctgaacggattttcaagaacatttttctgaaatattcggaattccaacgatgtataattttgtggattaacaagtagggtccatgagtcattctcagagggaagttatagttatgggcacactgcaggcacagcgaccacgggccatccactagtagtttggtggcgccgagaacaagaggagacaccgggctcatggcggaggacggtgatgatgcagcattgtgatggaaccgcgatgaccatggaaaaggggacagcaacaacgctttggcaaccgtccataaggagaagatagcagcagcggcatgagcccctagaaataggcgctgccaacaggacagggaggatttggccaaagtcgacctcgcggcaacatgtgtttttcccgactttaggaggcagcgaagcaaggaagaggagtagcagcacaacggcgtcttggcgttggtgaagcaacggtgttgcattatggagtgttctgactgacaacgatggcacaactacgagtgggcgatggcatggaagaaagcagcggcgctgatgttcattcacccgaggcggcattggtggatgtgatggtatagcatcacatatagatgaccaaaaggcccgcccggcacggcccggcccatgcacagccaggcacggcccaccagccatcgggccggcacggcccgatcggcacttcatgccgggctgtgccgggccggcccgaaggcacggatggtccatcgtgcctttttttaaataagtctattttccgtccctcctctttgggctgtgacatatatatagtgaaaataagtctatttccgtccctcctctttgggctgacatatatatatagctaaaataagtctatttgacgtccctattcttttgaccgtggtatataatatgtctatttttactccctattgtttatgtgtcgggcctggactgcggcccatcatgccgtgctagcctggtcgtgctgggccagcccaacgtgccggtggaggggcccaggcacggcccggtggttgggccgggccagcacgggcccaacccctgacgggccgtgccgtgcttgggccgggccaaaacaccgtgccgtgggccgggccgtcgggcctcgggccttttggccatctatagcatcacaacagcaagatgaagagtcccagtgtgcacgaataaaataaaataaaaattggaggggcagcgctgctgtatagggaagccagagcagagagcatctcagcatgcgcgagcaaaagaaaaggattgcagaggtgttgttaaatatatatagaggagaaaaggggaaaagtacgagcagccataagatggagagatggtgaaaacagagctaaccgatcgacggtgatagtgatttagtttttgataaataaaggaggaaatgattataaaaagtggaggcagtgcaggtccttaccaaccacgatagtggagacatggcagcaacaatatgtgctagacgacgaggcagtggcgtctttatgtgcacacgacagcaacccgacatggaagaacagaagagcagcagagtgatggcctctcaacctgtgcaaacaccggatgatgaataggaaggaggaaacgaccaatggacttggatgcggtgcaagtgcttaccatgacagagaagtggcagcatgatgctcgtatgatgacggcacaaactctagagatggtggtgtgatggaatgggaacgacaatgatgaggtgaagacgacagcgcagaggagcatagcagcggcgcatcggcggttgaggaagctcccgacgaggtggtcatgtcctcgatcatgctttcacatggatagcacatggtgtggctgtttgcaagcgctaccgtggctgaactcaaccgggctgcgatgacagagcctgcaaaatctcccaaggcgatggcagtgaagcggtttggcagggcgctgacctatccatgtaaaagaaatagaagagggcatggcactggcaattatacaggacacgggaggtggacggtaaaaagtggaggagccatatgtgctggaaaaatggatctagctcatcatggtgattcaatttttgtcattgatggaaaaaaatgatttaggagaggaaggaattagtgagtagattggaagaagaagaaaagaaacggctaatcatcctcagtggtatctgtggaggaggaaggtaaactagctgggagatgagaggtcaccggaaatttgggaaacggattcagatcatcaaggtagtttcattttttggcattaaacagtaagattgatgagggagatgatagatctgtgatgggaattggaggatacgttgctgctttcatggagaaaaaaacgtcagattgaagacgaagcagaaacggcgtggccgtgcgtgggcagtggggaggatggcggcttgggttgggctgggtttggcctgctcatctgattggggtttttctaggctcctgcccatgcacaccgagaggaattgattggatcgacagaaacagaaccacaggagaagaagaaaggaagggaggaaaaaggaaaagaaaaaatagaaaggaaggaaaaaaaataaagatgggaattttctggaaaattcaaacattggaggattttgggatgtttggaatttttttttctggattggacactttggaaaattccaggaattgagctccacttccaagacccaaagataaccaaataactccaattaacaaacgataaaataaatggcggcgttattaatttatttagtcaaattaaaccctttttcatttatgaaattttcattaagctattttaggcgaataaacacaaatgctaaatttcaaaattaagaaaattagaagacacgaaaaacgggacgtgacagccctggtccaattcaatccaacatagatcagctggaatctcgaaggattgagctcttggctcaacttgaggaatgtaatgctgagcttgccttagagaagcagaagctagccgatttgcccaaggttgttgaagaacagaagtccaagctgaaagcttccattaagcatctagctgaaatgactaagtccttgaaggtgatccctgaaaccgatgctcaagacgcccaagcaattgaagaagtgatgcagattaggcaaagggctatatcggctatccagagatatattgctgagtaatcggcttgtaataggactgaaacacttttgtaatcggctttgaacttctggtgatgcctatgtaatatatcttctcctatgaacttgtgccgattaatataattttttgcttctaaagtccatatttttgatttgaagtccatattttttatatgcatatgcccccttaattttacaatgttgaacaaacattgagaaaattaaaaattttaactaagggcgatataacaaatatcggccatcacacatcggcacaatccaaccgattatgataagaaaaaaaaaacttagagcgatacaacacatattggctatcacacatcggctacacataacagattatgataaaaataaaaagtctaagggcgatattaatcatatcggccatctaaaggcgatgtcacaacatcggctgtcatgcatcggcacaacttaaccgaatcatgaattgatccaaacacttggataatatttcttcaaatacttcccattgagagctcgactgaaaacttctccatcaagtccttgcaacatgtaagctcctttacaaacagacttatagatttgaaacggtccttcccaattcggcaaccacttgctgaatttgttgtcacgggtcctaatcggcaagatcaacttccaaactaactcgccttctaaaaaagattttggcacaaccttcttgttataatgatgagcaatcctttccttatctcttgttaccttttccaaagcacgcaatcttgattgtactaattcttccgactcatccaccataagattatgataatcatcggctgacagctcatcttgtaattcaatccttcttgagccgattttaatttcccatggcatgtccataaaccagcttataaggaggaacttgaatcgaaccatgacaagccatctgataagcccataatgcctcagccaatcggttatgccattgctttggataatcggcaatctttctttttatcaacttaatcaaacttttattagatgcttctgcttgcccattagcttgcgcataatatggggaagaatttaacaacttaattcccatgctttctgcaaattggacaaactcatctgacacaaagatagatccttgattggttgtgatagtctgaggaacgccaaatcgatatatgatatgcactttgacaaactgaattgcatccctagaatcaactttcttcaaaggaattgcctgaacccactttgtgaaataatcggttgctaccaatatatatttatgtcatttgctagatggtggattaatctagccgatcatatcaattccccaacctctgaaagggccatggcttgatgataggattcatagccgatgctggtgttgtttgaattgttccaaacttctaacaatcttgacaacccttgtaatatctaaaacaatcctccaacattgtcggccaaaaatacccaactcgccgaagtaaccacttcatcttgtgagccgattgatgagtaccacagatgccctcatgcatttctcccatgacaacttttgcttgatcaatactcaaacacttgagcaacaccccatcaatcgtccgataatataattcatcctccagcaaaacatatcttaaagctttgtacctcaatttccttgaagccgattgagaaggaatttttaagtaattataaacatcatacctccaatcatcgactgtaattgtggcaacctctatatcaacatccttgaccatcggcttataacccgatgctccttgagccaaatcattagcctcaatattttgttctcgagaaacatgtttcaatgtcaccagccgaaaaccacccatcaactctcggcatttctcattgtagatcatcaatgtatcactcttgcactcatattctccagctaattgactaatgactagcaaagaatcttccatgatttcaatagcattggcttcaacttccttcaaaagttgcaatcccttgagcactgcctcatactcaacttgattattggtagcataaggtttaatcgtgtaagcaaactcaaaacatgccccccttggttatataataaccaagccgataccacaaccatgagtgcaaatagatccatcaaagaataatgtccaacgcactatatcaaccaagccgattgaatcatctcgatgttcaacaataaaatcggctatagcctgcccctttactgccttgggcgactcatacctgaggtcaaactctgtcaaagcataaattcactttctaactctcccttttaatactggagccgatagcatatatttgactacatcggccttgcagacaatagtgcactcgttggataacaaataatgccttaacttagtacatgaaaaatataggcataagcacaacttctccagtggtgaataccttgtctctgcatctagaagccttctactaagataaaagattgctctctctttgccttcaaattcctggatcaaaaccgagccgattgacttctcatcggctgacaagtataacttgaaaggcacccctttctatggaggaatcaataatggaggggaactcaattaatttttgatattatccaaggccttctgttgctctgcccccaagtaaattcttgatcagcttttaacctgagtaaaggtgtaaagggctccatcctcccagacaaattagaaataaatctcctaatgaaatttatcttgccgacccatgactgtaacttgttcttgtcctctggaggttcaatgttcttgattgcattaatacttctttgtgtaacttcaattcccctctcatgaacaagaaagcccaaaaattgtccagccgatacaccgaaagcacactttgtgggattcatctttagaccatttttccttgttctttcaaaaacttttcgtaaattggctatatgatcatcaagttccctagatttaaccaccacatcatcaatgtagatttcaaccaacaagtcgatcaagtcatgaaagatataattcatagccctctgatatgtagctccagcactcttcaaaccaaaagtcattacaacccactcatacaagccgatttcaccaggacacctgaaagcagtcttgtggatgtcctcttctgccataaaaatctgattatatcctgcattgccatccataaaacatataatcttatgtcctgaagcagcatcaaccaattgatcggcaatcggcattgggtattcatccttaggtgtagctttattcaaatatctaaaatcaatgcacaccatgagtttaccatttttcttaataactggaactatattagaaactcactcagcatatcgacatggccgaataaaaccagcatcatacaaatgagtaatttcggcctttatagcatcatacatatcggctttacatctcctaggtggttgtttatatggccgataccctggtttaataggtagccaatgttcaacaatcgatcggctaagtcctggcatctcaaaatattcccaagcaaaacaatctctgtattcttttaatagctctatcaacttggttctaaattcagatgacaaattcttacttatatatgtcggccttggtctatcttctggaccaatatcaacttcttccaaatcatcggccgagatgaaaccttatccgagcttgccatcgagatcatctactgtatccttggtatagaaatttgaaccctccacgacgccctcaaagcaacaattggggctctccatctccaattggctatatatcacaatcggataccttagaaaatctcctttccaaacctttccagacaaacaatcggtactatctatctcccaaacagacaaatcggcattagcaatgctaactgacctgtcggctggtacaacttctatcttgtcaccttgccattggatcaaactctggtgcatggttgagggaatacaacaatttgcatgaatccaatctcttccaagcaacagactataggagcccttcccatcgatgacaaaaaatgttgtaggaacagttttgttctacatttaaaactcccttggtctctgaaggattaccaccaaaatctttgagaaccatgttagtcttaatgagatcatccgaattcttgcccaatttcgtaaatgtagcatatggcattagattcacagcagccccaccatcaaccaacatcttggacatcggcttgccattaacaaatcccttgagatacaatggcttaagttgccgattttctgtcccctctggcttctcaaagatagcctgttctggtgacaaaaccaacagagccaaagattcttcaactacatctgcatcggcatgggcttgactaattccaaattcagctggtaacacaaaaaccatattaaccgatgtagatgcaacagattttcctttagccaacctctttactttgtcagcctcaatctcatcggctgataccaccttgctcttcacacaccactcttgctttggcttagccttcttcaaccgatgattaatttcctcttgtacctcttggaattgctccctattcctcatcctttgaactcttctcttctggttcttggtgaaaataccagaaggacaccattgcttcttggttccatcttcatcttcagaatcttgaaaataatcttgatgaattggacctaatctctgatgaacaggcaacttcttctgaagcaatcaattttccctaggataggatcggcttgaacttgcagcatgtcccctgttagaattgctgcatcctggggatcaaaattgttatcatcccttcgttctagcaaaatctgaaaaattcgcaactccaatggggatcaaaactgttatcatcttcatagtacctttcttcctgccgatcatgctttctttgatacttgttgataatcctaacataattgagctgtttagaccgataattcttgctatcggctgttttcccacttgtacgaaccatgttcataggaaaaggattaccatcaaccttcatcggcttctaggaatcatcaaatttgatcttgccgttttcaatggccgactgaatctgctgtctaaataccttgcattcattggtactatgagacccagtattatgccacttgcaatatttcttcttccccaattcctcaaccgatggtaacacattattggctggaagttgaattttttctcccgaagtagcaaatcaaagatcttatcagctttggtgatatcaaatcatatttctcctcctttgcagaatttttcacccattgacaagtaataaccttcttacttctagcccactcggccgctgctacttcagaatcatctacagaatcagattcggaagcaaaataatggacattgttcaccttcttgaaagccacaaccttctttgcttcctgaaatctttgctcatgtactcctaccttctaggccagatgagccaaactttcaaagtcctgagccagaaacttttctctaattggagccagcaaatcctggaaagctagatcggctaactgagaatctaacaaaaccaagctgtaacacctgttcctcatatctctaaatctttgaatataatcctgaacagattcatcatgcttctgcctgattgatgtcacatcagttaacttcatctcatgaaccccactgtagaagtaactgtgaaattgtttctccaaatcggccaaactattgataaaattgtatggcaaattagagaaccatgtgaaagccgatccagacaaagacaaaggaaacaacctaaccctcagagcatcattagccgatgcctcaccacattgagccaaaaatcggctgacatgttcataagtcgacacattatcttgtcctgagaacttggagaaatctgggaccttgtatcgatgtggcagtggaattcaagtccagtacgataatatcatgcaagtctaggttgcacaggcaaaaatgtacgataatatcatagccacactacgtggagctggtgcagctgaaggcacacatgccactgtctccgacgtgcaagcaactggcccatccacgacaagcggtgcaaactaggccgtgacggcagctaccgattccatcgaggcatgcaggtcaccaaggaggctgcaacgctcactgctgccacttaccgcatgtagccctcgaaggaggtaatccctttactgcaccataattttatacgcaactatcacaaagctctctgatgacacagcaaatgcattaccacgtgcattatcacattgtttaattaccttacatgcatttgttttttcagcacatgcatctatgtttatcttgtcaacattgcaattagtgggggtactctatatttataattattcctacatttattacatactaccagggacaccgaaagacaggcgacaccactaaggcggtcccccaggacagctacagcatcaccacctacaacaaagtcacttgttaccagccccaagagcactgatgaacacaaggataggagtacgtcgccaccaaaagctatgagaaggtcaccaaggtcctcgccggctagcaatgtgcacccatcatccccacagcaggcggacacgcaacaatcggggttggcattggaaaagggcacgcttgaatggcaaagccgacctgccatcagcgcaatgcaaggcatgcagaccgacggaggaacactgccataggaccaaggcggatgctcgattgatgcgactgcaggcattatacatgcaagtagcagccccgagcggtcgagccatgatccatcggcggcagccaatcctgccctgtcagcatctgcacaagaatacactgaagagggagcgcaaccgctcacaggtatggccatgttgcatgcatgttattcctgccatatatattcaccgagatgacctcacattccatcgcatgcaggctgccatgcaggcacagtaggccaaggcaatgatgaccagcaaaccattgatcctgctggagtgctggagaacacaaccccacagcctacccaggttacaagccctacttgtttctacacctgaatttgccctagtaatccatttactctaccctgatcccagcaaccatcacagcctgaacaaactactcagtaattgcattacccagacatgtttgctttcttgcaataatacatccgtagtactattagtaattgaattaccttgcacaattccagtgaccattttctctaccctgatgtacttgccctagttatccatttactctactttaatcccagcaacatcacagcctgaacaaactacttagtaattgcattattcagtcatgtttgcttgccagcaacaatacatctgtagtaatattagtaattgaattaccatgcactattccagtgaccgctgtagtccaaataaatattttggtaattgcactactctgactagaattacctgcttggcttgaagcaggtagtggtgtttcaagatacaggtgacattgggcagcacatcccctcgtcagaacctatacgctgtcctcgcaggtcggccaggtttgtttcaccgctcaagattggacacacacgccccctcccggatagcgcgaaagttgttgctcttcgcgaacgcattttgagtgacccggccaggtttgggaggtaaattttcctgttactagtgtacaattccacaactcttattttttaattgcgttatacattgggtcacgtgatacaattgtgtacaatgtagcgccaacatcattgaagttggcatatctgctgctaccgccagcgatattgcgtccttgttcactgatggttcaatgacaaaaggcctcttcatcgatgctttcataaatttgattctgcatgatgagcaggagtttagcccgatgtcagctggggaccgaatcttcctgccaaccagtgtatctgtaagttgtgatttgtattagcgtacatcaacacctaaattcgcacgtatgcatgcattttgttttccctttacactcatacacaccatgtgctcaatgcagaacctgcttaactgtgattacctggacccaccactcaaggcagactttaatgagcagtgtctggcagaacacttgcgtgaagtcctcccaccagccaaagacctccaatcctggaagatggtatgttctacgtgtaggttatagtacctgttatacaccacagccactggactctgtactgcgtcaaccggaaccatgggcgcatagatgtctttgactccaacaattaccctgctttgaatacggagtacaaggatcaccatggtgacctagggagtcgtgttgtgaaacggctcagcgataggctctatgcagcagccaggactgccttcaagaggtttgggaaccagaagctggtcaggaacaaatgcccagtcatgctaaagcccaatgattgcgcattttttgtcatgaggtacatggagctatatgaaggcgatgactcccccctgatacaagtcgctgaatcggtaaaactgctacaaccatttacgttgccggggaaaacctttagccaccttatttaccctgctgaatctgttctcattttgtgcaggaggagtacaacgacttgcgttcgcagatgctgtacaacatggtcttccactccaacaatgttgctgcgcctctgccaccggaactagaagagctatgacccagcagcccctgcgcagactcaagtgaatgatcaatgcgtgtccctgtgatgttgccttgtggtcttctgttttttgaacaacaatgctattcatgtgatcccaagtacttgtaatggaacaacatactgttgctcaactagttgcattttgctttgtgtggtagccttagttccttcaaacttgctgttatgcattactgacatttacagtggaaggcccagtaatcgatttacttcatgcacctcatcatatcatttgtgattttaccctgtaaatcaattacttgagacacaatccatcattctgtcaacaacaagtttaaacagctaacgatgataataattgctttactatagattttagacgcatcataacaactcatgtaacctaattacaacaatctctctgccgagcacttcagttcttttttaatgcgtggaaattgaccagtaattcgttaactgtgttatgccattcagtgtgcatgtctcattaccatccttggcacacgtagtaaatggattaccatccttggtgcacgtagtaaatggattaccacactactgtcatcactttcatcacccctatcggttctttgcaaccaaacacgataataattcaattaccagaagatctcccccacacccaataacctggagtaatccaattacaacagccccacatgcgctttcatttgttttgcatgtgtccactgatatgcaaacccacaaagtgtataattccacaagccacacccacacattacacacagcacccaaaacgtattcaacgtcctgttttcaacaactgtgaaaccatctacacggcacacatttatattctgaaacctgctattatcaagctggcacttaaactaacatgtactacataacaaacatttgatgttaggttggtggcttaacaatgctatttgcacgttacacaaattatggcacatacgtcaatatggacagtgtggagcgtacacatcataggtcggcgccacctccagaatcatcctcgccatcaatcatctcttcatcctcgtcaaccccataatccatttcctcttcaagcctcctcctaacattggctgaaacccccgctatacgcttaccgctgccccttggtcggcccctcttccctttacccctattcaacaccttctgtagcttgtcgaagttgttgggggttctttgggcaggtagtgctgtaatgaccatcctttttatgacaccacccacagaccctgttgcaaaccttcttgccctttgtgccgaggaccatcccctgtcctggttcggcggccataccctttgttcgcgacttaggaggtgcagttcggcttatctggctagcgaggtcatttctttccccctctccttgcattgttgtttgatcaacagcaatggatgatccagaactggacgggatgctttcgacatgtattctcaaactcttcaggcctttcagcgcctcatcatatgcgtcctatgatttgctcccagcttttgcaacagccatagcctcggtcatcagtacttttgttctgtaactctcttgcacaccgtccgaaccaattgtcttttggtcccttctatcgaagggcatgtcgcttttcgcttgcatagtgtacctacggagaatgtacttggccgggatggtctcaacctgcacgtggacaaatgccctaagcaagtgagggcagaaaattcttgttacaaaaacatgagcaagccaaaattagtgcgctcaaataaatagtctatctccactcgataactaaacataggacagatgtacagttccaccaaacctgtatgctcccaaagcatgcactcgcactcatactgcccatcatcaacatttgcaattactcggaactcccgctggcaccagttatattttagcgatctctttgtgtgcgagatgatccatgtgtcactggatgcttcacttgacctaattttgaatgacttgctatcgcccaacaccccctcaaatttcttgaatactgccctagtatatagtctcgccaactgcacctcgaacggccaacaatttgcaaagctgatttcggcctacatgaatcacatttaacactgttaatcactgcattttctatagttagtgacacgctgatagtttatgcgcacatatattgtttctttccatgcaagccgactcctctgctgcctccttctccttcctttatgtgaatacatcgagcattctacgcgcgaaccagtgtagcgctgtctggtggtcaacaaacttacgctttaccaatctgtttgtgctctcgctctgctgcgtcgatgtcatccgaccacaatagtcttccgaaagtaagctgggatccatttctcctggatttcgtacagccgctccattgttcccacaccatgtagttcatatttatcaataaattctgcccaggccccttcaaactccatcggggtatatgtttggtcaatacaaatctccatgtcaccctctaaatcttcatgacgggcgaatataatcgcgagggcatctgcatatttgtgaagtatgtgccacctgcacagtctatgtatgatgttcttgaaaacaagaggtatggcagctgccattgctacatcctggtctgcaaaaatattttactcatttaccacacaagttcaccatcatagtaaagtgcaaatatcattgcatactagtaaccacacaacattgcactttttgcttaatacattacctgttagtatgcatcatagttccggccaatccgccatgcaagtcttgaaagtattgaacaaccactcgaatgactccttcttctcatccctaagcaacgcacacccaaacaacgtgttttggagatggtggtttgaacctacaaacattgccaatggcatttcatatatgtttgttttgtatgttgtatcgaatgtgacaacatccccaaaatctgcatacgccgcctagcaacttgcatggctccaaaataaattcttcagaatgccatcttcgtcaagctgggcatcccaataaaactgagggttatctttcttgcactccttaaagaattccagtagcttgtttatgtcgtctgcattctcagctctcacattagcggctttcctgtttagtaaccaaattacaaaggacaatttatttcaacacggtgccacgatgtatggatgtttaatgcaattcaatcggcaaatgacatatgcaggatacaaatctattctcaagattgcgtgaagtgaatgggatgttctcttgtccaccatgcatgtcagcaagcactccaattaggctgttctgcgccaccctgttttcttgcatggtgttcacaaactccattatcgtgtcatccgtgtgcttatgggatctcatgtgctttaccgctgctagagagggcgtgagcgggtggttatgctcaagcacaacaacatcgtacacaacagacgacacctcaccatcaaccatcacatttttcaccttcatgtatgccttgcaaccagttttctttgtcctatggtttcgctcacgttcaaattcatcgcctttataaaatttatggtgcccctccctggagcaacatatttctcttatagtcttcttagttctactcttccttatgtcaaacccagcatggtaagcatatttctcatagaaatcatatacactgtcatagtctttgaacaccatattttgtttcggcaccatgtcatcatccagcccactaaactgcatttagtaaaactattactacccacccgtactgcatgcataaatgccatagagcatagatctgttcatccacaaaaatttgtccttacaaacaacatattaactactacttacatgggtgtacactgctggccgtgttggagtagaaatctcatgctcacgcagagatggtggcatacagttcgcatcccggccagtacagacgactgcccctcctcacactagctcattgtggtgactacctaacacacgctgtggcgatgcagatgttggcggcaattcaccaaaacgagcaccgctggagttcatcgttggaggtgtcactatgacgcttcaattggtcttcccaccgcatggaaccgcacccctccaaaattgtgaagttgccaaagaataaacccacccacacgcagtggcaacaaccgaccagatcgccaacacgaaacaatcttgtcataacttccgtagtaaatcaccataatacgataattcatttaccgacgaaaacgcctacttacaatgtggcagtaacccaattactgcattatgcgaaccacctcatcccgaaacaacagtaacacatttacaacaaactcggtcactaactatggcaaacaatttaactaccccgataaatcgattaccatatgcctagctgtgaaaaggagcccaattaacctaccaacgtaataagtaatccatttaccaccagaagggaatgggacacgtgtcggtaattgagttaggttagaaccccgtttttcagagtaaatcgattactatcgattttttacacgcagcggtaaatcaattacaacaaactccttcacacaatttatctatacagtaaatcaattaccacaagactggttgctagaaggtgtccctatatccgacactaattgatttacacgcagaggcgtatctttaacaactacccggattcaaatagatctaatctacatggcacgaacgtgggcaaccgaacacggtttttgcggacactgggcttgacatgcggtgctcgaaacaatgttccgtgcgcaagtgcgctgaatagcgctaccgcataatatattgaatttcaataaggaaatttacagaattattgtttacatcttgtaacaaagaaattcataggcatatcttttaaaaagaaaaaagtacacattttcagcagcaagctctgctagataattgtgcaatatatctattcctatatcatcttcgcaaattccttcgctacttccttagatcttgaagtgggattcaagtgtcagaattcagccactgataatttgaatctacataagaaatttattattacacttcacaattgcaatgaaataatattgaccatatattacttcagcatataaaatgctactatgaacatacatgaaacaacatagccatattgtccattgtcttgcagtacttcacacgggtcttaccggttatcgttttgcttgaaacaatgatttgtaaccactttactaaactagttcaaagacaaacaaaagttgctcacagatctagcattaaagtgaggccaattgccacctgaaaaatagattaggagtactaatgttcatcaagattatcaatgatcctgttaagaatataattatctgatagtttcatcctctatatatccgaaactggagaattctaattggtttttggacagatcattttattactaagcttcatgttctttctcctctgttctgtcaaccaaaaacagagtagcactaacctttgataccattggaaacccagtgtggtagtgtcccagtcatcttaaatatattcttgcaaacctgcttgagaggggaagaaagacgatgtagcaccaaagaatcaaataatgtattgaagcaagaagcattagtatttaagtccatctaaagtaaactatctaacgccatgtttgtggagtgttgactgtacacatcatgctttcatgattcctccaaacgtgcctacacaccacaataatttcctccatactacagtagaacatctatagtattttattttactgtatcagcaatagtgtaatacaagattttggaaaaacacagtgctcaggactacccaagtgcaatttatcacagtttgctgttgaaaatggaggaaaatagttcgaatggcacatttcttaacattgaaagctacagttgactgagatatacaaatcggatatcagtatccgccaccaccatatagaagaataaatgattactactcctacaatggaacgaatacattgggtaacatatcaaactttggagccacacaccatagaacaaaaacataatatgctatatatgcactggatatgtcaacagttaaacatcaaatatttttgcaacaggaacttcccaatatgcatgtgagcatgcacttctaaaagatcttactactcttgccaatgacagtacaacttctatcaatcatctgtgaaggaaaataaaaagtaattatgaccttttcctatatagcatttctccaataaattggaaaatacctatagaataattatgactaaccagagaaggctgcagccataattaccttgcaccaaatgatgtgctctgtgagttcttctcctgtgggtccatctttacaatcttgtgagcagtcacatatagtgatatagagttgctttgcctcattctctacacttaaagctgcagtgttagtttcttgtctcagaacatcattagaaaataatatgtctgttttacttaacaagtcatggaagaaaatagatgacatgcagaatagtagcttaagatttcgttcccagaatttaaagatatagctcatgttattttgaactttcatgcacaaaccacaacatgctgatccaaaatattcttcaaagctagtgttttatcaaacaagtcaacattttttttgcaataagaaatcaactcgtattatattggttttgctcttttggccctctgttgtgacctttaagtaatgatcagacataactctggattttatcgaacaaatcggtccatatatactgcctgcttgtcggagtcaacaacttaatccccttgaaaaaactggctagctgcataaaaagctgttctgttgatggtgatcacccaatgcgtgcatgaagctgaaagcaataagcactactaattcacagatttagggttttttttttgtggatgatcatgttggcaataagaattttgcaatttcacgtgatcagataaagtatgagaggtgtgaagaaaacatcaataatctgtctaaggacaaaattttccttttacggagctggcatgcaactgtacacagtgaagcttctcaaacacatgatgtgcatatctgtgacagagaacaagccatccactcttactgaagaagaatttagtcaaacagtacataaaccacaaaaagggttcctttgggttcttgtgatgtgctcaccatgcgtacacaagaaggatgcaacaatcatacgtgtctcgaccaggggcggatccaggattttcagtcaccggtgtcattaggtaaaacatattttattatagcctagcttgatatagttctagatccttaatcgatgactggatttgaagtgtatatgttaaactataatggtttaaatttttatagtatttcataaaagattgggaacaaaataattcatcccaatattatcaacataatcataaatctaaatcatatatttatgaagcttagttatctataatgttctacacgtgttctaacattagtgaattactagtacaacatagaaatagatatcactgattgataacaattcgagcaacttaccatgtcttctaagtattaaaaaacatttttgcaaaatttaatgcatacatgtaagctttttatctgttgcgcactatttctataccttattattctacattgttatctattaaacctaaaaagaagtaatgacacatttcaccgggttaaattactaattgtttaacatatcagaacaaagtaaagtaaccaagcaagttagttctaacaatcacttagcaaaactatgagaagttgattaattaactaaaggaaaatagggtgtttgcacgtgtaatgctaacaatagcataactgttttgctttcataaaacaacgcatgtttttattacctgctaattgcatgagctgtagtgaattggtcaatctaccggtgtcagtgaactttcatcgatggtgtcattggctaaaaacaaatagcatcgtgtaggatttgcaaaagggcgtcggtgtcagctgacactggtaggaacaccgtagatccgcccctggtctcgactctccagcaatcagatgtgtctcgatcttgcatcctgcaaataccatgaagaaagggatgggtgagacaggctagatagatggccagttctggggagagccagcgtgtgcggctgagcactttactccttctcccccttcctccgttgccgccggcgtctatagtccctcgacatcgctcacggttcacctgacgagatcgatgtcgctccaccgatgaaaactcccctttctcccctgccacctgccaccatgggggctgcgacgagccgtcccctttctcatcaccgagatctgagtagttgagaataccagattgcagtagatgggaagcataaacctcggttgctcgggtgatgactgatgaattgtgggttcctcctggagttaaggaggtgatggggtagttggtgttggggcttattattaggggtgaaaacggagcggatattatccgatccgatccgctccgaatccgtccgatgtgaggatatggtaaggatttttagatattcggccggatgcagatgcggatgtggatatggtatcaacgatatccgacggatgcggattatccgatattttaatcggattatccgatgtactgtttggcggataatccgcaactttcaggccacacaacaactctatttagcccattttacatcggacggcccatctagcccatctagtgtaacctaatccaatcctcccctaaatctctctctctgtgactcatctcttagtcccttctcctgctcccacacgcgctgccgcatggcaccattaccataggtgcgccgcgccgccgttgcagcatgttggcgccaccgccgccgctcctccttctagtccgccgacagtgtgttgtgtgttgtgtgctgtaagcagtgtgctgtatggaactagtgtattgtgtgctgtatgcagtgtgctactgtgttgtgtggctgtgtgctgtatgcctagatagctgtatgcctcattgcctcatgcgtgtcgtattgatgagtgaactactgatctactgaactgaacactatatttttaaattttaagcaacacagtgaactgctgaactgaacacttatattatgtttttgatggatgtgttatattaagcaaaattatattattgatgtgttttggttggtttttcctagagagctgaaatcatgttcatatgttgttttgccatcgtattgcggctaattgtattgccgccctcttgttgtacggattgaatacaaacttaacatccgacaactttttgtccgtttccgaaccgagtccgcaccgactccgcaccgaatccgacgtccgaaataatccgctccgcatccgcatccgcacgtcatccgcacccgctccgcatccgcttaaaaaaaggtttaggatatggtatagctattatctgtccgaatccgctccgttttcacccctacttattatatcgtgagctgaaaatgtggagataaattagccggttcgttagatgtgaaattttggcggcagtctctagacggaaaatcgagattggcgggaagtattttcatgtaaattgctcataaaaaatagtacggtatttctttttcaaaaaactacgagagcccataagttaaaaaaattggtccacatgtaagtattaaattaaggtaattttgattttgtttatatatataacatgagatttaattctacattcttgtttttgagatggaagtttgatcacaattcttttataaaatataaatttatagaaatataataagtttatgagattaagaaattactttcaaaacaaaaatgtacatgtatcatttgttatgtgtgcaaactatcattttcatttatatttaaagttataataatttagttggaacttgtctaaaacattatatattttcttgatcaaacgtattaaatggtaaacacatccattaatttaattctatgttatttgactttaccatgctctactgtctcaattggttcctcgtctattggtctatttgagtctggctatcttcggttcctcgtctattggtctatttgagtctggctatcttcataaatagcttgaagtgcgagtacaaacatctcatcactacttacttcctatgcttttcacaatcaaacatagctgtctctattagacactagccatccaagtcagccttatgtcttcagcgtcctacgtgtaagctagggaaaccacgtggctacaaacatagcatttaatggaagatgatttttacaggttaaatgaagcttgtttgtggttcgcatattttggcttaaatttcattatcaaagtgccctctaaattctttagaaaattaataaaattgctgctgatacgaagttaattgtccatcccatatacaagcttgtttatttttctggttatttatgtacaagtagcctctatatgtttgtgcctagatagcgtcgtcagccgctgccattgctgtaaggaataactagatattctcactatgtgcctacttccattctccttcgtcatattacataaaaaaacgatatgtatactttttcgtaaaatttcattttccacacattataaatagcactgtatatgaaaatgtaataggctattatttgatatagaggggaagattttgtttcattaacatggattaaactaatttactgataaggtgcgtacaaaattgttaaaactttatagcattccaaataaaactactagtaataaaaaaagttatttctaattattctattccattatctaaaaaaaaataaaactactactaatttatttctttataggtccaccctgtcagatttccatcaatctagctctcttgtgcctgaaaaacagaaacgaactgattttgccgcgggtttgctccaaaattttgtgttcgtacgcttcctccctcaatttgccgggttttcttctccactctcggaagcagttatggtcctaacagagaacaaaacccatctcatctccttgactccttccctgtacataccgacccaatctctccagccttcgcagcttctccacagcggatggcggggcccgccgcggccgacggcacaatcccttgcagcccaggcgacgtcgccggtgcggcagtgcctcagccctggtcgctcgtccccagggcaagatcacccgcctcaacgcgcttctccacgccgtcatcgaggtcaactccgacgcgctccagcagccggcgcgcgccgacaccgcgagcgcgcctctagccaccgctactgcgggccgctccatggcgtccccatcctcaaggacaacatcgtgacgcgggaccggctgaaaacgacggccgggtcgttcgcgctgctcggcttcgtcgtctgtcgtgacgccagcgtgacggccggcctccgcgccgccgctgccaccatcctcggcaaggcaaactcctccaagtggtccaacttccgccccgtcccgaacggctggagccaagacgctggtaacacctatcaccaccctaagctgtcgtttttttctccagcatctcgtcttgtatgcaatgtgtttgtgaaattgtccataaagagccccatgttgtcaactgacgtgatccggtccagccgcgcggcgctggcatgagtgcatcatccgtgttgaacgggtggtccctggcggctttgcccgcgcgcatcccctatgttttcagtttcagcaccagcagcaaccacctcaccgtgatggattcactggctgaatttgttcctgccaatcaacgaccgcttatcatagtaagaacttgctgaatttgtttctgccaatcgatggcaggttacaatagttagcactctatttctttatgcacaccacgagttcgatactttgggccagtgcaaaatcgttggtcttattgtttcatattcttgtgaactgactcaccgctgtatacttttgtggatttaggcagctccagttagctactcacacgaaggtcatttgcatctactagaagctgcagcatggacgtgatatatatatttgcaagatctggtgagaacactatttaataatcccaaacaccatattagtgctggcagtgattgtcatactatgtgcacacgatctattagaatttgttgaacccaagctttggctatcttgctcatgccataattgtttggaatgtcagattacattaggaggtgatgaagtaagtgttccaaacgtgcaaatccatgtcatcatccaccagcactgccccctcactattaccattctctaccatatgtactagtaattattatagttatacagatgaagtaagatttcatgctggaactttcttaggaataatatgcaacttgtgacctgtttttgctagcattattgttgttttgaatgaagaattgatggttgcaattggccgatttctgctaaccagtgaatcagtaaggtatgaatggatgcaaattctgctaaacacatagctatttttattcaggatagagctgcgaactacgacatgaataatactcatatgtacatgaatgtacatgttaatacatacattaggataaatataataaataactagatgaatgggtagtgtgaactaacctagcaagttctgttttttaaatcgtttggtggaaaatctggcagtttttttatcaaaagatatgtgaaatgatgtagacactcccagtcttatatacagtcctcatcaaggttgttcatgttgcttaggattctattcattcgtccttatcttttttttttgttagtaacaacatctttgtaccatgatctaagctttcaggctggtataagtataatcagccatctgtggcctttcaattattctaattatgcatgtgtacaagattgtccttttttattcaattcagtgatctccaaggttgcatgtaagctttgtccactagatcatggatccaacacaagcctccaggtgctgttaacctcatctccacatatttagcgacaaactttgtgtgagatgaagatcaaattgtatagtcaaatatattcacttgtggttattaaatttataacacacctacattacctttactttctatttcaacacagcaaactatggatttaaatgctagtaaacagacattgcttttctacagaccatttatgagcatttttggtagaataaaggagttttcatatgtggaaaaaaatatcttgaaactaagatctgatccaatggccatttaacaattgtgtgaattagtgattattacagcagaagtgtgtgatcattgagtatgtttattaaaattctttgaagtggtggaatttttttacactgccaccacatgtttgtcactgttgttggtatagaaagtacaaattttcatctatgtgatatcaactgtttattttcaagcccattctttggtttgtcaaggtgggaaattcaagtaaaggcttgttttgataacctcttttgcaggatttattttcaatttgttcaaggctgttggtattgcacggaggaaattcattacctactttttttttaaccttgcaatgtcatattgataacccatgtatccccgcaaaaaaaatattgataacccatgtaatcatgtcatcaactcatgtgatatttggagtgccttggagtgtattggctttgaaagctttgctatcctgtatttcccatggttattcatcaacagagattgcacattgttgctttctactctgctagtggagggtatgttaattaagtccattgttggtggatgattatttgatttttgaccatgttaatggattaaactaagatcaacatgctatctgtaatatatatatctgacttcatatggaaattcgattgtatattaaacaatgttatgaactccaaaataatttgcatattgagaactgcacaagctcaagggaactttagtctggtctattatagaaaaatggcaaaaactgaggtgattaaaatgagaggtatgagagaaaatagaagagtaatacaatttttaagtaaacaatgcaacggaaagtaaacggttgatgtaaatctccgaacaaacgaatacagtagacatgtgagttcgaatagtttgctctatggttagcagtttccttttttttatatatatatttggagacatgtcgcaaatcagagtaaaaaaacagatttgctaaaaatatgtcgccagtttttgtcaaaaaatagtcgattttgtgacagtacgatttacatcgagattcgtgctagtgcaaagtgtcgtgacggagggttgaacccagaacttcgaagtcggcagacagagctcctaacaaccgagcacggtattggcattcactttattgccaaaacaaattaatattgaattttgaagtacttatacactaattaccccccacattcacttacacggcacttacgctataattacatatgtatttattcacttacacagcacttgcatatcacttacactataattacatatgtaatttagggacttacaatgtaaatacatgctgactattttttaatgaaaaatatggttccataaatatagctactcccgttaaaaaacacacaaagtaaaattatcacaacataatccaaacacagccatgcgctttcaggtgccactggatcgcaatgcttgcgatatacatgtttgagcctagatattattattattctttctaaaaaaaacttggacaacagttgatagtgtgatggcgcaaaaaagaaagtaaaatcatttacatgcacctagcaacaccaaggtatacttgcccacttggttggttgagaattgcgtatgccaaaggtctagagtttaactccctccataataagcaacacttttttaccatatatttgttcactgtttcagcattcataacattgtgttacttttgttcactgtttcagcattcataacattgtgttactacaggcgacagcaacatatatgtaggtgttactatacagttcaagtataacataactcgtatgttttataacacacagcttgtgttgctattgaactatcttgtaacatatgtcttaaagtgttacaaatttatattgaactatcttgtaacatatgtcttaaagtgttacaaattatgttacaatatgtaagttctgtaaaatgggtgcacgatgtcattccagaaacaccttatgccataactgaaaatttcatgaacaaattattcaatgagtataataaagattacattacccatggtgagtttgaattattcaatgagtataataaagattacattacccatggtaagtttaatatagattacattatcatggtgatgatccttgtctgctctcagatggtactgatacatatgcccttgttaactaatatatagtcatatttcctccaaaagtatatatagtccgatcataaatggtatggacattatcatgccgaaaaccaccctttaacaacaaaaatgacaaaagataacaattttaagacatattattgatttggttataaataattaactctgataattaaatctaccagtagaaacttacgccgtacttaggacgtctgcatgcaatccatattccaaatataaaggatgaaataaactgaggtattgcagcatacactcatttcatgagaaaaataaaaaatatgaagaaaaagttaaacaattgatcacaatatatcttgttttcaaaaagaaaacagtgacaaaaaaataactgattataattaaaaagatcaatgaattaattaattacactcatttagtttttaaacttcataacacttgcaaatttcactcgtaaactagtagcagttaattgtgtgtacttgtatgatggctactcggaggacatcaccacggatgccaacggcggcggatcctatggccatggcagtgggcccgattatgaactttagaaaaaggcccagaagtgcaagtcttcttgctggcccatgaataatccttaggaaaaatgaaagaaaagaataagctggtttagtacttttaatgtaaatgtgcatttttttcttggcatactgtggacagagatatattataacccttacatacatatagactaaatgacataccactatatgtttagaagtgcatgtgtgcaaacctacccatattgaacatagccagccccagccctgatcttgacattattagcaccgacccctccaaagctggtggcaaagtgaggtgcgacctgcaaaaatattaggcacagttgtatatattagtacatatagattaattatattaatgagcatgtacttatggggatacttattactcatttacctattggagatgcaagcctaggagatgccgattacactagcatatagactaggattacaggctaacttacgtgccaccgacttgaagagcggtaacctggcaccattcaccactgccactgacactgcctcctcccccctgagatcttggttcgtggcatctgaaaccccctcttcgaggctttgcatatcttcgctggtacccgagctaccgacgaccgtatcatcatctatgaaggatccttcttcataactgttagactcgtcatgagcgtcggagacgaaagctttccttacttccaggaccaccacgagtgaggtgagccacactattgcctggaagattgatagttgtaccacaatttgccctgcccagttgccatacatggccctcgccatgggcatgcccacaaccaaagaattggtgagtgacgcaagagaaaagccgcttatacaccagtcggtgacagcggcgcataatccctctttccggaatttcaacataacaccaatgctgattgcggcgactataattaactttgctatgctatcagccgctataaggctgcacctcacattgtagggatcaaggtggagggtaaattcaaaggtgaaaaatggaaaagcaaaccaaacgaccattctatttattgcttcggaatcttctgccgtgaagatttgccaccatcgcctggaagagcagtaccccaatgcaagggcgaaataaagcagtgttatcgcggacaatatttttccaatgtccacccaccctatcatcttgaaattggtgaaaaaaaagatgaacaacactaatacttcctgagaatgtttaggtcgacgagtgaacactgatatctcatgacgactcgatatcatatatatagtgaagactgatatctcatggagatattgttgagatcatgccgttatgagtttgttaagcatgcgcgagccaaatgcggtgagctgatgatggcgaccgcgaaaaaccaaattgtgggattcgttttcttcctaatcacccaaacttaaggatctaaccaaattgtgggattcgctttcttcctaatcaccccaacttaaggatctaattgttgagatcatgccattacgaatttattaagcatgcgcaagccacatgcaacaagctgatgatggcgaccgcggaagcgactgtgaaaaccaaatcaaaccaaatcgtgtttctcttgcagaatgtagcgtgtagtttaggaaaaactgtatttgggatggcagcttagagcatcatcaaaagcatcctaaaattctatccccaacatttcagttatggtaattctaaacaagatttgaggtgttaaaatttttattcctgcaacagattagctataattgatttcctaaaaacaaaaagactgagcccttagaaaacttccaacagaaattagtttccactcgtcgctctcacgagatcacgctctcgcacgtgccccttcgtcgcccctctccacgcagtaccatgccggcagatcaacctgactggtacacgtgcacccccagttttctacatgtacaccagcaattctagcaggcaacaaagcaccaactagcagcaagcaatttttgatcaaaatccccggaataccacacagggaatgatatcaagatgctgttggtgatgctcttaggtatcacattctagtttttttttctctttttatttttagctgtgttaccaaccttacgtgtgacccccaggcagtatggaagttcaggcatttttgttcttttaggcttgcagttttttttctttcccatattttccacacaaaaaaaaaatctcattttatttagaatgattttttaatgttttcttttctggtatgtaggttgataattgtccgtgctgtaaaatgggtgcacgatatcattcaagatgcaccttatgccatgactgaagatttcatgaacaaactattcaatgagtataatatagattacattatccatggtgataatccttgtctgctcctagatgataccgatgcatatgtccttgtcaactagatatataatcatatttcctccaaaagtatatgaccttatcaaccaaatatataatcacatttcctccaaaagtatatgtccttgtcaaccagatatataatcatatttcctccaaaagtatatatagtcccaccatgaatggtagggacattatcatgcccaaaaacaccctttaacaacaaagacaacgacaaaagataacagttttaagatatattattaatatggtcatatataattaactctgataattaagtctaatagtagaaacttacgctgtactcaggacgtctgcatgcaatccatattccttggcaaatatgaaggatgaaatagactgaggtattgcagcctgcactcatttcatgagaaaaattaaaaaatatgaagaaaaagttaaacaattgatcacaatatatcttgttttcaaaaagaaaacagtgacaaaaaataactgattataataaaaaagatcaatgaatgaattgattacactcatttagtttttagacttcagaacacttgcaaatttcactcataaactgtcataatccacaagtttggatgtatggaaaacttggaaatggtcacattgctgccatggatggcaatgaggtgcatatttatacatgaataatgcctactttgatgcccatatactaagtactagcttgctgaaaaaaaattatttgaaagcaaatctgatttgaaagcgttttatgcaaataaaacttgccttatgctaaaaagaaccatatatgccttccttggatatatgccatgcatgtagtgtgttaggattgccttgtgcttgctagtacattatttttgtaatgtactgactcttgcatttgttgttgtattgttgttatttagagatggttgcaggtgaagtcactccggaggaggatgacttctttggtgatgattcgttcttccaggatggttcttgctaaggtctaccctagtcagttgcataaaagatcttttaggtagaaaatgcttccgcaaacttaagtatttggccggtcggccataagtatcttagtactaagcccttgtttagattccaacttttttctttaaactttcaacttttctgtcacattgaactttcttacacacacaaactttcaacttttttctttaaacttccaatttttttcaaacttccaattttggcgtggaactaaacacagcctaagttgtgagaatttatctaagtcccagaaccctctatatttggatatcaagtgcttggatgaaaatgtttaatatgttccttatgttaggaaaatattaaacatgactatcagttaaagatatttgacaagtcgtatatctttagccatttatcaagtctcctgaatgtgtaacatatcttgtcgctaccttcgtatggtttgacgggcacatctcagactgaagttgactgacaggctaaaggaccagcaatatctctaatatccttctctcgaagcgtcggatgtcttattatgcttgatgggtgaattgaaccattctattcaactatcaaacataataagaggtccggagtgcttttgacataaactagtactccagtagttaattgtgtgtacttgtatgatggctactcggagggcatcatcatggatggcaacgacggcggatcctatggccatggcagcgggcccgattatgaacttcagaaaaaggcccagaagtgtaagtcttggtccacactacataatcctttcttgctggcccatgaataatccttaggaaaaatgaaagaaaagaataagctggtttagtacttttaatgtaaacgtgcattttttttcttgacatactgtggacagagatatattatagcccttacatacatatagactaaatgacatactgctatatgtttagaagtgcatgtgtgcaaacctacccatactgaacatagccagccccagccctgatcttgacattatttgcaccgacccctccaaagctggtggcaaagtgaggtgcgacctgctataatattaggcacagatgtatatattagtacatatagattaattatatttatgagcatgtacgtacggggatacttattactcgtttacctattggagatgcaagcccaggagatgccgattacactggcgtgtagattgggattacaggctaacttgcgtgccaccgacttgaagagcggtaacctagcaccattcacccctgccactgtcactgcctcctcccccttgagatcttggttcgtggcatctgaaaccccctcttcgaggctttgcatatcttcgctggtacccgagccaccgacaaccgtatcatcatctatgtaggacccttcttcatgtctattagactcgtcatgagcgtcggagacgaaagctttccttacttccaggaccaccatgagtgaggtgagccacactattgcctggaagattgatagttgtaccacgacttgccctgcccagttgccatacatggccctcgccatgggcacgcccacaaccagagaattggtgagtgacgcaagagaaaagccgcttatacaccagtcgatgacagcggtgcataatccctctttccggaatattaacccaacaccaatgccgattacgatgactataattaacttcgatatgctatcagctgctataaggctgtacctcacattgtagggatcaaggtggagcgtaaattcaaaggtgaaaaagggaagagcaaaccaagcgaccattattgcttcggaatcttctgccgtgaagattcgccaccaccgcttggaagagcagtaccccaatacaagggcgaaatagagcggtgctatcgcggacaagatttttccaatgtccacccaccctatcatcttgaaattggcgaaaaaaagatgaacaggattaatagatcctgagaatatccagatcgatctaaaaggtactgtattaatgatatacttactacatagagtcgatagatgaacaccgatatctcatggagataatcccctcaaaataaaaagtcacacctcacacctcatacctttctcctcctccaaataagaactcccacctcatgcctttcttattctcctaaacttatgggatctaattgtggagatcatgccgttacgagtttgttaagcatgtgcgagccacatgcgacgagctgatgatggcgactgcgaaaaatcagatcgtgggattcgttttctgttacggaatgtgtagcatggagtctaggaaaaaccggatcttgggatgacagtgtaggtatggcattctagtttttttttctctttctatttttagctatgttaccaaccttacgtgtgaccctaggccgtatggaatttcagccatttttgtcctttttaggcttgcagttttgtttctttcaatgtattatataatattatcatatatccatattttccactccaaaacaaaatcccattttctttagaatgatttttttaagaccaactcatggaatctatctctgtcatttctatattattaaccatgtttataaacaattttacagttgatcaggccatcaaaggatccctctttgcatgcatgcacaactgaactgaactgaacaaaaataagataaaatgcaggtcagctttagtttgtcctgtggctaagcatgcacctcataactcacaaaattggagggcctaaaagcctccagcgaagagctttttggcgtgggatcgatcagactagttaattagctatgttgacatgtagctaacttgctatgcatgcatctagggatgatttatctacaataatcgctgacaatctgtctgatcggcttgagagatggattcccacatgtttaatcacgaggtaactactggttccttttttttttataggagtagaaaagcttaaaatcactcccttcaataacaagtgacgcttttatattgatacggtttctaaaatgcaacttgatttgcatacaactaactaggtgagccgcgcaattgcgcagctagcatccatacaaaattattttttttacatatgattttgcttaaaattagttaaatagctatataattgtcttaggactttgaaaaaccgaaccttatcatctgcattttctaattttatagtttttgaaagtcacactaggcgctacctcgtacttatttgttacccttttatttatttgctcgatctactacggtttctattcatcctccttgcaacttttaaaattggatcttataaattctagagtttattgctcgatctactacggtttctattcatcctccgtcaaacgccgtcactcgactcccctaagccgtccatcgcctactctttttattttcattgggatttttaaaatcgaacataattatcatctgtgtacattttaactttctagaagtcccggcaaaccatccgtagctttgttattgtactcctctatgacccatccgttgccttctctcttaattattagtgagattttaaaaatcgaacatgattatcattttggtttaatttttactttccaaaagtcttgccaaacaccgtgattgtgctgcttaacagcttgcctgtcatcccttctcttaatcatcactgggattctatttgattttttttaaatttaaccactataattttgacatgctatcatctaacaattattttttagtaatatttaaattcaataatatgataaatagatactacttgaacactttggaagtcatatcaaaatccaatttggggatgtattttatttttaattttatttttaataaatatttttaataagtagatggactctgcttctaatattctttatttttaattctgaattttagtaatttctaaattgcattcctacctgaactctttcgaattcgtagaattcatattgaaatcaaaatttgggatttattttattcataattctaaaatttaattaatcctatgttgtgttctaaatgcactctcttccaatattttttaatttagaattttagtaaattctaaattgttttcctacttgaactctttgaaaatcgtattgaaatctaaatttgggatttattttttaaattttaaattttaattattttgtctttgtttctagatgaactcttttttcaatactacttatttttaattctgaattttattaatatttaaattgtattcttactttaacttttatttttatttttctcaaacttattttttaatttcgtttgataatatactcagtaaggggcaggtgtggactgcatggatgtcatgtgcggttgattgcgcattagacatactccaatcaaacagttgatatttttttttatttttctctaattaacgtggtaatttcttaaaggtttagacatcatagcaaaactgataagctcctatgcggtatacaggagccgggtttgatattttttaggtgcatgtatgttagttttttttacgatctagattatatttccaatttgccgtgctagtcatcaatctatcaaaaaaatgtatgacatttaattttctccaggagtgctaggctagctatttacgaatgcatatggcagtgtatagacatggaggcatgcactatttatttttcttagtactctacttttcctttttttttcttcgatggttaatcggatctactctacagttcaatcactcattctttcattgctcagggaacggaaattgtgtcgtgtattcgtatttctcgtcaagtgagtcgagactgcggctgcatcctggagactgggacggaaatcagcaacagctagcagcacgagccacgctcacgtgtggaggcagcagtagcttagttgggagcttttctcgatgaaagaaagaaatgaaacaagaaatagaggaataagatcccaattttctagcatccatccaggaacaagaccccaattttctagcatccatctatcactgttaaataaaacataggtagtttgctaaatttcatgtatttgatggactatgagatattaaagttggatgcagaatcatatagcgtgcaactctttttcgatatcatattattactttgtagttttttcgctatatattccatgtttgtaacatgaacattgatctattatatataactttgatctattataagtgcaatctcgaatgacaaggattttagccctcgcagcctcgcaatgcctcattttttgtccgtcctctgccactgtccttgcccaaatcggcgccaccgcccctgccaccggaagccttttcatctctaggtcgctgccgacgccttccacgccgagctgctcctcgccgccaccgatccctgccgccgacaccttccacgccgagctgctcctcgccgccatcgatccctgccgccgacaccttccacgccgagctgctcctcgccgccaccgatcccgccaccggaatcccttttgttgctaggtcaccaccgccgccttccgcgccgatctgctccccgccgccaccgatccccattgccgccatcacgctctcaccatgcctctactttacgctccacatctcatagcacaggtaatgtggctcttcttgaagcagtggcattgttctgttcttttgtttttttgaccgttttgggtatattacatctaatttgtccactgggttcagtaaaagtgtaaaacacaaagcagaaggattctctatatccagttcataattgggaagaatgtcatctgatagtatataagtgaataattttccatgtaatacctagattggcttatcatctgttgattccctggagagctaatcaacccattgaattgttttgccacttaccaactatacctgattaaatcagtagtcaaaccttttacttgttttcaaattcaaactttttacattttgatttgatatttctctattaaatctgaattgcactggttctcattgcttgtttctctcagtcatgatccatgtttcatgtgtagttaccaacacttcttgcttccatgctatcactaggagaaagaatgataatgtggttatgcacagttctcatttagcaaaatcacaccaagatagagaatggtactgtggttattaacacatttgaagatccatctgttatagcttgtttgtgaatgttggggcttttttttttctcgatgttctgttctcttttctgccagaaaatatgcaaaccaatatgttaattcatttgcctgtttgcgtttaaatgttgtgtcttgattctgatgtttaatccaatgtcgtaaaatcactgccaaattaataatcaaaatatagctatgcattgtggtgaagtcatgctcacgatgagatagagctcagctgctaattttagtcactaattttggtaaaataaactatgccggggatatctttgaatgtgaggctactaaaatttcatgatgatatactccacttaaaatatgtttatttgggttggaaaatcaggacttgacaacaatttcttctgttccttttactggtcattttactgggctgaatatataagatggaattgcttagtggttattggtatttaacctgaaatggatgccttgagatgatcacagatggcggtcttgtaggttatccattgccctgtgatatgcatagatgtcaccgtgaaaggaatggagcaattcttagattaattatatggagtcttagcttcagtcatacatggtagatgcattcctgtcttaaatacattagaattggcatatagagcatcaacaggcatcaaagaggcctatgaaagttctttcaattcaagtacgaataaatagtatattataaagactaaaacttatttggaaccagcacagaatactattgtttgtaactttcctttggaataaagtatggctcatacagatcaataattcatctttccatcagtggcgcttgtcctttggaaagaattgctgataattcgatggaacgtattgatcttaagacaatcaggggtcataatattgtttctaactttatgtcaattgagaaaatgaatgcatcgggcagcacaagtgctgatatataatagatatgtgcatacacatgcttttacacattaattttcatgttgttgctaaatatacattgatgtgtgcattcctgataggttgatgggaacattataaggaggtgctaaaagtcatggactgcaagttatcttctaccctatagttcaacaaatggttttactcattcatcgtgtgacacatccaacggtctaaaattatctaatgaatctggatccaacgtcccagatccgcgtgtgtcccgcgcctccctgtcgaccgcaatcgccacaccacctcccccgcatctgcgcctctcccgcatcatccttctctcacgcaccttcctttctcccgcaaccgccgcacccccaccacacatcgcctccaccaccctcatcagctccacaaatcatgccgccgtcgccgtcccgctcatcgcgccgaaccgcgctggagtcaccgtcggcgtccccgttcccgcccctccgcccatctcatcgatccacgccgccagagtcgctgtctccgcccccgatccacgcctgtgcgcccctcagatcaccgtcggccggagtcgccgggctcgtcgtcgcaagctgatcccctccgccattgataggaggtccagaaaacctccttccttaccagattgaatttaatctctttttgagttaagcaagagcattggttttttcctccatcagtttgattcttgcaagttctggagactgatacaattatgtaaaaattgaggtggcatggaattcaaagccatgtgtagaagttagaaataatacttctgctcatacacaccaatcctttgctctactggagactcaagtgcaatattgaatccatcaagagcataacaaaatcaaataatagagaggattgtaacagattaccccatcaagttggtgaaataaaggagcaattaggataaccaatagatcagctaatggaacacataatgaacagaaattccttagacctttgttgtcgaagtgacaactgcatacgtcgaaggatgtggttgctcaagggttcttggaaacaacgaagtgtactaatttaaggatttttcttttgaatgcccctttacatggccctaggggtctatttatagttctattacagatccccctattagggtttaggttttacaggggaatttacatggttgccctcatgagagggacacttgtatgggcatacaatgtaattgaaatatatgggcctccaatgggccggttggcgaatgttggcccactggccaatgggatagagcggctgggatggccccttgggcctccttggagctgggcttgataccgcgaagtcatcctccttcggcaagcacccttcaccatttagccttcgcctaggacgcatttggacttgcagggtcccaacgcgactcttcacccttcgccgcctttgcccccatagtcttcgccatggggcttcgccccgacgaaccttgacgccttgagtctgaatcctcgctggttgcatggtttcggcaggtctggtcgaagggtctcatgacataccgccaacaagcccctcacaggcaagggtgagataggagcttcggccgagaccatgcaaaccatgtggtatggtatgaggcgccccctttcgaccgacgctcctgccgaaacctattttgggttcctgcaaagaatgtgtgcattgcgtgtacatgtattcttgcggttagtaatgttttgcagcttttgccttctgcgaacggcgaagctgtccttattctttcactggaccgaaatgaacagtgatgggctttccttcgtgggcttgtccctatgcggctcggttaatgggaatttaccgtttcgcctacccttatgacgcgtggcggctcatgattgggtgggaaggcgaaccgttgcctgggtgggctatatattcccccttcccctttttcaccgccgcaccctcgtcattttcaccgcgagcgctctctctttctctgtacttccctttcacggcgccttttgagtcattaggtctttcgcccgttctcccttttcaccaccgcgcacacttttcgccatggctcctcgcaagccgaacccaacctccgcgacgggccccgatcccggccggatcgacgatgacaccaccgcctttttaggagcttagctcgtggacgatgacgagctggtgaagttggtcagctccggcgcagtggtggaggggcaggccttcgctccgggaaaggccgtggtgccgaaacccggcgaaaaccggacggtggtattcgtcatcttctttgaggaggggcttcgatttccgttcaacatgttgtttccggagatccttcgccttttccaggtggagctcccccagctaagcccatcggcactcgtccgtatcgccatcttcgactgggcgtgccggatcgccgggtttgatccgagcgccgatcttttcggcaccatgttctacgccacagtgaactcgaagacggtggtcactccggccgggacgaagaaaacgacgttcgggagtgtgaactttaatgttcgccccgagcgctccgatatctggccggtgaatgccgccatgtcaaagtaggatcgcaattgggtggcgaagtggttctacctctccatccccttcgaggctgggtccgatgcggcgaaagccctccggaggcggcgtagggtgattgcaccgaacaggaagcccaaggtcgccgtcgatggcgccatggaagcccggttcgccttgctgcacaaggtctgctcccgccttagctgtcgcgacttggtggaggagttctgcatgcttcgcatttccccctctcccagtcgtggcaagtcgaggtcgatggcttgccgaagctcgtcatgcctgcgggggcgaacggtgagtctatgcttttcctatgtgcatctatgtttcgctctttttccccgttcgacgcctgatgtggtgacacttcttgttttcgtagtgttgactcttgctcaggccgacaccgaagcccgaaagttgatcggcgacgtgtcggtcgctgagttcagccagctgctatcgcggcaggcggcaagacgggcaaaccggtgtaggatcgagatgtcaactagaaggggggtgaataggcgatataaaactaaatgacacctaatcaaaactaacctaagttgctaggcacgtgaggatcaactctaagcaactaagttatgttttgcaaacgtagggtgatagtggctcaaatatatctctaggaaagtaaatcacactcctatgtcaatgtttagcaatcatagggtgatatgatctcaagtatctctctagaaatgtaaattgtacaaatgtaaatgcgacaatcaaatgagacaaggagacaagagatttttcaccgaggttcggaaactcgccggtttcctactccccgttgaggcgagcccaactccaccgctcaaccacaaagccaccgcacgcccccttcgtcaaggggtgggcaaggcgggagccggcccacggagaggactacccaagcctcgatcactcggggtagttcttccttcactccgaaggtggtgaactccaaaccactcacaaaacggcgccgggcctcctccacaatcttctcggagaggtcaccgggcaacccctccacaagccgtctaggaggcggcaacctccaagagtaacaagcaatgacccggcgtggagataatcaatcaagtgccgcactagctctacaaatggaagcaatgcacttgactcttggctaatcaaccctctaacacactagatggatgaacacaaagctcaagtgagtgtgagagaggtgcaaggggtgtatgcaattgaattgggtgccaagagagcccccttgctgctggtgggggagtatttatactcccaccctccaaaactagccgttgggggcgaaatcccccaactctgtgctctgtcggtctgaccggaggtatgtggccggtcagactgtgctactctgcaacggctagaaaactagccgttgtagtgctgtcagagggccccatcggcccggccggtaagaccggcgttgagtgggcggtcagaccggcctcggctcggtctgaccgaatacggctccgtcggctctgtatcggccaccctgagcagcaccatcccggcctctagggggccggtctgaccgcgcatgtgccgccgatcagaccggccatatgggccggtcagaccgcccgcttggagccggtcagaccgccactatgtggccggtctgaccgcccctggtcaggccgaacccagtgaaaggcaaagtgtgtgtgtgaagaaaatgtgagcacaagtctaaatgcataatgacctaatgtggcaattaaaatcatctctttgctaggtcactacccctcttaataatacggcgaaactaaaaataaacttgcaaatttgatcgccctacacctcgatcaattctaaattaaagcgctagttttaccgtcttctttccctttgctttgcgccgtcaattttaatccatcgataatcatccatgcacacatatgacgtggacctaacttaaaatatatagctcaaagacaatggttagtccacaattagcgcttgtcattaattaccaaaattaacaccgggggcctagatgcttcaatctccctctttttggtaattgatgacaaacaccacaaatatatatataatcaaacatagagcacatggacatatattgcattgacaagcaaaagctccccctaaacatatgcataacaatcacaaatagcaaatatggagccaatgcacatttcaatttcacatttcaacatatcacaaacacaagagcaatatctcaatgtgaacttcaagaaatattcattcatgagcataagatggtcacaaatatatcaatatcacatacaccatctatcatcgcacaagttcacatctcttaaccattcaaatcacataagtcacaaatcattctaaaagggctcacaaataaatataggctattacaagactacgaagggtccaaatgacatagagatcaacaaaatgaaaaggaacatacaatatagagtaatagcccatacccatacataatatagcccaaacctccttaacctattagatatgaggtgactaacctcactaccactagtcccaacccacaagacaaaaagcacacctaatgacatttttctcccccttttggcatcaactaccaaaaaggtcttcattcttgtggaggagaaggaggacgcgccgaagtggaaggatgatgagcatcacgacgacgatgatacacaaatgcttgggagctctccaacatttggactcgagaatccaatgtacccactcgagtgtgcaatctccccatggaagcattcaagtctccaacatcggtgcgcaagccacgaacatcctcatgcaaagcttcatgcccggtagacaagtgttgaatgcttttacttagggtattaatagccccaagtaccgggttgaagtattcgatgggttgcattccaaaataagcatactgtggatggaagaaagcatttggatcgtacccatggggaggaggaggtgctgagcttgagctagctccaggatgagaggagggcgccgccctaggagcacggggagctccaagctgaaggcggggcttgtactgcttgtgcttcttcaaatttggctcggcagccccaagcttatcttgaatcaacctcatgatgtaaggggcataatagattccctgagagaaagtccccttggagatggcaatctcttgcatcataagagacacaatgtcgaactgacgaccctgaatgattgcatccatgacgtgccaagccactcccctaatgtcatcattgtttccaaggcgagggaggatagtggctctcataatcctgttgaccacactggggatagtcctcaagccgacaaccttcccatgagtgtaccgtgctccatcttcataaaactgagagagatagtctatggagagcgaattatgggtgtgctcctcatgcaagtcatctccaaagtccaagcgaatattgaggagccgccggaattgcctcctagagatagaacactggagggtgtcggacatccacttcatctcactatagtctccagccacccacactgtagcataaaactgccggatcaaatcttcattgtagtcttgctttagggtcacaatccggtcaatgccaatagtcttgaagagatcctgtaagctctcaaactctggagtctcattgatgtctctccaagaaatccacttatgctatgcaaaagccttcccagcataaacctgctcatacacactttttaggaaagcggtgtgaaaacggggatccggggtgtcccgaggcctcaaaactgatcatgatgcctcaagatggtatactgcgatggattccttatgtttacaacaaattggatgaagggatcaatgtgcatatcatcacttccttcattctcatcctctccacttccactgtcatcatcaccacacgaagccaatacacgccatttagccttcgcccaggacgcatttggacttgcggggtcccaacacgactcttcacccttcgccgccttcgcccccatagtcttcgccatggggcttcgccccgacgaaccttgacgccttgagtctgaatcctcgctggttgcatggtttcggcaggtctggtcgaagggtctcatgacataccgccaacaaccttattagaactactatctttgactggaacacctgaacacatgtgtcattagtttcaaccagcgaagtaagctttagttggaaaccttggagcttgtgatatcaatctaaaagaccattgagctaaatatacacagatctagatttgatttggcaccaactggtataaaaccttatccttagagtccatgtatgaagaaaccacacttcatttttggtgaagccacaaataaaccctgaagacacaatattatggtattagtacaatgcccatttacaaaaattgaacgaacgaatgatgcattacaagcaaaattcatcctctatttccaattgttattattatttttgggctttgattcactcttagtagagaaataagagatgcaatagcaccgcctggtcattatttgagaagaatgagagacatgtaaattgtccatcctttttttgtacttatagtaacaaatcaatatacaggtttcatgtcattgaccaatggcaaaaaaaaaaagatcctataagacagatgtttgaataatccaattatatgtttagcaagcatgctaaggaaccattaacctagcttatatggccggaatgcaactctatacatatggatctacccactgagtcaaatgtggtcaaggaataaaaatgtaggaagaactcggaagagatgtcgctgctgtgttgatagtaaacatatgggtctgcccactgagtcaattcttctgttatgtgatttaggtaaaggtaagtgaggaaattatgctaagacatctctcccctgtatggctgtatggttgatttgtttttaaaggcagtctgacagtaattgtacatttgtactgtcataaactcataacccatatttgtttcattttgatgtgccattgcaaaaaaaattgtgtattacaagagagaggatatgcatgtaacgagaaaccacgaaatgttgtatcttcttgctatcaaccaattgtcagtacttttttttttttgaagatgggtggacaaaactaccaaactatatgggctcgacatgaaagttcttcgttttctccctgtttttttcctttctttctaagggttctggcttctgggatgatgaccatctagagtggtcaaatggtcagttaattgtcagtgcatatttcttcgtttcgctttactgttatcttattcttcttgtcaatgtcacaagaactaacagatcaaagctaagaaggaacagattaagggtcccatgcaatggtctcactctgtttttcttataaaccttgaaagttggattttgtgttctctaggtggtgtaaacctgtatatgctatgaaacttggatcattttatttttatgactttggaagccacatgctccatcgaaaatctgcacagcagcaggtattctcttgggcttttgaatgtattggtctcagagctatttgaatttaaattttatctttcttagctcatttgatattggaaatgttaatctcccatggaaattttctacagtgcacctttgtaatagcataaaggaatcttttgttatttaagtataattaagtcctaataagaatcttgtaaaattatattttttgtgaatcatgaccgttccatgtaattgggcagttgattttggtctttacaacagccgtagagtatgaattatacaggagacgatctgtttccgctctctgctaagttgaaatataaacttttacacctttgtaagtctgattttttgtcttatttctgtataggttcagttttgttactaagaattatagacctgtactaggccgtatggaatggttttgcattcatcataatatccttgatgtgcagttgtctagattctattgataaatggccttcaaatggcgtattgaccttgaattgtcgctttcatcataatatccatgcaatggagtattggctgagtaatctctctactcttaatagattttttttttctctttgctcttcacagctttttgcatccttgtattacctgtatgactctttttaaattaaaattcattatggctttattgtttcagtcctgtggttgaagatcaataatgttagcctactctttatttccatccccagtagtatcagtgcttgaagtgtgtccatctccgtatatattttcttgtcagtagaattaccgaattacatcaaacattatatattgttaagaattatgtgcaccattattcataaccatcatatcattctatgcttaaaaatatatcttcttttggttatttgatttttattatcaaatattgccatagcgtttagcacgggtatattactagtaccaattagtacaacaacatggctctgtgtccgtactccaagcaattatatgtagctatttatggtaactctccactgttaaaatcagatcctccatgtaatcaatgtatattttacacatataattattgttagtttttatatatggttataattataggaaactattcgtaaaaaataatatggtagacggtataaaacctataaaccttatattttacgatttaagtatagaattaacactaaattatacttgccaaataatctaggtatatggatagggcgaatatatatagggcaaataatctaaattatatatatatatatatatatatatatatagtaaatttgtttggtgctccatggtgcccgggcaccattgttgaaattgagtatatacctaattcatgaaactttttcaattacttagatattaacattagctactttactaactagttcaaagcaagtttgaactgaatttgaacttgtttttggtagattttgattctaggtatatagcatctatacatataattagttaggtatgtaatcatggattgtgaaataaagttaaatttgagttgttttgttgataggtataggtatgaatcgagttattataactaggtatatactcacaatttgaaaattttgaaaaatttgtgtgattttgtatatttgataccatggtgcccgggcaccatggtgccccatatgagtgtcctatatatatatatatatatatatatatatatatatatatataccgcacncagggtgcgtaataactaaaatatcccctcacaacctaccccaccatcgcacccaccttccctcacaacttacttccaccatcgcacccaccttcggtaaccaacacccccacgtttcctttttttttcccacagtcggtaacctccgtctcccttttctttttcaccagctcttctgttttttttttctttcctcgtgtagccatgagtaaataaattactaatgggtaatttcgcaccaaacattctgttagtaaatgaattatttttttttgaccatgctgaagcctcggtcggtaaatcaattactcgtgcatatattgtttgattagttccatatattgttagtaaattttgtattgccatgtatccagccattagaatttttccacggacacttattattgcatagtaaatgttttcctgtaaggcaatacgagaatagtaattcttttacaaacaagcctacacggcatgatggtgtgagtaaacaatttactcgatgacaatattacatagaactagggtttggggcttgatggtgtgagtaaacaatttactcgatgacaatattacatagaactagggtttggggcggtggttggtggcgaagatggccggccatggttgcggacatcgatggcagtgcgtcatacaggtggccaccgatgctcatcagatagatatagcgtgtatcggctaatactccgataccactctatattaagatattaaagaaagtaaaatatatcaaacatagagcttaatacacctaaatgcaataggatcttaacataaaaggcagatttagcataacaattgagcatataagacataaagctaaatcaggtaagatcggctgaaaccccgatgctactctaatcagcaaccaagaagcaggctagagactatagttctaaacacgacttatgaggtcaaactcaactgatgcagccataagtatgaaaaaaaagacaatatctagacaatcaaactattggaagcttcatagagtggtagatatcctatataatataagccaacatcgatatttaacctaatcggctgcttcctaatgatagatattagccgattggaggttagataacgatattgccggagattatataagatacatgataactcgacaacttacataaacaagattagagtatcataaagatggaagcactaatcctgagaacgcaagccgccataacaagttttacctctacttgaagatcgaaaccgatgcagctcaacctgaaagcaagaactcgtcgaaacaaaacgaaagtaaaagggtggcgatgcgccgagattgttgttgaacgtctgttgttgtattacatggggctcggggtctatttatacccgagattacacaatatgtccttgtcggacatgactcttatctctaataaactctaacataccataagtcattgcggcagacttttgcccacacttatctctaaggaaattacataaaatatcctaattaatagatacaattgcctattcaggactcagtccaagtgtggcaatccatgcgaagcacattaattctatccgatgacgtagagttgtattgtcgggatcggctcaatcggctaaccctgtctgactcgaactctgccgatcctggtcgtagccgatttggactccagccgattcttgctctgtttctgaaacaatcttgatcttggattccgcttcaatctaatctttatctccgatacttagattaccaaatttggtcgttaacacatgccccccaagtccggaatatttggtaatgtttcggatttgccatatccgtctccgagagaaactcgcacttgccgttttccgaccgttacacagtgctttaaatattaaccgctacccccgagaaatttcacaccgtcacttccgttttcaccgcttaagcaaacctcgtcttctctttctccggcgatcccctcggtgcacacggcgatttcaaggcgatcttctcctggccaagcttccgctcgcggcgatgtcgacttccgccagcccgtctgccgcgccatcggccgagtacgcagaggtacgtgctcactggctagatcctcttttttcgcaatagattgtttcttccttgcctcaccttgttttcttcttctctatccttgtttacatctgtagcacttgtccaatctagtcgcgattccaagtttgtctcatgagcatcactatttccttggtccgattggcaaccctgaccctactgagtttatcatagctgaaaccaataggattccttttagattggccaacccgaatctaggtcattggaagaataccttcaagtcttggcctgctcttgagaaaacttctcccgagaaaaactggtctgtgtggtaatagtgggtatcggctagcaaacaagcccactgggatgaaattggaatcggccaagcactagcccttaccatagcaaattcgactaaggatgagcccttgatagccgctgcaacatatttttggtcgaatgcccttaatgctttcctcttcaaccaagggccaatgacaccaactttgctaaatatcacaatgattactggcttggatgtgacttcatcggctaataccatgagcttgaacaccaaaaatacctttgaattcaagaccaagagtattggaggctggttagggtatattgtagcatatatgggcaaaggacatgtcactccccgagagcatgtagcctttctgctgatgtggctggagaaatttctcttttgtggatcaagctgcggccctacaactaactggcaatttctagccgaagccctagaaataaagagacaattccccttgggcaaaatcctcctcggctatctgtaccaaatgttgaacaatgcatcagccaagatagctgtcggctcagtggttggagcaggtggtccatggtggctgctacaaacttggctgaatttagtagccatgaaagctgttaattggccatctgtggcagaagctgagttccccagattagagtcgattacagatgatgatggggtagagcgaacccaccgtaggtgcatgtcttatggagaatatgcattcacaccagctgatgcaggagcaaagctatcaactgaatttctgaaggactggttcttcagcttctacgatggatttcaaaaagatgcccgagtctggttcccttatgctgactcgatggattttgagctgccatcggactttagattttaggaaatcaattctgagaaatatgatcaatctagggaaatttttactactgccgtcagcccatgcatccttctagtcgtcatccaccagggcagaaacattcaaacctcatacgaattttatcacccaatgagttctgctaggcaatttggaatgggacaaatgccgatcggcttgtactttgtagacaaaatccagtgccgaggtgatataacttcagccttaatgatggatcggctgcttaacatcccaggacctccactaggcagcatcgaaaatatagagctggcaaggttcaggagcaaggcatttgacagatggtggggtgaatggaagctgcatctgttccaccaattggcttccatgtacatgacagacctctttccagatgtcatccctcaggtaaaatccttactttgtcaatcctgtaaaataattgtcaaccgatctatattttggctaatctcttcttctgtcttgcagacaacagaatcttcccctcctcgcaaaagcaacagcggtaaggacatcgagtatgcttctggccttattccaaacagaggtggaccatctcccatggtcatcggctatcatgcccccaggacctcaagtctgcttcaagggcaactaagagaaccagctgatgctagtaaaaagagacagactaaagcatcggctgttgatacatcggctttggctccgaagaaaaaggccaagaagaagaaatccaagccaaccgatgatttgcctgccttagatccatccatagaacaagccttggatgaggaagagatcgaggaagatgtcgaccaagcggcagccgaactgagtgacttaggagaaaaaacaccatcggcttcacccaaacagactcctccgactcctactactccagctcacttttcaagggtaaataactcatcttgatcacttcttgaaaataacttacatagccgattgcttattggtcttgtgtttgcagaaaaagaaaactatcatgaagaagaaatcaacaccagcaacatctaaaccagctcatccggtaaggtgttatctgtaaaatcctttaagtttgattataaccgatgttaattaacacttgtctttttcagcctcctcctccttcacctcatgtgcagccgacaccaagtaatcgtactccatcagctgcaggcagccataacattgaagaggaagaacaaccagctgctcctgccatcccagtaagtctttcattgtcataaatcttagatcggctacataacttatttcgatatttaactgtctcaagttttctctcttgcaggtcttagccgatctattctcttttgacatcaaaaattattttgatgaagaggcag

SEQ ID NO: 4747 - DNA, 1989 bp, Oryza sativa
gtgggggagtggggaggaagagagaggggggattcaaattgaaccccgcccactctcgggcgcgcgtgggggcgggaggaacgggggaggggcggcgacgtgggcgcgaggtttgggcgcagagtggaggcaccacgtgggcgcggaaagagcggaggaggcaccggcgcggctgtttcggcggcagcggttggagctccggcttcaacggccggaggtgggagacgaccgacaggtggggcccacctgtcggcgtcccagagagaggagggaggggcgcatgggccggcccaacaagaagaagggcgagcgcgggcgggagaaaaagggggggtggactgggccgacggcccaagaagatggaaaaagaggaaaagaaaagggaaaaggggaaaaaggggaaaggatttttcctgggatttaaaaatattgcacttgctcaattttaattggttaaaattattttcaaggctctgaaaattccactaaaattcatcttaatgtattggagtatggggaactcaagaaaaattccaccacgccgaattcgattattaaatgcatttattaattagggatttagctctaggttaattaagataatttcttcgggcaatttatttaaccaatttttaaagcaagaaaagggggggaaacttcagggtgtgacattcatcccacccaagaatgtcctggacttccgatttacaacccagagctgcaatttcatgcgctaccctattacaacctcaagggcagtagcttacattgaaagacaggaaagcaaaatttacaaagttctttatctcacaaatgatcccgccaagagctgacgaagcaaaagtgttcttctccaaagccgacttcaacatcgttgaatcagtttcagccgtcaccctttgcatcccgcattcactggcggctcttataccagctgcacatgctagggcttcagcgtggaaagcattcatcagaatctgaactttacccgctcccgatttaacaaccttgcctgagtgatctctgatagcaaaaccccagcctcctgttctggtgaaaggatcaaaagctccatcagtgtttattttcatcaccccctggtctgtcctgctccacttttcatttctgctcggagctcttttgctatcttttttattcaacttcatatattcctcagccaaggcagctataatgaagcccagttcagacggggatcttcccctctccccctcctggaccctgttccgctctgaccaccattgccacaaagtaatcgatgctaacaaaatttcctttgctggccgattgaaaactgtttccatcacctctcttcccgatcttttttctgctagctcctgtctcaaaatctccaggttgttctcctgccaaaccttctttactttcttacatttgaaaaacaggtgcccagcatcctcattcattctattgcatattatacatctactgtccagatccatccctctttgttgcaaattaactctcagcgccaaaatgttatgactgaatctccaaatgaaatgcttaaccttccggggaagctgcatcttccatactttcttccagtacatctcccgttcagtgctcccatttgacaaacctgcacttcccctttttcttctctgtaactccccatctcgctgcaccttataggctgatttcactgagaacaaacccttttcatcatagtgccaggccaacatgtcatccatctcgatgtgcaccggaatagtacggatcatattaacatcttccggccagaaagtctgtgtaagcagctcaacatcccaactacctgtacttggatctattagttcctccactcttgtgacaagatttctccctcttggtgtgatcggccgtctcgtatgatcacttgggatccatgggtcagaccagatattaatggccgccccatttccaactctccatatcatgccatctctcagagtcaaaagcccccggcatata

SEQ ID NO: 4748 - DNA, 907 bp, Oryza sativa
agagagagaagaaatagtcgaggtggttcggtttcgcgcgtggtggtgcggttatgaatagtagcctagcctagctgggggttgtttcgagtggccatttgcgttttacacctgaaaaatattttagcactctttttgcatttacatctctattaagcgggtgtttagatccaccggcaaaagaaatttttctccgtcacattgaacgtttgaacatattaaatattgaaaaaaattaattatatagtttatgtataaattacgagacgaattttttaaacctaattgcgccatgatctgacaatatggtgatatagtaaatatttgctaatgatggattaattaggcttaataaatttgtctcgcagtttacatctggattatgtaatttgttttgtttaatactttaaatgtgtgtccatatatctgatgtgacctagtaaaatttttttactggtggaactaaacacagactaattcattagggcatgtttagattaatgcaatttcaaatcataccattttttgggtaaaattatcaaagatgtatatatatttagtttcttgccaaagtttggtaaatacataaaaaaatcatgccaaaattttagttatattgttaacttaaaaaaaattggtaaggtttattttgactacaatctgaacagctccttttttttctaattatacggatgacgcatacacatctgatgtacattcttgattacatgaaagacacgttcacactagtgtacattcttgattacacggaagatgcatacacatcactgtacatgcgcagcacactcgcacctgtttacacctcgtatcactaaacttttagatttggaaagtaaatatactcatgcatttgcataggtgttaagccattagcttctccagcgcg

SEQ ID NO: 4749 - DNA, 658 bp, Oryza sativa
tctattactgtaatactctcacttttttttttcatgaaaggcaatggcatcattgtcaagtgctcatgatgtgcttccacaaatctttcttatgactgatggatcagttgatgatgaacataatatatgccaaactgtgaaaacggagctcatcagcagaggatctaaatctcctcggatttctacttttggactaggtaatgttaaggagagcgtcaaatatacaattatctcattattcaaaactcttgacttatctcctggatcacatgaaaattctcctccctactttttgcaccaacgctcatgtatttctctatctccaaatattcttttttgtgtaagagaaaaatgcttacaccataagtcaacagaccagtcagtgtggtgatatatgctgccagcttgtgatgagacgaaccatattttaattactctgctgttttagttttgtactacttcgttactgattgcttacagtttacctgatatattctttttgctcttttcattttatcactggaataacaggtttgtattgcaaccactatttcttgcgcatgctggcatcaataggcagggggcattatgatgctgcatttgagacaggtaccaagcccctaaacccttttgttctcatcatagcaaacagtatgct

SEQ ID NO: 4750 - DNA, 5923 bp, Oryza sativa
tccgggttggttacggtatcaagaaattgcaaatcatgatgaccattgtcgatgatcttgtgtcggttgatagtttgattgaggactacttctacaccgaaccagcgaatgagtacatccagagctgcgacattgttgcgttcaacaagatctgtaagttattccataagtatcagagcccgtcgttttatttgctagcgttgttcttgttattatactgaagcaatcggatgaccagctgtcttattttaaggaatcgatcctatattattctttaaatgatgatgcatgccatatatattattctgtaaatgataatgtcctgatgtttcatatctagatacctcatttgctgcacattactctctttattcagtaggcttagatacctgatttgctgcatattactctctttattcagcaagttgctcatatctagatatctcatttgcagcacatcaatttgatttcatatggtcatgtaaatttcatctgccttgagccatccttgttcagaactaatgttttgattatgttttattgcagagatcttccttgagtcaggtgatggcgatcggtgcacaaagataaaaagaaaaatccggaagtttgaattaccgttgatacttcaatctagaagtttgaattaccattgatgtgtcgttcgtggtgtcaactagtacttgagcccgttttgtgttgagattgtagcactctacttctactgagatcgttttctcctcctttaatgtttaaagaccaatcaggttattattactgtgtctgcctgtgtcaccatagcggcattgttggtcgatccagttttgatgcggtcttcaattctcccgtctttcgctttgcttgattgcttcatcgcttttgcggctaaagtttttctgctcctaccaaaactgtaggggaaactttggttgtgctgtttgttctatctcttatgcattgcacagcctggttttttcgctcttctgaagtatagccctgtgcgctctcatcaggcctgtcctgaaatacgtgatttccgttcggtatcgatgttcggtttgtcacacatatcttctactttcttttctgtaatgaagagcattgtctactgttatcacttatcaggttcgaattggtgaattcacagctgagtgttggtgcatatatcacgatcaaagtaacaattatcatggcaaaataggtggtttcacctctcggtatcggttttcttccattggcatccctgactcgtggctcgtgggctggcattgctgaagcagcacttaggcaacatgcgataaataaagtttctcttcacaatcctcttgaaagctgctcaaggaatattcagcttacgataagcacatccgatctttgacctacataggcagcatatgatcctgagcagtaaaatttcctgcttcacctagtaaccttcactctttccattaattctttgtcagtctaccctggaaatcctcgactagtgtctactaggcactagctagtcaactgctagttcccagagggatacagcaatatctgagtgattcaccgcagatatgtcacccatcagaagttgaccatcatcagttactaagagcacccgcaatggtaaagtaaggtgctatctataaaacatgtacatctcagcaatagactcgattaatagtaaaccaccttaatagtatgtctacattggtatctatagctctctcatgcattgtctcgtttttctctatagactatctctaagttagtagatagctttgctctctctcttcatttaatacattccaagtaggaaaatatgctgacatgaatctcttatagagagcctatagataaccattgtgggtgccctaacaccatagattagtagtagataatctataggactgcatgcaatgcgatgatatctaagctcggtgtagattcagaaaccgcatgttcagatatatatgcatttcttttctagccgaaaagcgacacgggattcaggaccacatcgcggcagcttctcgctgcttctctagccttcattctagaactccacacacacccagatgtgtactacttttattttgttcatcgatccaacggtgaatgatgatgggtgcctcttttctgtccagacattcttcaagagtcagagattaatgaatgcacattaatctggactattagctcttgataacaaactctaccagcatagtatcatgcatagctcctatttaagtttatctctcatcttgtggatccctaggatccttcctcatctaacaaagaccaaatgtctcatgagagaaaagggcctcttcatcaatcatccaaatcaagtactccatccgtcccataatataagggattttgaggttttgcttataacatttgaccactcatcttattcaatttttttttcaaatataaaaaacaaaaagttgtgcttaaaatactatagataataaagtaagtcacaaataaaataaataataatttaaaaaaatttgaataagacaagtggtcaaacgttataagtaaaaactcaaaatctcttatattattggatagtgggagtaccaatgtattttagcatactagtagtctactagtagagtacatatatggatatattagtacatctgaacataagatacagtacataaatgtacacacacaagtgagtagtgatcacatatatattcaatggcacatcggcatttgccaaaggtgtagaatgttgcttggcagccactcctggccacctttttttcccaaagttgggcacaaacacacacaaatgtgccggccggggggcctgcccctgatcagagaaattcaggatgccgatggagatttgggaattttgtagcctctgctccaggttggcttaccgatttcggccatgggcatgccccaagaaccctagttgcactgctgtttcggtacattctggtgtatatttatcatgcaccaatgttcttgagatgatcaagggtaggtagaataagagcatgaggggttcactagcagatgaaatgaaatgaaaacttgttgctgtatcccacaaatttaatggaaatggagtatacattggggggagtagtactatatggtgaaacgtacaccaactgtatctgaaatctgaaaaaaagaaaaagataacagagcttgaaaatttctcctattttcagctcaaatccaataatgattgaactagccagccagtcgacgtttgatcttcgttcagaattacaccgtcgcgcatcgcattcggttctgtatgttgtcccgtgcgatcgattcgccattcaactgaacctcatgaacaaatggggattattgtggcatcaaaattactgcgaattttcctccgcgtaaatcaggacaccaggccaccatcatgtagtctgaagaaaacagaatggcatccagaattcagtgcttaatttgactgagcaagagtgtagggttcacattccactatatatcacttaccattgtgcaaacaataatgatcgcattgaatcgtgcgtctcggtctacatctccagaacaatgactgcaaaaaacatcaagaaaatccactcataagttgatgcttaatcaattacttctacacaaactatacttactgcaatatatatgtaatcttttcatgcatatatgtttgaaaatatgtccatgaatgcaaacaaatatatgcagcaagaagaatattaactctcacttacaatctgaatcagttttgtcccatttaaagatatcttctgcattctcatcatcatcttcatcatcatggagatgctccctttgcatcttctccctcggcttatcctcaagatagtatttcctcgacgacgacgccgcagcattactcggtcgagcgttcatcctcttgtgaagcatcgtcctgaacaactgcatatgaacacaaaatgcaaaacaaaacaaaacaaaccatattagtttgcactgtttcatactttcgtcactgatcatatcattattagttactccctccatttcatatcataagttgttttcactttttttcctaatcaaacttctctatgtttaaccaacatttcatatcataagttgttttcacttttttttcctaatcaaatttctctatgtttaaccaagtttatagaaaaaattatcaacatctacgacgtcaaattagtcttattaaatgtaacattgaatatatttcgataatatgtttgttatatttttactaatgtaatcaaacttaaaagaaagtttaactaggaaaaaaaattcaaaacgaattataatatgttataatatgaaatggagtgagtagatgataacttgttctactgtttaattgagaccttttcgattcttgattcgactggatccttcaaggtgggcggcggcgccggcgacggcgagaagccgccgcggcagacgaacatcttcttgaggaggaacctgaaggatttctgcttgatggcgccgccgccattggtgttgacgaggaggtcgcgcgccttgctgaggatgatctgcgtgtccggcgagaactcgccgtcggccgccgccacgcgccggtcgacctcgaggctggaggggcagttgaggaacctgtcgagcggcagcagcagctggctgccggaggaggaggaggaggaggagcgctcgtcggcgtcgtgctccgccgccgtcgagccgcggcggctgccggacttggtggacttggctcgccggagcagcttgttcagcgcctcctgcagcttcttcacctcctcgatggtgaagtccgccacctcctctgccgccgtcgccgccgccgccgccggcggtcgcggcggcgactcgttcccgagcgtgccgatggagaggaggtgatctccggcgatcttgatctcgtcgcgagcttcttcttggaggaaactctctcctccccctcctcctcgtcctgtagcatccatgcatgcatccacgtcgacgaacaaacgtcaaaaaccatgcaaaatatatccaactccacttacatacgtatataacttacacatgcacgtttgaatcccaagaatttaacatgaaaattataacagttcaaatgttcaaatcaaaacaaagtaaaacttactgcgagctgacgaggccacagcagcagcttcagttcgtctcttgtcttgtttagcagtactgagtcgattctgcatccagttaataatctgcaaacagaacataattacaaaaaaatcaaacatatatctcatatgaaaacacataatttactgaaacctaacatgcacttgatcgagcttacttacccccatggctatggttaattagcaggtagccctagagctctgatgattcgagcaaagtgacggcggcgaaacgacgatgttaggaggcaacagaatctagctggatgatagcaaaccagagtagtttcagggttgtttttgcaggagctctctgattggccagtttcagactttcagtgaggcagcttgatttgattgggcttggatgctgctgctaaaacagtagctagtattagtgctactattaagtgcccattaccattgagtttagagcttgagagagagagatggagagggtgagattggggtgtaaaagaaatgggaagtgggattcagggtcccctaccccccatggaatttaaataggaagggttacaagtgaagtgagagtgctacagagattaagtcagcgagccattggctaatctcgatcggtcgagcgagtttagtggccaaattgcgtacttgtttgaatgcatccatccattcataaggcggccactggattttagtgtgtgtatctagcttagccaatacatgctcatggtattcgttctcaaaggtacattgcataggttgtatgcggatctacaccttttttggacactgaa

SEQ ID NO: 4751 - DNA, 1177 bp, Oryza sativa
accaccactcaagctctgccgacatgtgagacccctgcaccggcgtccccagccggccagctttcgtgtgccgaagaccgcgccacacccgccggcagctcctcctcacaccgaggtcgcctcctccaccaccggccgagcctctcgcgccaagtcggcctcctccaccggacacgcctctcgcgccaatccggcctccctccatcggctgcgcctctcacgccaagccgacctcggtctccgccgcccgcgcctctcgcgctgagtcggcctccgctgccatcagctgcgcctctctgcgccaagctggcctccgactcctcctccaaacgatgccacgctggccagatgcagccgtctgccacaccctcgactagccgtccgaagccgccatgcctccggtgaccgtggtcaccgccaccgcagccgctgctgccgaatgcccagccacctcgccgtcgccatcctcacctcctccactgcagccacgtccacggtcgccacggccaatgccacaagccgtccgccatcgcagcctgcagccaccagcacccgatgtcgccggtcgcgactccacaccgtcgccggcctccatgacgccctcccgctgccgcacgacgctggcctccacgacaaccacacgccgccggcctccacgacgcctgcacagcaggcctcgccacccacgaggccgcacgaccgcctccacgacgcctcaaccaccacggccgttgcctcgccagccaaccgtcgcagtcgatgccgccacagccgtcgccaccgtcactgctgccgtcggcagccgccgccgccgccagctagatctggctagagacgtcattgcctcctcccgcatcgccgacgtcaccaccggctctcgcggcacctccaccaccacacccgtcgtccggccacgcctccgtgctcggctaccggagctagctccagcagcgtctcccgccaggtcgtgaccgcccaaacccaccgccaaaactcgccgccgagctaccaggacgccgccgtccgtcgttgggggaccggatccgggcaccacagcaccggatctggacgccgccagtcggcgtcgacgccatgccctgagctcctaccgtgccgacgtcccgaccgtcttgaccgtgaacgcgggagagagagcccctccgccgccgtccttgca

SEQ ID NO: 4752 - DNA, 3518 bp, Oryza sativa
acgccacctccacccccacctcctccgtctcctccccaacctccagctccatggctggaaccttcagactccaagctactagtctcctcctcctcgccggcgtctgctgctccggcgagacggcgtcgaacaccttgtggccgtcgcgtcttctctctctcgtctcctcttcgtgcgcgcgtgatcgttttgggccttgggctttataaacggaaggaggaggagggtggggcccacgcgcgagggaatcatggaggtgtgggggcccacaagtaagtgggatggggacgccacgtcggacgggtggcaacgggcgttgccagctgtctccaagtgggcggctggcttgcttgctgttgctaacttgctggggttgtttggtcggtaaagtattttcgtttgcttgattgagaaaaccacggtaatatatttgttttttttattgggttgattaagtgtgtatactttgtgcctgttcagagtacggcactggttgatattattttaggagaactaagcagagtccactaaataatgacaaatacaggtattatatactatacattattacatggtagacgcatggtgttatgattgctttgttgtttatgtatatatatgagtgtattcgaaataatcaaattgactttgaggaaagacttccattacagctgttgataaaatttaagcacgcacctgcacggtttctcgtggagcaatgaaatgcatttcttgaagtaagaaactttgatgaaacgtactaaaagattataaagaacaatcagtactagaagcaaaggcagctagtaggtagtaaggagattttgtttatccctattaatctatccactactattacactacagatgaagcgtttacttgcaaggaaggaggagcgcgaggcggcgtcgcgttcgtttcacacgcacgctgacatgcgtcgccattgactttcgccgccgccgccgcggtggcgcgcgcgcgcacgcacgctgggcgacacgccacgccgccgacgcgacgcgcgccgtgcgcacgagcaacacgtacgcaagggagaaggagagatcgctatagcttccacgcgcaaagcgcaggggcacacgtgcgtgttcgacgtagacataacacggcgcacaggcaagacggcgcggcccggcgcgggcgggggcgacggctccgaccaacgaacggcgtggtggacggttgggcgcgtcgcgtcgcgtcgtgcgtgggcgaagttggtcggcgtgtcagcgcgcgaccgcgtctcggtctcggcctcgttgctcacggcatacgaagccttgggcttttacgcacgggagaagcccacatatactgattcttttgggccgtcaatctgaggcccaatcaggctcgaacatggcatatatgctgcgtggttttatattagtcccacctcgcgccctagacctgattggaagaggagacatgggtatatgagatgacccagggtttgtaaccaaatcatacctttctcggccttttggctaagatcaagtgtagtatctgttcttatcagtttaatatctgatatgtgtaccatgtgttcactttgatattaaatttattttagccaaccatgtcctcggcgcctagggttcctaggcgactcaaggtgggttctgcgtgggtagggtttcaatcttctctcaaccccatcggtctcatgcctgatcggatcgatctcttcggtctagatcctgagtcggatcgatctcttcggtctagatcctgagtccacatcccatccttcctctgtgtccacggttagattctctgttttggagccgagccaaaccttgctagccggggaggggtagttttagggttcggagggcaccatggaggcgatgcaggcactgatgaagcgcatgcaattgtcggaggcagagaagaaggggatccggatctgcgaggcggagtctggaagtatgggatcaggggatccgaaggcgatcgggaaggtcctggcggagaaagtggtgaacgcggagggtttggcgcaagcactggggaagatctggtgtctgattaggggaataacgtgcagagatctaggcgagaaccatttcctgtttacctttcatcagcatccgggaagcggcatgctctggaggatggaccctggatgtttggtaaagatctggtgatcgtcgtggattatgatgaatcaaaggttttggaggagatggtgtttgcctttgttcctatttggatcagggcttcaaagatgcctttatgcatgatgaacaaggccatagggagagcgatcgggggagaggtgggtgaattcatgcgaatggagtcggaaaaggatggcactgatgtggggcagttccttcgtataaaggttcgtctggatattcgtaaacccctgatgcgtggtgtaactctgagtttggcgaaggggaagaaggagatatggtgtcccctggtgtatgagttcctaccgtacttctgctatacatgtgggatcatataggatacctgatttaaaatgtagtgtggaacttaaatactgataaatgtgtagtgtgcagctaaaggagggagaagagcaacgttatagcaaaaaactgcggttcatcccagaaaagaggaggtgggaggagggaagtaacatgagacaattgggtggaaggggggggagcgcagagaagatctggggatagcagtagtagggggagtgatgcaccatcttggaggaggaaggattctggggcagtagttactggaagagaggccagaaatggggaggaggaggaagtgacgagtcctgtaaagaaatcggttcagatgcacaaacctgaacaggctaagaaagcattgttttccattgagaaggagatggttagtgcgggaaagaatcagccccaagggggcgaaataggaggggagatgctgaaaccagctcaacatgacagagtgcaggaaaaagcggacgcccaggggaaatacatggaaaacaacgccatgcagcccatgcacgtcgacggaggggctgctcagggagaggtgccatcgggagtaaaagggccaggaggtagcaaacagaaaactttcaaaagaatgacaagggagactagaggtaagattttgccagcaggctcggggacggtgatcccgggaaagagaagatagatggagggaggggaggaagtttcgggaaagcgaaggaaggagggagagctaaagaatagtgaggaacaaaacccaatggaagcgggacttgcgatccagtcctgcgggaagaaatgaagctagtggcttggaactgtcgggggttgggaaaccgcccggcagttcggggacttctggatcttcagaagtcggaaaagatcgatattcttttcttgtcagaaaaaaaattagacaagagaagaatgcagtgtctgaggtggatgttgggtttggttaatatggtggtgaaagattgtgaaggacaaggaagggggggaattgcagtgttatggaggaggaggattgatgtg

SEQ ID NO: 4753 - DNA, 3320 bp, Oryza sativa
cttctgacctcactgtaaacttggagacaacagacaaatcctattttgattaccgcagcatctgggagtaaatcgaaatgaatattcaagtttctttttatttgcattctgagatggttttctaaacctctagcacaggccaatgaaaacttcgtttttagcttaattatcccaatagaaagatgcacatatgtctctggtatttaaccatgtgtagtactagtacatttctagctcatgccatgaacctgattttaggtcggcacaacaacttaattaatcggtctctgcaacgcgtgagacacgattgatgttgatcactgcctccaattgctggccttacatgcaccttaattaaacctgtcttaaggaagtctccaacctctcaatcactgcgtacttatctatcctatcagtgccatctcgatcgttcgttttccttgcacactaatagtactagctctttttctttactttattaactgctaattaaccagtcaacacaatcaacacacagatgtacgtcagagcccagctagctttacatgctccattggaatattacactttgaagagaaatatggtaagaataattaaacctagcttaagaccagtgatctctagcagataaacatgggctgtagaacgacgtgtcaaaggtaattaagctggttattaataaccacatcttgcgtgctctgagatattgtaatatcttggtcactttctgttcctagctcactgctcacctgtcgaagaaatggccatgttgttctgaactttcagacttcaccttgcccttactgtttcttcacctggagccatggagatcagatggacatttcctactcgacagatgtgatgtatgaaaggtttgttgtttctgattcgaatggcatgaatttatcatgatgtgagagagatgagctaggatgcatgaacatgttcaggaaaatgggccatatctttgtcccctgtggtggttttcgaattttttttatttataattttttttattaaaagttttacaaaaataattttccattttgaaaattgacggaagtagtcgcctaccgccctctgggagaaaatcgccctctcaaagggcggcgaaaatgacgtggcagacggccgttcgctctcgggcgacggccgtcaacgaaatttgcaggcggcccccttgccgccctccgctagggcgattttatactgtgcggggggccgcctgcaaatgggcggcgagggggggcatggaattttgcaggcggcccccttgccgccctgggggagggcgatttttgcctcccccctataaagcccagtccctcctccgtgaaatttcattatattcactaaaaatccaaaaaaaacgaaagagagagaggggagggcagcagaaggggagcggcgaagccctgctggttcgctcaattcatcacaggtatgctcccatacatcttttgcatttgtactaatatgttatgtttgagtatatatgttgcgttttagttttagttccatatattttagcacatctgtagcacacagcacatatgtgtagatccagagcatagaatataatagtatgaattgagacatagacagtagtgttaattgtaagatgtagtttagtttgatctggagaatgtaacgtaattttagaaatttagagaacaatattgtagagaatgtaacttagggcgtagtacagaaatgcgaggttaacgcagttattgttttcatcaggcacaatgtcaagtaaggtcacatttcagatagttcacggtgaaggaaatattagatttggtccagatggtgttgatctgtcagattttgtaatgacatctaagggcatcgataggcctgcggagagaacatttcagtcaatttatagttggttgttgagaggatttagaatagaccaagaagtctacacaatgtcagtgtcagttgtagtgagtcgtgcaacagaaggttatttttgggaactaatgccgatggacagcactgatgcttggagacggtatgtggaaatggcttttgaacggtcatggcccctcgttatatttgtgtcggtacaagagaaagatataaatgtttcaatgcaaaccgaatatgtagagggtcctatcaatgcaggggatgttgttggaccatcgatgcaaaatgaggaaaatcaaccaagggaggagcaggctatgggcatggcggatgagggggagagagtcggtataattgttgatgaaatggagagggaagattcggataatgaggaagtggacgacgacgcatcatccgatgaggaaggtaatgtaatggccactgattgggcaaatgaggacttctctggacttgttatatcagagggtgatcatgtaccctgggagtataaggagaacgaggtaattgagggtgcaaggtatgctcataaggatgagatgaaggaggcggtgaagcattgggcagtttccttgcagagagagtttagggtggtcaagtcaacaaattatgtgtatgaagtgaggtgcatgaaggaagattgtccgtggcgtgtccatgcatataagggtaaatggaatgattattggaaagttagcattgtgaccgagcacaagtgctacttacaaggggtggagaagtatcaccgaaacatcacttcagcttttgtggtaagtgagatgtacagcagtgttgttggtaacattggctttgaaccaaaatcaattattaggcacatcgagaacaaattcaagtacaccataagctatgcaaaggcctggagagccaaacaaaagatcattgagatgaggtatggcacatttgaagcttcttatgataatttgcctcgtttgttagccaccattgcccagaggaataataatacgtactatgacctacatacatttacatcggttgatgatcgaacaaagagtgtgctgcaaagagcctttttctcattgggtgcttgcatcaatgcttttgtgcattgtcgacctgttctatgcatagatggaacttttatgacaggtaaataccgaggtcagatattgacagcaattgggtgtgatgggaacaaccaggttctacctatggcttttgcatttgtagagagtgagaacactgaaagctggtactggttcctagagagagtgcacattgcagtggtgcgtatgaggcccaacgtttgccttatacatgatcgtcatgcgggtatgttgcgggctattgactacttgcagaacggttgggatgagaagggacttccagctaagtggcctgatgttcggagtcggtggtgcatgcgtcacatgggtgcaaat

SEQ ID NO: 4754 - DNA, 3768 bp, Oryza sativa
atatactgctacagtatatatgtgctgctacagtatacctatatactgtagcagcatataacgtaaaagttacagttttatgataatttcctacgctaatgttgcagcaaactgaaacatgtcgctaatgttgcagcaaactgatagttttatgaaatttactctatttttaaagcggattcagagcaggtgtggatggtgtgcagatgcggacatggagtggattatttcggatgttgaaaatggtgtagagtcggtgtggacctggttcggaatcggagtaaatttgacagatgttttgtgtatatgtaatcaacacaacatcaacttaggcatttaacaaagcaacggacaacaatagagtaatcaatggacaatccatcgtgataactatatatttaagtgctaaacaatatgaatacatgacggccataacataaaaacgtagctaagactgatttagtcataatagtattagtgttgaaagagggcaatcccaaacgaaaaaaagttatttctcaatcccaagaatcaagctttcatcattttccgctatcgtcaagacaaaccttaaaacattccacctcaactatttcatccatagaagcgtatctgacaactatgtcatcatcgtttttttcttccaaaagctagaaagggcctacctagtgcttgcatttcggggtaaagtagctttccccagctcaataagagctacctacaaacatggaatgccaatgcaatgatcagaacttccttgccaagaacatcctgatttattatcaggctttaacctttgtaagtgtaagatgagacggtgagagtcttaggccctgtttgggggagcttaagattctgagaatctgttggttggtagccagcttctgagaatctgggttttccagcttctgggttctagttcattttctggattctacaactatatattctcataatctgggtgacaatttggactgttttggggagctggagattctgagagaagctgcagcaactagaagctccccaaacagacccatagattaaggagtctatcttaattgatgtatttaacatatagagcggttacatgggttgacaatttcagattatctagcaaacggcctaccagataatctatatccgccgaattttaaagataccacatccacacagaatccatatcacactatccgcatccacatccatatctatcggatttctataaactcgtaccatattctcgttttgagcggatttggaatggatcagataagatgttatccgattcgttttcacaccaactctaacccgataatgcccgagcattatagttgtgtttggtagaatttccacttcctatctattaagcgcagatgtaagcattgcgttcctttcgatcgtcgtctgtcctactagtaccgtaagtacgtgagcctctgttaattacgacggcgactaagatcgaatgtgagattttatacgaatcaacagactaggacgtctatggtgagtagggttagctaggcaggtcgtgcagcgttcgcagcaacacaaaaaatatgtatggcgtttgtgcacgtcgaaatggagtgtgatagctagttcgtcgtacgtggaagctcttgtcaaacatcgtagctgcttcatcggcaggcgtgatgttgagaggtagcgacgttgttgcttaagggcccatttaagtttaagttttgcaggcccaaacttaacttttaaaactcaaaaatcatctctttggcaattagatccatcaaaacttccaaacaaaaaatttacttgtagcaaatcaaaccaaaacgaaactcccgaaacacatgaattttggcaaagtttgaaatttgagttttggttggggtgcgccaggctttggcggtagtgcaacgcttaagtgacgctcaagggctctaatggcaagccactattgtgagccccttccctatgaaaaataaatttaatattttttttgacatggaaagatttccattactccatagactcagtaatatcactggtcaccaaatcgtccacctcggatggggcttcattgtcacgcccagaaattcacgaaccagaatttctaagctgaatgtgcattaaatccctgtccaggaccagccagggtacacaaacgacaattgttgacatacatatccacgtcttacaaaaatataaaagattacaaatgcagcggaaagataaaagcgagctaaaccgggaagcttgacttcagcagcgggacgactccactccacaggcaaaccttgacggcagcgacaaaaccaacttcaacaagacagctccaactagaaagatcttcagctctggtgtgggggaacagagagcaagactgagtactacccactgtactcagcaaatcataccggaagaggaggtatgatgcaggatataaccaaaggaggctaggggttcttctgcataaaactagcatttaaaagcagtagttgaaagtagtaaaacagctgtagtaaattaatcaatattaaccaatcactgtccaacgctacaccacgttgcaacatgcccaaccaaccacctgaactacaccagttcattaagctaaactaggggtgagactaatcacggtgaacctggttgatcgcccataaccgcgggcacggctattcgaatagttttactctggccagaggtgtacaactgtacccacaagacacgattccacacatgtcgccatgccccgaagtatcaccatgatactgcaaagggggaaatcgtgacaagaccctccacataaccctcccctaaccatccacaccacgctaaggtttcacccccacccctcaaaaggcagtgggcggtcccctcttgcgccgcggtgaatccggcagctggacaaccggacaccccggccgacccaactccatcacgcccaccctcgccaccggtgcctatgaaagggtcgagctatacttcagatcaagcagttacccactcccgcttgtggtaagcacggtaagtctcccagggtttcccgtgaaccggtccttaattgccatgggtgcgaccagcaaaaccatgcacccacaacccaccattcggtgtattttaattaactaacaccattgcggtggcaccaatccaaaactatgctcatagtcagagtctatgtaataatgtgatccccatttgtgtactagttgagctaagcatggctaagtatttcctaaaccaacatctaatcattttgataccaaagttatcaatggcatatgaacaataaatggctgagtaataggacccatctcacatgacattgtaaaagtatgcgacatttaatagaaatgcgggatatttgtaaattgggtacaatatgatcaattgtaatgcatgacttgccttgctctcgcactgatgagacctcagcaacgtcttcgagaaaccgcggatcgacgaaacggccgaaatctacgcgacaaacaaagcacacaagcaaaacatgctataagactactgaaacaggaaaccaaaccatttttaatggattctagggatttttatgaatttactgagacttgaatggacttaaacgaagctcggatgaattacttatgaattttagaagataaaccgtgtttttactaataaagaaaaagttcttaattatttattgcgcaataaattccaaggctgacgtcatccaaggggggaggggtggctgcgcttacaggtgggccccgcttgtcaacgcacaaggggagggagaggggg

SEQ ID NO: 4755 - DNA, 18027 bp, Oryza sativa
tttcttgaatggaagttggagtgtagcttctttcaaagtgggtgctcgactagtcagtattcaaccccaaaggcccaaagcacatgcaaggcattctcacaaaaaaaaaagaaggaaaagaaacagaacaaataaagtgtgtggtaataatacaatgacattgacaaatggtttgcattcctagactagtccagactccacagtagctagataccacgtaaaatgagctcaaataatggtggtgcaaaattaatctctccatcgacttctcctgtttgcttagttgactcctttttcttttacccttttagaatcgatgggaatcgatcttgactaagacttctactgttccttttttttttcctcacgtttgattccctgtcctgcctatcaaataattgactgaaaaaatctagctagacttgtactgaacccaatcaaatttcaacagtgactatgtaagcctggttggacgaacaagtcagagttgttagcccatccagtttgtttgatttagagaggtcgagattatcttagtttttaggtggcatgttgaggttatatagtccttgagatgggaagtacacggcatacaagttggatgacttacagtgcaatttgctgtgatggaaacaatgagacaattagtgctcttacatcggccatcgccttccttgcctcccactagcaaatgtttctcggttcaggcacgagggcggcatggcaccattagcttcaagacgtgcgtaccatctcagaaatagaaaaacagaggaaaaaaaactcaattcggtctcgggaaaaagagggaaaaaactcaattcggtctcagaaaaaagagaaaaaaaacactcaaatcggtttcatgctttcgatcaaacgaacactcaaattttgactattatgtttaattttctttgcaataatctagtagtaaataaaagaatatgaaacaaaccgatgcacttctctaaattcgtgttggtgtgatgtatgcatcctcaatctagatcttctgtagatggatattttagacatgtgtctgttatattttatattactaaaatgttgtattattttctacatgtgaatttgtagatgcgtggttatcggtggatggtattattatatgtatgcaattttttgttagagtataattatttttgtaaactcagatcatgtgacatattcctatcttttagtatctcgaccgtacattggtagtaatgaaaaattgctggtaccatttccatttgggaaagtctaataagtacttggagatagtggtgtacaataatttctgtgtttgcaaagcagaatatatatagtacttacaatggatatttgtgcacaagtgtgcaacgtgccaggaacccactttgaggagcaaagggaaatttttttccacaggccaagtactgcaggaaaacagcctgagagcttccgaaagcagctgcacggatcgcaattgctgttactatattgaataatggaatggtactaatgaaaagattagaacacctgtagcaaagatccacaacacgtgttaaatctggttatccaaaacccaatcgatcagcttagctggttgttgtatggaagttgcaggttgaatgattggtctctggcctattatcatggcagtgacagaacgtgaaccaaacacacggggaagccaaccaaacagatcaacacacttttgaagagttttgcaaaagagctaatttgatacttgagttgcacctaaacggtaaaaagtagtactacaatttacgtgcaattggtggatatagcatcccagcaaaatgaaatttctggtgacaagatgagccaagcttcggccagaagcccaaaactgtgtgaggtgattattgaagattcttcaggagggaaaaaatgaaaaaatattaggaaataccattatcattgcaaaggtacatgagttgcgaaataccactgtacgtaagaatgacacatacagtgctattttccaaatccgtgatttctttgatagtactgggcaaattgtaaaaagaaaaaaaagaaaaaggaaaagaaggcttactctgaagatatgggaacatggacagtagttttttttttttaactgcggtacagtcagtgaactcgttgaaatagagtactagtaagtttcttgtgtgtgatgtggatctgtgctcctatggacccattgccagcttaattgtgaggcaaagtgaattgggaggtcagtgtcagagagggttgtgaacttgtgatatggaagttcttgtgctatatactcttactcaggcggagtttagttccaaactttttcttcaaactttcaacttttccatcacatcaaaactttcctacacacacaaactttcaacttttccatcatatcgtttcaatttcaaccaaacttccaattttagcgtgaactaaggtggtgtttggattcagggacttaactttagtccctgtctttagacactaatttagagtattaaatatagactacctacaaaactaattatataaatgaaagctaattcgcgagacaaattttttaagcctaattaatctataattagagaatatttactgtagcatcacataggctaattatagattaattaggctcaatagattcgtcttgcgaattagtccaagattatggatgggttttattaatagtctatatttaatatttataattagtatccaaacatccgatgtaatagggacttaaaagttttaatcccatctaaacagcgcctaaacacaccctcagctgcacgccacaactgactagactttttcagagtttagttgccgcaagggaggcatagaactttcagggaacgtgcctgaactgaactgcatgctgatgcactgcagtccccatcagggagagtttcttttcctacatttttcttacctacacactaactcactcttctaggaagcaactgcctggtttgtgtgtgcacatagattgttgcatgattggtgggtttttggtagttgcccaaggcaagcaagaaagaagggatgggagggcttactctgtatcaggaattcaggatgaatctctgaaatgttgtttgagtcaggagttcagagtttcgctccattgatttgaggatattcagttaacctgtcatttcattttgctgtaaccgaaatgagaagaacatgtaacaactatcataattcgatcaggtgcagatcatcatcatgtaatgaaagaagattttgtacacgaaatggagatcaatcaccttgtggagagagagagagagagagaggagacgaagaacagtacaacactgctgccttattggttcatggaatcatgtgactcttgttgtcctcgcggtgttgaattgctgataggaagaggaggacgatgggcatcttcttccccgggagcggcggcgccgtggtacgccgccggccggagggaagcgcgcggatacgtgggcggcggcgcgtcatctccccttctctcttctcgctccgccgccgccggccggaggccgcactcgacgggtcagactcgaaggcggtgggttagagcggagacggtgcagaggaggatgggggagccccctcgccggccgccggcgccgccgccggcggcggcggcatggtgaagagagagcgcatcgggaaggaaggagagagtgggcttgggcttgaaatccatttgggccctacttcggatccagaagtttgtagttgggcccccgtgattccgattattatgtatgggcctgaatattacaaagtctgctactacaatttggcctaagcgaatactgcgagccgtaattttccagtttggcccccgtttaggatagctacaattggataagttcagaaaatatactgatagtatattttagtataggaattacagcgttaaaccatgtctggaagtaacacaactggctgttgctgttccaagatctttgctcaaactcaaaaaaagaaggtaattttgtgcagtcacatagctgcttcacatcgtggaatcctacttcgcttttgcaatggccgagctgcttctcgatctggctcactgctaatgctgctgctacacagaacgggcgatttcattccatcacgtcgataagtcgaggatgccggtgcttgacaatcttgggaggcttgccggagcgccgccgcctctcttcatcagcctgtaaagtagcaggcaatagttcaggataagctgaagaacctgtcgatcataacccatttttgacagatatctccagcttcatgtgcctcacaaagcagattatcacaaaacacaagaaacatactgcaataaatataaatgaaatagaagcatggcagcattttggagaaaacctcaaaactaagggtgtgtttagttggagaaaaggaaatttttgggtgtcacatcggaagtttgaccggatgtcgtaaggggttttcggacacgaatgaaaaaactaatttcagaactcgcctagaaaccgcgagacgaatcttttgagactaattaagccatcattagcacatgtgggttactgtagcacttatggctaatcacggactaattaggcttaaaagattcgtctcgcgatttcccccataactgtgcaattagtttttctttttatctatatttaatgcttcatgcatgtgtccaaagattcgatatgatgtttttgggaaaaaattttggggaactaaacgggccctaagacaatgaagctacctccagcatatctgacatcaagtgcacaaacaaaattcatcttccaaggttcagttaaatcgtaacaaactggaaaacatcttgcttccagaatcgggttggctaaatattcctttggattaaaagaacaatattctgttggcaaataagtttaaattatactacagattatctagtacgtgctggcaaaagaaatcacagatggctggtctggaacaagtgtacacgtgaaaacttaccatctcagttggatgatcaggtagaagaatagcaatagactagtcgagatcatcacctgcataacaaaataaaagaaaaccgattagttttcctagtacatcaagcagatagatcgaaaacacttacaaatggagactgcaatatgaaaccattcttactggtgtgccgtcatagagattgcccagtaccttctctttaccagctggtccaatggtgttgatcaggaaatcatcgccaatgaaagaacactggatttgcgataaaaaagtgtcaggtaaaaccagtgaacagaatagagatgtacataaatgagtcagactaagcttagaggttaaagtccacttcattagattgaaaaaaaaacggagcatcatgtgtacttaatctatggctacttctgaatggaggttaaaattttctttctaacagtttccaggattcaacttgttgacagttaaggagcagacagcattcagttgtaagttgaaaacagatatacaccaagtatatgagaaaatacgacagctaaacaattccaggaacattattccagtcattcaattagtgtaaattggcctcgactaattaagaccccaataatatcaatctaacatgccaagggaataagagatatgtatcacctgcacaagaatcagtattgcaatgtcatgcaaggataaaactctaaaatcggaacaaatattacatatctcaagtcccaacattgtatgaccaaatcaagcagaacaagaattgacacaacagaaaactggttaatgtggctgagtacctttttgtttatagtcatacccatttatatttgtctaacccaaatcatcttcctcttcatgggtcaatggtggacctgcaaaagggaaacaagaaagaccaaagaggttttattaccgcatgtaccacttgcattacataggatggaagcatcgagcaaaactaaacagtagcacctacttttagttaatgtgtcaacagaggagaaaagatcagcaagaacagcgttaacagtagaagcatcaagcctaatcacaattggatctgaaccctgcaatcttgactcctgaagaagccaaaaggcaccaccattccacctacagagaaatcaaaaggcacaactgtctgaatgtaatggatgcactatataacctagaccatcaacacttcaagccttcaacagcaaataaagtgccgattgacaaagaaaaatatgataaacaacaaatacagcgcaaaatgggaatcaacaatgacatataagttactaatgtgttaatatgctgtcactaatttgtcagctgcaattttaatggatatattcaattgaagattaatttgagaaaccatatatcaatgcatgaaggacgaacagcataattaaccaatggaaggaatcgcaagctaacattttctctattgcagtatcatcacatagagtcagatgaatctacagaagaagtggttatgtaactgcatacatgttttgggattttacatctttaggcatccaaagaaatttactcgtagaaccacccaccttggtcacccagcagcagccatagacacatgaaactgcaggcgccggagagtacggggaagcttagaccaaatccgcctgaaatccctgaatgagctcaactgagctccccaggtgctgtttatggataaaactgtcatgtcttgcccatttcttatctccacagtccatagtagagaaataaatagacctaataatcaatccacagtatgtgggttaatccctttaaaagatatcccttgaacaatttgtagatctcaatggaaatagctaagatacatccttctcttttggagaattatcaacatctgcatcattgccaaggtccaatatgcagctcagcttggcatctggtgtaatacctctctgaatcatattatgatatgtcctataggcacttttctcatctcctgtttttaagtatccaattattagatctgtataagttactacggtaggtgtaagccctttagtttccatttcttccatcaacaactccgcaaaatccatagcacgaactttggtgtagccaccaattaaacatgtataaacaaaagtatctggcgatatacccccatttttcatctctctgaaaatttccatagcttttttcatgtttgaacgcttacaatagcatgcaatgagagaagtgtacataattctgtcgggtgtcacccctccaaaatcatattctttaacagtggcgtcatttcagggagtctatcatcatggcacaacccatttatgaggctagtatatgtaaagatatttggcatcgtcccctcatccaacattttatgatacaacctgaaagcctcctgcaaatccaaagctttcacaaagccatcaataataatactgtataggacaacatcgggaatatatcccctttttatcatgtccccaaagaatccccacaaatcatcagattcgttacccttgaagaggccattgatgataactttgtatgtgtaaaggttggggacaatgtcaaattggcgtacttcatccaagaaaagaaaggcttcactaatcagcccttctttcatgaagccgtcaactagaatagtgcatgtaatgatattggggtttatcttgttgtcaagcattagttcaaataaccccaatgcttctttaaggtatctatgtctacaaaatgcatatataagactagtgtaattgtaaacatctggaacaaaattatggttaaccatgtcaatccaaagaccataggcaacctctatatccatatgtcggcaacaaccatgaagaacaatgctgtaagtaatttggtcatgcttgaaaccttgatatttgagacgttcgaaaagttcaagggcctcctcaacttttccagctttgcaaagaccatgcagaagtgaactgtaaatgacaagagtaggactgactctgtttctttccatttcatcaagcaaattagagcctaatgatagagcaccttgtttgcaaagcgcatcaactaatatgctgtagctatggacatctgggacaaccccacctttcttcatctcatcaaatacctccatggctttgtgaacctgattatcgttacagaaaccatgaatcactgcattaaaacaatagctgttgcaagggtagcctctctgccgaagcacttgaagaaagtcccatgcagattcgacttgtttggcacggcaaagtccataaaggtaggttccgtaggttgccgcagtcggcttcacgcctctgattttcatttcacaaagaagatcaaaagcttcctccaaacatggtttatcaccatgtgtatacatactcatcaaaactgaataagagtagacatttggtgagggaccagtgctcttcatatcatcaaacaaactcctcgcatacatgaactgattcctcttgactaaggacttcagcaagaagttgcaaagctgaagctcaactccaatcttcttggcctcgatgtaggtgacaagagcatcctcaaacattgacaactctataaaaacccgtatgagcgcagcataaacttgaagcaatgttatcgatccacccaaattgttcaccagcataagtgccaactcaaacaactccggaccagcatttccacagtaattgacaatgctctgaatcaagcaccggacctctatgactctccgaggcaagaatgactgtataagcaatgcaaacaacccaattgactgggaaaggccatataacctctcacactccctgaagcttatctttcttgcgccgtcccagtttgaagtccgcactgctagtgtgatcaagggaagaaggcactgacgtctataatcaccagaaatggtactctgagtgggctcttgatgatccaggttgttcaagcaacaagccagtgaagtaaatcgcgacgcctgtgggtggtttctggttatgagggctcgacgcaggaaccctggcactgccctgtgcatagacaagggacgcccaatcccctccttacattgacaggatatgagcaggaagaagatcctacacagaaattacacttcatggaccaggcctccgagaaagaattcgcccaggtttacaaatttgaatcaaatctcctgcaaagagaacaaaaacacaaaatcatatcgctataacaataccagtcaagctctcacttgaagcaaagaaataatttaaaaaaagaaataataaaagtttgtgtgttccagagaatcccctggtcagtgagctcccgcgaacgagagcccggtcatcgctcaccgacgaagcagccgtccactctccgagtctccgggcgcgagctggatgagaggggcagggggtgggcgggcacagcggcgaggccatggggagcttaccgggagggacgacactgaggtgagctggaggaggagcacgccgaggaagtggcggaccgcagtccgtcccacgggagcagcgctagggtgaggcggcggcggaagggctcgccggcggtgggcggagggatccacggcggcggcggcggcggggaggcggggaagagcgagaggcgatggccgtgcagctcctggggtttaaggatgtggttgggccgtatctgctttccatgggtgggccggatgcgcggctcagaagatcggatgggctcctcttcgggtgtactgagttagtgggcctcaaatatgggcttcggtttacggaacatccagcccataccgtcgtgcggcccgtccgaccgtaccaaagctcatcagttcaagtagggtaggctgagtgggaaaagctaacgcgcgtgcccgttggcggttgagcgttccggatagtttagcctaactaactaagttattagtagataatgacgataattaagatacgatttcctttttcccggaagattttttctactacctgactgaaaactttcaagttagatttgaaaatttttgaagccaaattttaaaaactttcaaaactcaatttgaaaatttttaactcgaaatttaaatgtgtaagacaaattttgaaaactttcaactcagatttaaaaactttcaactcatatttgaaaactttcaactcgagatttgaaaactttcaagtacagatttgaaaatttttaagttaagatttgaaaaaatatgaaagctttcgactcagatttaaaaactttcaacttgatatttgaaaactttcgactccgattcaaaaactttcgatccagattcgaaaactttcaactcgagatttgaatactttcaaatcagatttaaaaattttcaagttaagatttaaaaactttcaaatcaaaacatttaaaaaaataagtgtgctaaagattaaaaaaagtaatcagaaaaaacgggaaaaaaagcgaaaaaaaatcgcaaaagaaaaaggaaaaataaatcacgaaaaaagaacaaataggctaatgggccttgggctgggagtagctggcgcgcgcgcgagactagcaacccccaggttgagtctcacttttccaacccacctatcttttttttcacgccaaactgctgaatggtgtgttttttataaaaagtttctacacaaaaattgttttaaaaaaatcatattaatctattttttcgaaaaaaagataatacttaaataagtatcacatatataaaatacagtatgagtattacacattggtagtttggtaaaggtagtacaaaatttaaaattatgttgtcattttaatatattttaataataaattgagaaaaaaaacatatatatactattatacgagagaaaatataataatactagctgcgcaatctgcacgggccaccatgctagttaattaattaatcaattaactagtcttgatttttgatcttgcaggcattcacgtcccattgacgggattggagtttgggacgttgcagtctacagataaaaatgctaaaagcgatgttgcaaaacaaaaaagaaaagacagagaaacgatgaatgagatgtttaatcgtgcgctaatgagttacttcggtttacttgcgtgagatgttagatcctactccctttctaggttaggtttttttggatttgggacggagggaatacatcctagccaagtttgtcaggccattttagattaatgccaaaacatactctaccaatatttaaatagttttctagatatattttggtatttggaatagtgcatacggtggtttatatcattggcattaccaatgtccaatttaaaatttctagattccactcaaagctttgctctaagttgacattaaaaaggcaactctacctcagaaaaaaaaattggtggtaccaaaatttatctaagttttggcactagcagggtatacaaactagctcgtcatttgtcaacattgacaatctttcaaataaaatcttagtgccctataaaaaataatcttagggagaagaaaatggagaatttaaaacatttagtatatacgcctaactgcaagtccaaatatactttctctagtcaacattactcgtcgtttccgagaagcaatttgcactgagtgtagtttaattgagttgtctgaaacgacgtatatttctgtccagagggagtatatatttatggcaaaatttgctacgggactcttaaaaaacgtgtaattagctgtgggacaccgtaaaaacgtgaattggctatagaacaccgcaaaaaagtgataattagctactagacaccggaggtattattttattatttcctataaaaacggagagagagagtgttgaaagtaccaaaatacccctgtgtcgttttgcttgttctggagtcccactgatgccgctgccccatgccagcgagctgccacgccatgaccggactaaacaaggagagaaagagataagaaatagaagaagaagacaagagaaaaaaaaaaggaagagcaacctgtagccatcgcgtggccgccggcgaacagcacgccgtgccgtgccacgccaccacggcatacggctgccgccgggcagcccacaccgagaccgcggcgctcacacgcgcgccttggcacgcactaccgtcgctcacgccgtgcctctgccctcgtcgtcgcacggtcatgccggcgccgtccgaccattcctcattgctccaccgccgcacatggcaaggaaccatgaaaaggaggaagaaatggaaaaaaaaaaaggaaaaggcgctgatgggcgtcgccgcacgccgccaccgcatagtcgaatggcgccgttgcccggcccccacaacgcgtgaacccatcgtatctaggtggtatttagttggagggactaaagtggggctaggctaaactttattcccggtagagacttatgtttttgtgagagggactaaatttagtccctagttcccaaacacccccctaatcgcgcaacagttcccagctgcacccgtgcccgtcgcatccggccacgttgccatgtccagcgccccagccgcttacagcgccgaccactcacgacgtcagcgccggccactcgtgacgttggccgctcaccatgggcactcgcccactccaccgctcgtagcaccgactgtaccgcctcgcccctggtgccgacaggccaccgcgactctccagccggccccctccccccgcgcagcaaggcggggcagatggagctggagcggcgttgcatgacggcaaggcgtgcgtccgcgccacgtgcgtgagggcaatctggtctttttcgatcatttctctctccatgttgtttgaaaataataaaataataccttcggtgtctagtagctaattaccactcttttgcgatatcctatagcaaattcatgtctttgtggtgtcccatagctaattgcacgttttctgagtgtcttctagcaaattttgcctatatttattaagaccatctaaaaagatgcactttttaagatgtagtagtataaattgccctagcaaatgttgccgctatcttaaaattgcttctggtcttatcatttgctcctttactcaggcttatggatggctaactttatttttttcagggaaaaagaacacatgctacttgagttaaccagctatccttccagccactataaataagtagtacatgactccactaaagcaatgacgtaaaaaaaggcaaacaagagaacacatcactatatatacatcaaaagcaatattttctgtggatatgctctgaataaactatgaactgagaactcattagccctaacagccacccttttatacggggaagaatatagccaaaaagaaaagaaatattgatgtcaaaagaatggtcctgcatgtttgtgtgctctgttctttttgggatgatttgctgatgtgatgcaaggttccatgatatgactttgcaattttgtacctttcttccctggccgctagttgccatttcaatgctgagaggtcatttccaagaaagaaatattaataatatcctatagcttatataattatcgttttgaacgagaacatggtattgaaaaataacttcgaccactattcccagttataatgtatatagaaatatcaataaatatattattttatttaaatagtttttaagattaatttatacatataatcttcatacttctaagatatatattttaaaatttatttttcttggtttttttctttttccagcggcaaaatttctcaaaagtgaaggaatctcgaataggcaaatataacttatggcccaagataataaaattgccaacaaagcataattcacaaaatatcctatacttgttccttttcttggagcaaccatcaacctttgtcacacataatttggaactatctccatatatatagttcttcatcgttattgtaattcttgaaaaagacataaaatctataatatatatattccttcaacttgtgcttcgagtattttttttccttggagtgatgctataaatcgaaaataataatgtaatactacaaaccgcaatttagatgtaccaagaattttctatggtgaggctcgctttgccaaaaacgagtgaccatgtggggtagcctctgcctccaaacatgctgaactagcagtgtaacttcaagaagatccccaaggaatcatatccctttcatctgatgctctacaaaacctagaagcagtgtgggagcaaaagtcactagccacccatggttttggctatacgcctagaatatgcttcttgtatgcttagaattttagtcaccactctttctctatccgtgctctagggaccccccatgtcacaccttttaccaaaaatcactaaatccacactagccatcctgcctattgcgacattcttactctactttggagtttggaggtgctgctaaagttaaaacacaccaaataaaaccatacacagaaaccctaatgatctggaactacttttaaccctaatgatctggaactacttttatcaagatttttgtcaagttcaagaaaactttatattcaaacaagaaaattggggcaaatacaaggagttaattccatttgatgttcttataagatggaatttcattcaatactttgggtctagatattttcatatatggtatatttattatgcaacaattgtgcacgaataaagataggtttttttatgaaatttcatgatggaacaatatgttacctgaaattataaattataagattacgtgatgacaaataaccctcggtattttcaaaaaaaaaaggaaagagagagagaactcgatctatattgtaataatattactctatctcaaatccatgctacaaatcatacgcatgtataataaaaccacaaacttaaaacgtgacacccgacgcgcaaatagatccacggggtgtccatagcacgttttgggcaatcacgccagtcaccacgcttggcatatgctggtaaatattccacgaaactctgctcttatatcacgagcactcaccacgcacaaatccaccaaacacagatttagctaaccaatgctgttcttgctacaagattaatcagttatctgtaggtattgatcagtgatcagttgcagagatgaagtttgggaagctgctcaagaggcagatcgagcagagcctcccggagtggagggacaagttcgtgagctacaaggagctgaagcgcatcgtcgcctccatctccggctcgccggccgacgaggccgccttcgtcgccgccctcgccgccgacatcgacaagatcgactccttcttcctcgagcaggaggaggagttcgtcatccgccatagggcacgtacaccaattcgcttcaattcgtttgtgaatttagataagttttctgatggcgaaatgggttcttgccttcttggttgcaggagttgcaggaggcgatcaagaaggcggcggaggcggcggcggaggtggccggaatccggcgggagatcgtggacttccacggcgagatggtgctgctgctgagctacagcagcatcaactacatcggggtgggcaagatcctcaagaagcacgacaagcgcaccggcggcgcgctggcggcgccggtggcggaggcggtgcgggagcggcggcacttcttcaagacggagacggtgtcgcggatggtgcgggagtgcgaggcgatgatggcggaggcggcggtgctgccggcggaggcggcgcccgaggcgctcgccgcggcggcggagcacgggatattccggaacaccgtggcggcgctgctcaccatggaggacgtgcggcgcggcagctccacccacgggcgccactcgctgccgccgctcaccctgccggactccgactggctccgctccttccagccgccgtcccccatccccatccaatgaccaccgcctcttcgtcctcgtcggccgcggcggaggctttgccgggaaattctgcgctgcgaaatctgtaattaaatttgcttaattatcttcttgatcttttttctttttctttttttttttgctgcttcttaaataggagcggctaaataatgtaaaaatgcgagttaacatacatacagacgaattcatacgtgttttggctttcaaatattcaaatgtaatacgaattttcctcttgttttcgaatgttattgggttaggggcagtttgacagagttaggcgtcaaagagagaaaaaaaagaaatacaaaaaaaaaagaagaaaaccacatggacgatgtcgctgcggcggcgaagcgttgaacaaaaaatcatttgtgatttgatacgctcgagtggccgtgatatatactcctatttcataatcttcagatcatgcaacgagtcaacctcaactgttcgcagcgatcctcacctgcaaattagtgctcggtgacacaacgcagcgtagaaattcttcatgttaaaaacggttacaataataggcaggcatgccaattgtcaaaattcaaatcgaaagctatgcaggatgattctcttggcccggacggatatacctcacatgtactacaggagttactcactccgtcaaaaaaaaaaaatctaaactggatgtgatatattataatataacgaatgtcatatccaatactaaattaatttttattgaacaaaatgagtagctgcaaagtaggtacatagtggcataagagggatggcaaagttttagtttgtctacggtgaaccgtcaaacagacggatgtcaattggaagatataataatatgcccccaactttcccactgaagctgtgtgttttggtgtggtttgggaagtaatcccatacgcgaaaaacggagtgacaatattagctacttcctcggttacaaaatgtagctacctagtacgttatgcaacactaactagtactacgaatctggacaatccaaaatgtagctagtacgggtgtgacactacctctcatgttcagattcgtagtactagatagtacggctgtccagattcacagtactaggtagtgtcacataaggtagctactttcgggacggaggaaataacctttttataaaaatggttaatatgatttttaaggtaaatattacatataaaaagtttataaaattgcatcgtttaacagtttggaaactgaaaagcgtgttcgcgggaaataaggaagtggaggttaggaacaaccgcaaacgaactcggcctaacttcattgacaaatgaagtctctacacttccattcagccattctcccatcttctcaggataaccggaaggaagatggcaggaatattcttggcatgggcagataactccaacgaaaagccggcgtatttatcaaagaattaacacttgggatattcctcaaaaaatgcctggtctccagaaaacaaatgtgggttgatcttttgatgccaagttgcttctgcaagatcacacactctctgaaagagatggagtaagaaataaatagactttgccgatgtcagtgaggagttgggcagcgtcgccggtgtctcgttcaattcctcactgaaatatctcctcgcttcatggaggcaggcaagaactggttacggaatacagactgaaacagcttttgagaaagggacatactcctttgaattttgaatttggtagggagagcttgcaggtttgcagctgattttgaaattttgaatttggttttgtgttcgttttggccctttttcttgtcactttcgttgaacagcgttcacgcttttcgtgattgctaaaaggatatgtaaaaaaaaggacctaatatcaaaatccaaatttcaaaatttaaaaactgcttcggcttttaagagtgagaaaaaaaagttgagccaaacatttacatggtcatggaaggctgaatttttttcatttttaatttttttttaaaatatttacagaaataatctattgttacaaaaatttaaaaaatagaccctgccgccctagcggagggcggcaggctgacgtggcaaacgacggctcgacggcgccgtgtgcacattttgcgctttggtggcggcaaggggcgtaatgcaatttgcccagctgaaaagaagcatttggctagttttttt

SEQ ID NO: 4756 - DNA, 10091 bp, Oryza sativa
ctagatgcaaaaaaaaatcaagtcaaatgcttctttccaactctgttgatatggcccttcctgggttggcttttttgcatggaggccccttgccgccctggcagtgcgcggcaagggtgttaatgcaaaaaattcaactttttcaatcggccgtcatcgagctgccatctgccacgtcaatttgccgcccttcactagagtagtagggtctatttttgtaaatttttccaacgatagattatttctgtaaatattttaaaagaaacatttaaaaatgaaaaaaattcatggaaggctttacctcggccttcccgtggtttgggcctggaagggcatctacatgggcccctgtgtcttttttgggcctctggagagttatgattgcaagacaattagcccaagtaacagaccaggtgcagtgctctgtttagtaccacaccgtcagttttcagagaaaggagcatcaggagagctataataccagggttagtatcacgcaacaactcatacctttctcggccttttggctaagatcaagtgtagtatctgttcttatcagtttaatatctgatatgtggaccatgtgcccactttgatattaaatttattttttatgggggagggctcacaatagtggcttgccactaggtccctcaagcgtcgtttaggcgttgcactacagcctaagcctggcgcaccccaaccaaatcaatttcaagtgttagcacgtcaaagaaaattcgcatagaaatttcagctgtcagttattgttcattaatcttaatttgaagtgttgtcaattcaaatatactacttagcaatttcagttttcattggcaagtgcacagtttcggttacttgcaattttgaagctgtgcattggcagggtagttatcaatttcatacacaaatgaaaacatagggaaaaggccgaaaggctaacgggcgatcgatcgctgccagcgatcgttttttttttcttttcctctttttagtaagtttatacctaaagtttacacatctaaactttatccacctaaagtttgtagagcgaatgtgtataagtcaaaagtttatatacccgattcaaattcgaattcagattcaaatattttatataaaaatatttctatacacaaagtttatacgtgcaaaatttatggtataaagtctatgcacatgaatgagagtattagattctaattgtcttttacttttttttgaaatttatgatgtaatagaaaagtttttgaactcgtcattttgacggtttgaaggatagatatatgaggaaagatgatacaaacaattaagttctttgattaatataataaagcttttagaatgaccctttttcctaggggctgttagtgggcgggtaatcgtttccctctcctcctagcgatcatacgtccctccctctaatactcctctttcatctctctttttttaacaaacagtgcccctaattgaagtactcagttgacacttgacagtgtacctaccagtgtttaaactaatcaactccttcttaatcacttagacattttctgtcccatatctgctagcacgctcctcctcctcacaggctcacacccgtttgtactcttcgccggctttagcgtacacgccagagtccgtcctcagtatgatcttggcgtcctgcgtgacgtagcacgcccagttgtccacgtaggacagcggcccggccctgatcagcggccgcgtgtcctccacgtcatcgtcctcgtcattgtgctccgtgtcatcctcacactcctccctcgagtaggcgaacctgcttgacacaccacacgcacacacccacgagtcggtaaacttttgttcatattgatataagatgatgggctgtagtaatggtgagcagtagtagcatgtacctcattgaattttgtgagggcgtccataggatgcagatggtgcagaggaggaagaaggagatgagctcccacaccgcggggattacccacgccactcgccaccgctcgttgtgctcatcagtcgtcttaaaatggacctgaattttgattttagaatttttttcatacattattttgaagtgctaaaagtcttcttatgttaattaatttacgagcttgtactaatgtaccacatgaacagttagtgtcatgacgataaaagtcaccagtaatgtggacgaaaacaactaaggttgtgtttagttccacgcaaaattggaagtttaaagaaattagaatgatgtaacggaaaagttgaaagtttatgtgtgtaggaaagtttgatgtgacggaaaagttggaagtttaaataaatgagttgaaacagggcctaagaaaatgattagtcatttatgagagcaaaaacaaatgctgaaatgttcaggccctgtttagatgagactaaaacttttaaatccctatcacatcaaatgtttttggacactaataataaatattaaacgtagactattaataaaacccatccataatcttggactaattcgcgagacgaatctattgagcctaattaatccatgattagcccatgtgatgctacagtaaacattatctaattatagattaattaagcttaaaaaatttgtctcacgaattaactttcatttatgtaattagatttgtaagaagactatatttaatactctaaattagtattaaatataaagttaagtccctggatcctcagttctctgaagttgctgagccatcagaaaacagctaggactgcagcgaagttatacctcaaatgtgatccagccgagcgacagggccacggcgatggtgagagaattcgcgaatttccgatacatttcaagcttcgccgtcatcctcctcgcctgcaagaatcagattaatcacagaattcattgatgattctcgaagaattattcgaattttggtagaattttgaaagtgggaagttcaaatgatgctaccttgagcttgctgatagttcttgacagcgaggtgaagatccagtagatgaacaccgtgttgagggcggcgacggggagaatgaagaagagcctcctcgccggcgagtggtcactgacgatgccgacgttgtcgccgacgtcgagcacctccgccgcggcgaggaacgcggcgccgagggcggccaccctggcgttgccgcagcccagtgcgggcctcgtcacgccgtaccccatggccacgagcagcgccagcacgcggcacgccgcggcgcgcacggcgcccgacgtcgccgcccagaacgtcgtccccgccggccggacgcccgacgcgtcgaactcggcgaggtcgaggtaccaggtggtgacctccaccatgcccagcgcgatggccgccgtcgcgaagttctgcagcggcgacacctcgcgccagaacctcgcgtaccgggcgaaccagagcgcggcgagcgcggcgaacgccagcgacatggcgccgtaaaacggcttgagcggcgccatcctccccgggaggtagccgcggctgttcttccagatggtcttcccctccgcggccaccacctgcccggcggcgagcgacgcgtcgcagtggacgaagtggaggctgtacatcccggtgcgcgccacggcgacggtctcgtcggggaacgccgcgacgaggctgcccgggaggaacgacgcggcgagcaccttgggccagcggccggtggcgttcgacgacgcgggggcgcggtacacgaccgccccctccgtgcacccgcctcgcctcgccatgcccggcgtgcagcacagcgcgcgctcgccgccgacgacgtcggacaccgccccgacggcgtcgcggtcgccggcctcgaagatgaccgccgccaccgtgaccgtccggttgccgtcctcctccgccaccgacgccgcctccggcgtcctcctgaacgccaccttctcgaatctgcaccaagaaacccccccatggcgagcgcgtcacatcccaagaaccaattcaaacaacgaagcaatgacacttggcacccacaaccagctccggccaccgtaccggacgaacgactccgccgtggccgacgcgtagacaccctcgctgccgccgtgcagcacgaagccattgccgacgccggcgaacctctcgccggcgtactcatgcaccgacgcctccgcacaaacgacggcgcaagaaacgaccaccaccgccaccgccgcgccggcgaggaggagccgccttatcgaaggcatcactgacatcgccggagacgggagactgctgctaccaccaccgccgccgcggcagcatcggcggcggcgtggagtagaaatacgagaggtggagggatcccgagaagtggagggagaacggaagagacgactttgacgttgggaggcagccatgaattttgttaggtccacaccctaaactacagaggaaaagaaaaagaaaaaaatacagagaatccattgcaataataatggaacagtgacaaaaccatgatggaattaggcagacatgcatgacaaaaatgacaaatgagagggaacaaatatgagcaagatttagcattgagattatcttggtgcatgattggctccatttcgttgagcactatgcaatatgaagtgacacggggatcgtttgatcacgcgttttaaacaaagatttcgagggaaatatcattctctaaatcaagtaagaatacacatagttatgatattatcggactaaggagaaaaaagaaccatgaccaaaacgcctattgttttaaaacgattttctaacctaaaaccgaagtggtaatataggttgtagctcaacattacaagggttatgtgggcaaatgtttggtaccttgagcagataaacatcgctcctgggtggagaagacctaggggtttgagaagagcagtgatattgtgacaagtttccttaattcctcttgctttgtttagtggcagttttacttgtggactaagggatgaccgtgagcttgtaatgccagagctgaagttgaggttttagtgacgtgccactggggttttagcggtttgaaagccacgtgtgtgtcctctcctgattacacttacaccatcactttcttggtcatgtcaagtcaacgacgatgttaattaccgcaataagaacaaatctaatactcctccgtcccaaaatataaacattcttagcatagtgacgagtcaaatgtttttaattttaactattaacagcaaaaaaataaaaaaaaatcaatcatgtaaaattgatattagtagatttatcattagaaaaactatcataatatttaactttttttatttaaaacatcttacttttatagatattgttggttaaaatagcatctcagagaccgtgttagagtaaaaaaaaatgcttatattttaggatggagggagtagttatctacattcactctaatagcttagtcatataataaatttataaatatatattttactatcaatatttgatcacctcgcatacacacgtaaatacatgatatattgaaatccgtgtgtcacagctgactatatctatagctcgtttttctcctctctacgcttatctcttcttgacatttacttgtagctaacatatagcctgttgtcttaaaaaaaacatatagcctgtatttgctacgcgttgttatatttctaccggtaccactgccctgagttcttgatttgtagcataaggtacaatatttttttcccataaacgtgatcattgaagaagaaaaaaaagggatattgcagatgtgctgactgagctaattaagaataagatattcaggcataaaccaagttagctagtgacttttgcatgcatttgacatgcataagtccactagcaaatatctgcagccaaaaatcatcctaatcctaataatcaaccaaaaaagtccaaaacaaaaggaaaaggtcaaaaggtactcatcgcaagcctgcaacaagtcgcacagcaagacagaaactcacaccagttgggcaggaaaccacatgaccgtgtgtactgcatgccccgtttggctcacaacctaaccaccagcacacgcctaattagtttaatcaataattaccttaccttgtttttgctttcagaattaagtgatcgtctcgtctaagcttcatgacctttacgcatccgatcgagtgacaagagatcaattggagtagttataaataagcgtgagtattataattaggagaagttttactggtgtttttatttcaaaaataaaaaaaaatcaacggtctaaaatagaagtattatataagggtatttaagtatcgatctaacagatgacatggtgaagggtgtcgacaaataaccatattttactgttgattaccctgttgtcattatttactgtaattttattttaaaaatggaggattttcccatataactatataaaccgatgttcaatgaccgaacgaaaatgggaaaagtttcaaaaaggaaaaaaacttttcgccttcaaccgggcctaattcaaaacagcccaactattttgcctctgtttttttacgtgatttttcaaatgttcaatttcaaaaaaaaaaggtcaagttcaagcttgacatgaattttgaccttgtttttacatgcattttaaaatggaaactgaagttcaaaacataggggagaaagcaatagcctagcaaacaaaaccattttccccctccaattggacctaatttgaaacaacacccaattgaaaatggaatatgtctactttgactcccttaactagtgtcttaacctaatttgtatctttaaaccgtaatagcggatattttgacccccaactattaaaactggtgtaatttgtctccctcaacggttttggaggactgttcactatcatggagcatacgtggcggtgttgtaagcgtctgtcgaggagtgatcctctctagcaggagatcgtgagacccccctttcgtgagttcggccggggaagaagctcgcctctagaaatcgcgtatccgtccccaaggctcctagctagctcgcacacaaccaaattatacaggttcgggccgctatgaagcgtaataccctactcctgtgtatgggatttagactgagagttacaatggttcctaaactcgggagaacactcttacttccctcctccacaagctcaggttttctgagagtcgtcctctttctcggtgggtaaggtcctccttttatacctcaaggggataccacatgcaccgcttctacctactcttttttcgggaggggacccaccatatcttgactggaactcgacccgtgccttcgcctggaagctaaaccatagcttgtccttgagcggggcccagcaccgtccctcgcctgacacgggggacagccctgtcattccctcattaataggtgaagacttgtggtggccgccgtccgaatgaccccccgacgggacgggccatacctacctccactccaccggaagcagatgtgacgtgggagcacggttgtccatccagtcagacgtgaccggcgtcaggccggtcacagaccggtcattcttgaccatcgcgcgtcagtttagcacgccgcacgtctgccccactgcattaaatgtgacatggggcagttgaggcgctgtgcggattaaaggaagttcagcctggggcccctcctcgcttgctccccccgccaaacggcggctgggcgagggcctcggggcaaagcagtgcaagggcccgaggggcatgacgtggcaccccgaggccccgacaccccggccgctcctgcggttcgtggaatgcggggacaggaccatgctgtagggacacgtggtaggatggaaaggtagattcccctcacttcgcatacccccgggcccatatctccgacagtttagggcttagggtttaatagttggagagtcgagatatccggtactgcgattcaagcatacgaatcagattcggcccaataatccagatgccaataggacggcccatcaatccagatgcaatacgacggcccatcagatcccgtccccgagaaggaatccccctcaccgttggatccgatccgacggctgagaccagccacacaaaccctcaatatatattcgctcgccccccgctgcgtctcgccgctcctacaccgcgccgtcgccagcagccgccgccgctgcctctcctcctcctcccctcgccgccgatccaatccggtaagcctcgccgccgcaagctccccctcgtccctcccccggatagttcgtcgcctcgtcaggcatctcgccgatttggcgccgttctgttgttctgtttggtggagccgtgcgcgagatttccggtgtttgttgacctgtttagctctgatggattcaccttgtgttagttagttttccgtcgaatggtgtggcgattaggtttggggggattggttcgtctgtgattttgtagctagattttttgaaatctagggtagtgtgagtggggaagctgctggccttagtggatacatgctgttcgtggtctcctggttcttgaaatcatgatgagttagtgctgtttgaaccttgaagcaaagttttaagttattggagttcctgtgcttagatttgtatactattagtgaagagatgcatagctgtactgctgtagtggatataggagtgttgtttttgatttgctggtgctcttccatagcatccggatgcggtgttcaattgtgtagttgtttatgtagttcaatgcactagaagcttttatttctgaatgcctagttattagttgggtatgaagtccaatgtgtgaaatgctgtcatgtttcaacttttagttaagatatgaaacttgagaaacaaatgaaaggtttagattcagtactgatgtacaacttaagtaacatctatggttgtaaattgtaccatgcattggttattgtgaattagctcttttggttgattgaaacaattctctatgtgccaacaggtcactttcagtcttttttcttgagggggagatggcggtttctttcaccaacgttagctcagaggcaggcctcaaaaagctcgatgagtaccttctcactcgcagctacatctctgggtatatgatcagtgtccactgtccaccttattttctgaattgccatttatgttcactggacttaaacccttcaattatctgtttccaggtaccaagcctccaacgatgacttggctgtgtactctgcattttcaactgcgccctcttcaagctataccaatgttgctaggtggtttactcacattgatgcactcctacgtctgaggtatgcatttttcccctttttttattctcttacattttatgttcagtgttgtgaattttctgaatgttgtatttcagtggagttactgctgatggtcaaggcgtaaaggtcgagtcgacagctgttccttcagcttcaacccctgatgttgctgatgcaaaggtcatacaaccctagccttgtcttgtttgcctgaaatctgtgaagtgttctagcatagtactgtgaattgtgatttgatgctgtttgcaaattacgtttttgtggttcaatggtgctggttaccatctctaatatatcatcatatcttctaatttcaggctcctgcagctgatgatgacgatgatgacgatgttgacctttttggtgaggagactgaagaggagaagaaggcagctgaggagcgtgctgctgctgtcaaggcttctggcaagaagaaggaatgtatgccatcctgcattatactataccatttttatgcaatgaataatacaattattcattttattttattctcatctgtagctgtaaattaagaccaaatcatcactattcattataatgcaaagtgctacttctaacttgtcaacacctttttattcagctgggaagtcctcagtgttgcttgatgtcaaaccatgggacgatgagactgacatgaccaaattggaagaagctgtgaggaatgttaagatggaaggcctcctttggggcgcatgtatgttactacattaaatttcttcctacgaatgtactgtcttttgcttttgctagtttggttagattgtgacatgaatatataccactgtttgcagc

SEQ ID NO: 4757 - DNA, 11595 bp, Oryza sativa
catttatgactctatttatcagggtttaaattatgacacatataatggaaaaattgtaaaaaccatctcaaatgtcactataagtttgagtttccccctataagacgatttgtggtaaatacacccccctctcttagttcaccttgatttgagattcccctgattgccattgctcgtccattctcgtgacaaacccccccccacatgtgttcacatgaatactaatacgggaggagttgtggtcaccactcatgttgatcaagcctaatgacacgattgtgacattcttacacatgacacgccaacaccttgttgggcagtgtgatcacgagtctccgcacttgaacatcagggttgtcgaaagatgagctactgcgcttgcctcatggggtttcgggtggctagtttcttcgaggattcaaaaacgatgaaaatgagctcagtgtgacactgtgctgctaagaaagataatgtgttcagggtcatatacatcaagagatgagctaagtcgtataacacatgagaaaagagaaaaaaaatagtgtgagcaactggggaggaatatcaaactaaggtgaactaggaggtgagtattcacaaaagatcatcttatagcggaaatcttaaactcagtgtgacatttggagtgatcttctataaatttccctaaatataaaatgtacgatcggggtttaaaaaaaatgtacaatcataaatattgtttcacctctgtatgttgatcgtgctgataagagtagtcatgagcaggggcggagacaggagtagggcagcttgggcttgcaaccctattcctagtcctaaatattcattgaaattccattttaaaactttaaaaactagaagataaaggcaaaattatatatattcaactaattgagccctaagtttagaaaaattttggctccgccactagtcatgagggtgtgcatgcacatgtatctttcgtgttatcgggcaaaaaaaaaacaatggtttagaatgtactaccaccatcctagaaagatcgcagttttgtacagtatatgtataatatttggccgttcatcttatttaattttttttataattagtaattttattgttattagatgataagatataaatagtattttatgtatgactaattttttcaaaaagaaatatatataatttttttaaataagatggacggtcaaacattagacacgaaaactcacaactggatttaaaatgggacgtagcaacaaggcagaggctgtactggccgagagtagccattgtttagttcatagtgggtgagtaaataaaaaaatgtaagtcgcaactgcaagttttaagatcattaagtcataaattaatatacattgttttccctcattaagactgagacaggaaaaaatcgatatataaccacatgttggccaatttggatggactctgattggccgtactagcgaactcactagttcctttgtggggaaatacgttatttgtcaatatctttttttccacgtcttgcgaattgcgatgtaggttcatgcatggcactacccaaatgaaaggagtagctgaccaggatgaaatacactcccaatggccaatgggcgttcgagtcaattgaccactcgattctatcgatttgttttgtccgagtaacaggaacagaacagcttgatctatcttatcgcccccatcatcccataaatggcttgattcctcaaaaccaaataacccacaaatgtctctaaaccagcaccagaacgtttggactttggagaggtccaaacctgaaacctgatggctttttcatgggtaaattgtacaaccaacgaccgacctgatcacctgaccaagtgaccatccttgatcaagctgtacagtatggagatgcacgggcttttttttcttcttcgcaaactctatctatgtacactcgaatactctcctctctccccaaattacaaacacaaaaccagacggctacgagtcggaccctgaacacagctcggcgcagcactcgtagcagccgaggcaggcgaacgccgcgcagacctgcgtcatcacgatggcgcactggtcgttcatcttgttgcaggccttgatgcagcacatgcagcagaggcagtcggcgaggcggctgcagcagccggcggccttgttgaggatctcgaacgtctccagcggcttcacgtcgccgaaacccgtgacgaggttctccctggtggcggcccggtcgccgaacccgagcttgaggcattggagcgggatccgtcgaggttcgtcggggcccttgtgacctttcagtttctgcttgacctgttcgagtaaacaggcaagttagttgggagttctgagctagcgtggttgtcacaagatccatttctcgtaaaccagtttataagcagggaccattggtattattataaaaacagtgggacttaccttttgtgctgcatctaccttctccaatgtttgaagtaggaccatgctcgtgtactctgaaggaatgctattttgaatgcttagtttcaccaccttcaaaaatcaaacgaaatggagttactgaaacccatatactgctaactgaatggaactcaaactactaaagaaagtaacatatttcaggggcaactgcaattcacaagagaatgtgacctataaagatttcaaactagttcagggaataaatgaaatggaaagcgaacatcaaaataatattcagcaccaacaaccacactagggctgagtttagttccaaactttttcttcaaacttccaacttttccatcacatgaaaacattcctacacacacaaacttccaacttttccatcacatcaaaacattcctacacacacaaacttctaacttttccatcacatcattccaatttcaaccaaacttataattttggcgtgaactaaacacaccctaaggctgtgttcggatatggggagttgggaactaaactccccgcacggaaaacggatcggtccattagcgcgtgattaagtatttactttttttttttcaaaaatggatcaatatgcttttttaaagcaacttttgtacagaaactttttgcaaaaaaacacatcgtttagtagtttgaaaaacatgcgcgcagaaaaagagaggggtgagctgggaactctgtgttcggcacaccaagttcccatctcctctccatcgtgtttcgtgcgcacgtttttcaaaccgctaaacggtgtgtgttttgcaaaaagtttctatacgaaagttgcttaaaaaaatcatattgacccatttttgaaaaaaaaagctaatacttaattaatcacgtgctaatggatcgctccgttttacgtgcgtaggagattggttcccataaagcccaagcgaactcaagcatttttcaatgtattgcccattaaatgcttaaatgcttcagacaagcaatgtgagaactttcaaacattaccgattatcttcactatatctcatgactccaaaattcagtggaggtataaagcgaagaacatgtataatgcaacccttagccaaaagcctgaaacataaactcacctttctctccagttgcttgtcagaagaaagccatgccttcgctgtgagaaggccaatctgctgtgccgccaaaacctagaaatcataaataaaaaaaatgcatatattattagtatactcgagaaatctatggccccaagtatgatattgtgcaagtttctcaatggaaagaagagaaaccaaatgtacacaatagtgagcatcttactttgtcaaggggtatatcctttatatgctgcaccttaagttcaatcgagatctctctcatgtcagccaagtaacctttagctgtaaccatatctgggaacttgccttggtatttcccagatatacataaaggactttttgctgaaatgtctggaatgtattcagaatcgatctgaattggaggaaaggaacagtcagaagacaataaaactactgtttttttctagctactactagttacacctgcaaaaagcatacccacaaaccacccttccatacagcaaataattatttctatatacaggacaggctctttgctaggaagagcagtataagatggtatggcagcaatgaacacagcacacatacactaccagagaaaatgagttgggaaatcacaaatcaaatactgaaaaagagtcaatttcattatgaaacatgatcgcaatgcagccagaaccaccttgatggcattactcgtcttacatatccatctctacataaccaaatttacaatattgagtagttagtgatgaattaactcacttcaaattcatcaagatgtgctgtagcatcaatggagatgtttgcaactattgtactcgatgctttcctgaaccacctaagtacctgactctcaattgatcctgcaaaaacaattcaccaaaaaaaaaaggtttatgaagatgttacatggacttcataaaagtcatatttgtccaattaatgcatataatagaacagtattgcttagatatgaacttcaggaataaatccagatcaataacaataatgtattggtagaatgcccatgaaacttgagcagaggttgcaagatggagtgtcaacttaaacagcatgcagggatcataaagaaacagtgttacgtggaaaattgcaaaccaagagtacaactagctcttagattgcagagcaagaggatcccttcatagaaaacattattgccacctctaacaatatgaactgattgcagtttggtttttctattataatttggttgagataacagtatatatcgtgtgtctcaggaaaagctaagaaatccatggagaaagggtagactgtgtagatcattgttctaaccttcaagtttaaagaccaacataaaggtaagagcatactgtttgctatgatgagaacaaaagggtttaggggcttggtacctgtctcaaatgcagcatcataatgccccctgcctattgatgccagcatgcgcaagaaatagtggttgcaatacaaacctgttattccagtgataaaatgaaaagagcaaaaagaatatatcaggtaaactgtaagcaatcagtaacgaagtagtacaaaactaaaacagcagagtaattaaaatatggttcgtctcatcacaagctggcagcatatatcaccacactgactggtctgttgacttatggtgtaagcatttttctcttacacaagaaaggatatttggagatagagaaatacatgagcgttggtgcaaaaagtagggaggagaattttcatgtgatccaggagataagtcaagagttttgaataatgagataattgtatatttgacgctctccttaacattacctagtccaaaagtagaaatccgaggagatttagatcctctgctgatgagctccgttttcacagtttggcatatattatgttcatcatcaactgatccatcagtcataagaaagatttgtggaagcacatcatgagcacttgacaatgatgccattgcctttcatgaaaaaaaaaagtgagagtattaacagtaatagaataaaaaataatactacatatgcatctattcacaatcgagatttaatattcaataatacctcattcaaaggatgcataatatctgtaccaccaccagcaacaaagtttaagtttatccagtcaagtgcacttgctattgatttctcatttactttctccaaacacgatgagaatgagtgcagctcatcattaaatgttataatgttgaagtaatctccttctgtgagttctgacagagcagtagacatcgcattcttcacattctcaagcggatgtccttgcatgcttccacttgtatcaatgacaaacacaactgcttttctgaagacctattgaattgctcaggtgagatataggaacaaggagagagattttgtgaaacacagaagaaggaaaaagggaatgtacttctgtgtcaataaaccaaaagtgctatgaacaaggccacctcagtaacatccttatttactataactttaatgatttacaatcgcaaaatatcctgatagtatttgctaaaagaagtccagattgtagtttgcacatagctagtggaatttcactagaaaaagatcaccaaatggcagtttagaatggtgggtttgttgattggttctataaaaaagtagttctacattagcttcatcagaaaggtttctgctagaggccctcttctaaatataaaagttttgtcaactgcagatatctcactcaaggaagatatgcttaaataaataaaaataaaaactatgggacgaaaccccgcaaaagtaagagcaactaacctttctgttgccacctccaggtaaaagaaatatgcagaacctatctctatcatcataatcacgcaatgtcgatggttgaacaagcacaccaccagataagtcaccagaataaacctataggaatgaacataaatcagacaaatctgaacatatatttagctattgcagttttgaaacagtaaacagttctcgagccagatttcagttacatctgcaactaacatatgctcacaaaaaaagaaaaatttgagaagtcttggaaagtcagattatcacaggaactagtgagctcataactacttaaagaagtgactaccgattacagctaataaagagatcacaaaagggaaactcacactgtatgaaaaattgaaatctttgcttgaccaattctcaacagttgcttcatgccggaaagacaacttctcaccctgcctacctttttcctgaaatagtaagggaaactcttttgaagattaaatgttgtaaaagcactgatgccaattgcccggaaatcaaaagagttctagcaaaaaaaaatgattaccttcaatgggtggcttgttccctgcagtaaaacctctttactgaaaccactattcacagtcaactgaattttctcccttttcatgaatacttttggcaatgggttaacataatatggaaaacggaacggtatgtccactgagaatcgtccattgtcatagtgtagcttctgagaccatctgattgtggcagaaatatccgccccaccctcaatctttatcggcaagatggcaatgaatcttcaaagtaagactccaattccaaaagttcaaagaagagaacaaaagacagttctgcatttagcatgtacctgtgatattgtcaaataaaataattggggtttcaagagtccgccactatcagcttttggagcattctctgtagtgtgatcttctacttcaattacttgagtattatatgatcttcttccaacggtaacctcggctcctagaattgaaccctattagccaaaccgttcataggttgagaacaagacaaacatggaaattaatgcaactcatataacataattaaacataatatactagtagatgcctaatgttcatttaatggtgatgtttcctacggatggaaagtagaatcagatgtttcaaaatatcaaatattagtgtatgtgagttatttattacaaatttccaagttgttgttaatcaacttcgctaggcaagataacaaccacccaacaccaatgaataatatgctatagtcatccaagacaaataacttcaccaccgaattatctccattctgcaagccattatattctacaaccagacataaaaggagcaatggagcatcatgtgtacttctagatgctgaagtaaagaacaagctatacaatatgtttccaaatgacacgaagcaacatatttcagtacacatcaacatatttcttcttcctagctgcctcatttttgatacacaagccaggttaccactctgctaaaccagcacattccttcttgtgtttgatttccataggacaaagcaaggaattactttcacttgcttatgccactttttactgaaaattgctcttgtaatataaccaaaggcatccatttagtcagctggaattcataaactagttataaagaaagtacagaatttagtgcagagcacgccatgatttgcggtcaaccacctcaagacaactcaatcaaacgaaccatatgaacaaaaaaaaaaaagagaacatattccacttggacaaacactgggttaagcaaacacctgaataatgttgccaccaaccattccaacagcacagtcaacaataaggtacaaaaccaacaaagcatccatgtgaagaaaacaatagaactaacggctcaatggagaatcaaaactgcaaatcgagaggcacatatacatgccgcaaaaacaaatccaacaaattcatggttcccaactatgtaataacactagccaaacagccggaatcatacatagcacagcaccaatcatttcgaacctcaccaaaccaaatctacgaggcaggagaagggaacaacacagctacactagggggtaaaacaaaaaaaatcgccaaaatgtgatccgatcgagatttacctggtcgcccatgggcacgacgatgcggacgtcgcagtcgcggctgcgggtgatgcagtgcaaccaccaccgcgcgcggacggtgacagcggcctcgccgagcgcgcagtcgacggacaggtcgacctccttcatctggagcgggatcagcgcgggggggtcgaggcggccgtacacgtatggctggtagctgggcacgtcgggggtgtcgaccgcccccgggtcggtcaccaccgcgtacgccatcggcgccgaccgcagcagcagcgccgccacggaggcatcacccccacccccacccccaaccccaacgccgcggtccatccccgccagtggcctcggcggcggcagcccccccggcagcaccagcctcttcgacagcttcagcccgtcctccaccgccctagcgaacccctccatgacccagacgcgggatgcggcggcggcggcgtctgcctcaggtagggttccggctgcgccgacgagaggaggagattggtgtggtcgattgatctgggggggaggcgatcggcgcggcggcgtgggcaagggagcgagacgagtttatttgtggagatgaaaatgatgagatgagatgggatgggaggcggtgagattaacgggatgggggggaggtttgattcgatggatcgttgtcacggaagatttgattaatgtttttaactgattacacggaagattatggtggagttggtttggtatcttcgtttggttatgggtgtttcctttccattgtttatgctgtcgctttgtccgttgaaaaattgaaaactgtaaatttattagaaaagggggaaaaaacacgggacattaacatgagttcggagtgaattagcgcttccggggcaattaaaaaacttgcctaatccagttatagtatcagccatgttacattactcggaaagaaagaaacatgttacatcatgtattgccttctgatacgttcacacaaactgaactttgctttagcaccgccttagcgtcagactaaccattagctttattgtttaaccacaacctgctaaagagagtaataaagagacctttgctttttactaaatgatctgcatatagtttttttatagttttttttatttctaaatgatctacgtatttatattcattcattaggtctattcgttatttgtgtataggagtaaatggacatggatacacgcatccatacacacaagtatttatagctcacatgtaatatcttgatttgctgggatcggctagaaaatagtggggatggtgtatgtatcgagtttgttatatattatgagagagttattagttttcgttggttttagtgtacctatgaaatatttagatcaatttaaaatggagggaggatcatctttggagaagttgaggttagacgtggctcaatcacgacagccggccgtaataatctcatcgaagacaactcgccgacgagggaaacgacgttaaccataacgttgacgacgttgataccgtgaaaatgaaaataatattttaaagatctatttataaaaaaaaatttgaaaaaaactacaatgtgaaaaatactccgcgggcggtgagcggagtctcggacgacatcgcggcgcttccaaagaaaaggagcaacgtatacacgcggtcaaaacacagctgcggaaaaaggccctgggccccactttgtgggccccgctcccccgggccggccacgcgcgtcaagcacgcgccacgtggcctccaaagggacgacgacgcgcgggagatccgatcgtgacggctcgtttcggcttcgacggtcgggatctccgtctcgccgtcggcaacgcggcgtaacggctagttttgtgtcgttttctggggggaccgctccaggagccgtgcgtgtggtgtgaactccgcaagtccgttatacaggagtacgtacgtcgcgccatcaccagctgtgaccgcctggcgcccggtgaacggttttgaaacacgttctcgcttgttttttttaatggtgcgaagttctattgagcaggaaaaaattactccctccgtttcaaaatatttggcaccgttgaccttttagtacgtgtttgaccattcgtcttattaaaaaaaacaattatttattcatatcatttgatttaaagcctcatcgtttggcatattttctgaatatgtcaaatgacatattttgcaaacgaaaatcaatttgtgaataaaacttttatatatgtgttcttagcgatctaaaagcaaaggctgaaaaataaacttcgatgaaaaaaccccaaaattagcttcaaatttaacgttgaaaattcaaattttggctcataagcatatgaatatgccaaacgatgaggccctcattgttaaatatactttcatgtacacatatagttttacatatttcacaaaattttttaataagacgaacggttaaacatgtgctaaaaagttaacggtgtcaaacattttgaaacggagggagtacaagattacaaccctgaataccaccacccacacaccgatagcgccaacacacaatccggaagaaggctagcaccgaaccggccgccgctaagcgtgaccgaccgccgttagaccaacaaatgaacacatacaagatcgccccctagggatgccaaaacaacgtcttcaagaagagaagtgacagaaaaaccgttgctgccgtccgtcggggctcagaggagccaagacatggctttcacccggcaaccactcttgaggggtgagacagcatgacaacgccctcaggagggggaatgaaccgtcgttgtcggtccggctaaggccgggctaggttttcacccgccgctcaccatctgcgaatccacggctgacgcaccgatgctccaccaccactcaagctctgccgacatgtgagacccctgcaccggcgtccccagccggccagctttcgtgtgccgaagaccgcgccacacccgccggcagctcctcctcacaccgtccttaattgtcatgagcacgaccatcaaaaccatgtgctcacaacccaccattaccaggttttagttggcacattaattaattaactaatcacgattgaccatcgtgaactatca

SEQ ID NO: 4758 - DNA, 9505 bp, Oryza sativa
ggggaatccaaggcgagcagaatggcctgctcgaggtcgtccatgacggtgccggtggtgacgaagaaatctggggcgggccgaaggggggaaagaaaaaggggcgaagggaaggcggagttggggttgatataggagaggagagggtttgctcctcttcctctccactgcggtgcttttctttcccttcccttctttcttcctgtctaatcttccgtttttgccggatttcgtgggtttatggacggttttggttttgggtttgggtttgggtttttaggtttaggactagggaggggagggtcttttgatatttttttaatctaaaaataaattattttgcattgtcctttgagaaatatctagctctaaaagaaatattaaaggaatattagcaatacttgaaaaaaataacaatgtcgtatacatatgaattgatcatgtgtcactctcagacattattatgcaagtattttttgcgcattacatatataatatgagttttgaagtttttatgcaggctccaagttgacaattgcaatccttagggtttcgactcctcagctggttgggacgttatgtgcatggaataattattgctcggggtatagaagttacgtgtttccttaattacaacataccaaacctatcgtttctatgaaaacattcaagatttgacatgtatttattttggtgttggttaaatcatatttttggacggtcagagattccttgtttgtgcatatcattattgatacatgacacaattagtagggatgtagatgggctgggtcaacccatttacccagtgacccaacccacgatctatggggcaaaaaccatatgggtcaacccacaatttcacctaggctaacatgggttggtggcctcgtgacgcacggaccacgcatggggttgacccatatcttacaccacgtttacgcactcacaggctccagtagatgttggtgggtggaggcgacgacggcgtgcatctgcgtcaacactacagcaaaatcggtagcctacttctcatgctcattacctcatcatctatatctccacctctgctcaccccttgtgctcgacgtcgggctcggcatccaattcaacatgtgtctcttggagctccggtcaccatgtttgtgaatttcaccatagagaagatcacgggaggctgaggctagaggctcttagtagtgcttgcttgacggcccagtgtcctcatcgtgttcctcattgctagcatcgtctttctgctagagatccaacaaggcatagactatgacaaaatcaagatgttgctccagaggatcaggggcatcggcgttgtgggcgacaagttggacaatatcgccactatgaaagccatgtaactagacgagatcgaaccttttgcagtgccagtactcatgcatatgcttattcaacttttgggttatgggtcgacccatgggtcaactgcctaggaacgttgcgggggcaagatgacccatgacccataatctagcacggggggcgtggtgggcagggtttcccttaccggcggttaccggacttatcgcggggtacggtaatataaataccgcggtaacctccttaaattcaaataaatttaaaaaataatttgaatttttgataaattttgcacggtttttcatggtttttcacggttaccgcggtaaccgtgcttaccgccggggcgcggtaaccccggccccggcggtttaagaaaccctgatggtgggtcaagccttggggtcgacctaccagtatccctaacagttattctttattataggtaacggtattaccatattatcttattgttctcatcaaacacatgtgttgaaaagataaactaatagtagtgatattactcgacgagaaaagaaccatgtcaagtgattaacacattccacttccgagttcttacaatggttcaaaagacgcttctcttctcttattttcccctttctttgttggctcttatctaactttctatccattgggatgtggcaatcttactgccaaaatgttaaagataaaaccaatgatgttttttaacaaggaaaaaaatatttatcgacacttgtgtggcttactaatagtgagttttggaaaacaacaaaacctttttttttatccttttcctcccctttcatctcatctatgtcacgtgattcctttagggctccaaccgtgtgtccggtgtgacatgggactcttaaaatagtaaaatccccttgtgatgcatttgcatagttcatctacatggagattccacaacaaaaacaccaggacaacacatcaagaaacaaaaatctaatttctttttagcttccaaaaaaaatctccttccttcttggaccaaaatggcgataaaaccccaaaccacagcccaacatcccagcataacaaaccaagagagaaacaagcctaaaagaagcaaggcccagcccaatagcccatcaagctcaccattcctcgcctcctagggtttcctcctatccaatccaccaactccgcctcgccgcctccatccctcccattcccgaacacgtccccaaggtaagccggcggcggcggcgatgacgacgagcctgaggaagaaccgcaagaagcgcggccacgtgtccgccggccacggccgcatcgggaagcaccggaagcacccgggaggccggggcaacgccggaggcatgcaccaccaccgcatcctcttcgacaagtaccacccgggctacttcggcaaggtcggcatgcgctacttccacaggctccgcaacaagttctactccccggcggtgaacgtggagcggctctggtcgatggtgcccgccgagcaggcggcggaggccgccggcgccggcaaggcgcccctgctggacgtgacgcagttcggctacttcaaggtgctcgggaagggtctgctgccggagaagcccatcgtcgtcaaggccaagctcatctccaaggtcgccgagaagaagatcaaggccgccggcggcgccgtcgtgctcaccgcctagggtttggtcctggccctgccttttgttctgcttcttggtttttgagatctattaatctgaagtagtagtcgtttcttgtctcaagctatttgcgttaagaagacttgattagtttgttttctactgtacttcttgcatgttaagacagtacgttatgagaatttttgcactaagcgatgccagttcatgtcagatgcttcagatatatcaatgctattttgtgctgccaattatgattcgttcgatctgacttggcatgcccgcgttatattagatcgtctgatcatgttatgtacttgtctgccaaattatgtggatggtaaggttcacattagttttgatctggcctctgcattatgcttcattacaaatttacaattatctgaaatatgttgagaaatgtatgatgttcctgataagaacccatatttataagttaactgtagacatgtactagtaataagcatgttgaatacttcgggttctgccatgttctggattatcttttagccatatttctgaaaattagatgtaaacctatagcaagcgctgtttgggttctgtgccacatgacaaacttctcagtgatttactgatttgcattttttttctctctatgaaaatttttggtccatttaggcattccatggttgtctgaattattctagaccagtaacttgagcactgattaattatgttattcattcacaaattattggataggatcaatcatgtagctgtcctttctggaaaattcatgtctgctagatactggatgattaaaatgtcatggttgtttgtcagaattattctattgttatttggggatttgttctactaggttgtctactgtctaggggcaggggctggatgatgatcatgttggtcattttgttgtctagtgtcttgtcattcaaccctgctcgcagttcaaatttctgtgggtgctggagtacatggttccgcacttgcactatagatgttgaaatgaaccagcgcgaagtgcagtcatgatgtttttgtgatgaagtattctgatgtttcatattgcgagatatcagtttccactcattttgaaattttgagtagcatgggtggtactgatttcttctcgtgtttcataagtagatcttctgtacggtgaagtcttggtaaatatttcaagaaatatggatgtgcgaaattgatattaggggtgtgtttagtttacgccaaaattggaagtttggttgaaattgaaacaatgtgatggaaaagttggagtagcatttgcccgttgcaatgggacaggcccatacaatcggggataggccgagagggtggattgaggaggtgatgagtccgctttttatgaactgtgatcgatcctgtcgttgttgctttgtactagtagtaaatggtaatgcttgacgtaatgacatgtgtcctagtggacaatgtttcaatctaagctttcaaacttagcgtgcctaacttcaaacaaacttggggtgtgtttagttcacgccaaaattggaagtttgattgaaattggaatgatatgatggaaaagttggaagtttgtgtgtataggaaagttttaatgtgatggaaaaattagaagtttgaagaaaaagttatgaactgaacctccattgcgttgtcgaactgtcagtcattgtctcatcaccatgcaatgtcttgttttgcatcacatcacgctattggtttttttgcgtgaatcagcgtaagtcggatacttcaacatgtcaatggctgtggttatatctaaagtttgatccaaacttcagtccttttttatcacatcaacctgtcacacacacaacttttcagtcacatcatctctaatttcaagcaaaatccaaactttggatccaactaaacacagccattaatatgtcattgtcctgtagcagtatacccttcaatgtttcctgattgatcattgcgtaatgcataacaacactgtcaacacatcatgtttagcccataacaacactgtcaacacatcatgtttagcccctttgaatcacaggaatgaaaaaacggagaaataggaaaaacataagattatgataggaatgtaagtgtaaaacaaaggattgcaaaacacaggaaaaacataggaatgaccgtttgattggaccactggaaaaacacaagaatttgaggagagataaagactcaaaggatttctatttgatgaggagagataaagactcaaaggatgaatttgaggagagataaagactcaaaggatttctatttgatgaggagagataaagactcaaaggatttctatttgaggagagataaagactcaaaggatttcttccatgaggttctacctcttgttaaaattcctccaaaacttgtatgggaagaggcattccataggaatttcatagtattccataggtttcattcctttgattcaaagggctttgtaggaaaaatttctataggaataaaatcctctaagggcccctttgaatcgcaggattaagaaaacgtaggaataggaaaaacgtcagattttgataggaatgcaaatataaaacagagaattgcaaaacacaggaatgaccgtttgattaaaccacatgaaaaacacaggaattggatgagagagatagactcaaagaaaagttagaagctcttgctaaattttctccaaaatctctataggattatccattccataggaatttcaaagaattggataggattcaatcatttgtttcaaagggctttataggaaattttcctataggattaaaatcctctaaaattcctatattttttctccaaatcaaaggggccctaaaatttctatgaatttcctttgaatcaaagggggccttacaaactccctgggggagagttgcagaatcgagaacgtcagtgcgtggtggttttgatccgttgatgcttctgctcgcaagagatgcgcctgcacgtttggttgaaagcgttggagaggttgcaaccgagcgccgctggatcgctggccggcctcaccggggcatcctcctccgtcggcgcgcagggcccggccggccatcattgccgccgacactgaatcacaaccattcgcaatcatgctgctgctatcactgtgcacacggttggccgatgcaggaggcggacagataccagtatccagtacatcgcatgccattcgcatgtaccgttccaaactcctccatctcacacacttttttttttcccttcaaaacgcagtagagacgtacaaattcgttttttttatgggagggaggagtagatgttaatcgtgcgtgcatatttattcatataatacacatgcacaatctacatccctataatcatctcatctcagatgattaggtcattatatcttcatatcgatgaaatcaccataggtttctcgctctcaatggtctacggtttatcacagaaaaaataattagtataaatacgaatatccttatcaagcctagaacttaaactcgaatggacatgtttcactatgagagacctaaccagttgaggtacgtttactttgttcatctcacacatttttgtgcttgagaaaaacacacactagtacatactacatactacagttctcatcccctgaagcaatatttatatacacatcacggtcgttttctggagtcgtcatcgaagaaacacggcgcaacgatctgatcctgacagtgaacggaagaggtaaaggaaagagcaaagggaaattagccaagccaggccaaagccgcccgtttcatctccggcttctgctgatgcttttgccgaaccggcaagcaacacctcgtccgcacgcacaagcaaccgagacgacgccgtccgtctctcgtccgtccgtttcccccggcgaaacggccgccgtcctctttcctcctatcggtccatgatgcgcgggccccaccgtgccgcgggacccacgtgacagagaggagcgggcacgtttcgccgtttctgcacgccgcttgtggacgaggaggggagggagtttccactgaaaccgtgtcgtcgttctaatccttttcccagtgttttgctttgctgatcctcttgcgccatatctttgcccaagacaccctcaactttacattaaatcatgtatggtcacactgctgacggatacttacgattgtttaatttacccaatgggattttaaagcctcttttaaatcacagtaatgaaaaaaaatagaggaatagaaaaaaaatacatgattctaacagaaatataagtgcaaaacagataattgtaaaacatatgaaaaaatataaaaactaccgtttgattgaaccacataaaaaacacttaccatagaatggataaaaaagatagattcaaaggaatctcttgctaacttttctccaaaattttcataggattacctatttcataggaaatgataggatataattcaatccgttgtttgaaagatttttatagtaattatttttcatataattgaaatcctccaaaatttctatatttttttctataaattaaaggggctcttagcttttattgattttctttttgtttctccgggagtctgcaggatttttgttttagcttgtgtacgaggtgatgcctatgatgcacaagctaaccatgagacgccaatgtccaattttcgggcccctttaaatcgtaggaatgaaaaaaatagatgaataggaaaaaatcaggattctgacaggaatgcaattgtataacagaggattacaaaacacaggaaaaacataggaatgaccatttgattggaccacaggaaaaacgcaggaatcagatgagagagatagactcagaggaaatgttccaagaggttagacctcttgctaactttcctccaaaatatgcataagattacccattccataggaaattcataggaattttagaggattttattcctataggaatttttcctatatagccctttgaatcaaaggaatggatcctataaaatcctataaaattcctatggaatacctcttcccatgcaagttttggaggaaatttaacatgaggtagaacctcttggtaactttcctttgagtctatctctctcatccaattcatgtgtttttcctgcggttcaatcaaacgatcattcctgtgtttttcctgcgttttgcaattctatgttttacacttacattcctatcaaaatcctacgtttttcctattcctacgttttctcaatcctacgatttaaaagggcccttaaaggattgaataggattcaatcccttaaaggattgaataggattcaatcctttgtttcaaaggccttcataggatttttttccataggattgaaatcctccaaaattcctacatttttcctacaaatcaaaggggcccttcatgtgctttggagtgtcacattctcaaggttccatactatcatgggttataagcactgaccacatcttagaaaaaaaatactttcatctaatggatttgcatggatatatttcattacttatgtccattatatgaaacaaaccgatgagaaaacactaacattgatggtggagttgaccatgtttaaatcctggttctccacgaatattatgcacgcacggataaggttttcaataggtatgtaagtgtgatacacatgtataaccgagcgagtatgtgttttcattttaaaagaaaagaagctaatggcttaacacctatgcaaatgcatgagtatattaactttccaaatctaaaggtttactaatacgaggtgtaaaacaggcacgagtgtggtgcgggtgtacagggatgtgtatgcatcttccatgtaatcaagaatgtacactggtgtgaatgtgtcttcagtgtaatcaggaatgtacgtaagatgtgtatgcgtcatccgtataattagaaaaaaaaactagggcttaatcagattgtagccaaaataacccttatcaatttttcggtaagttgataatgttaccaaaattttggcaggattttttttatgtatttaccaaactttggcaagaagctaaatgtatacacacctttgacaattttatcaaaaataatataatttaaaatagtatcaatctgaacagcccctaatgaattaacacctatgtaaatgcaaaaagaacagcactaaaatatttcatgtgtaaaacacaaatggccactcgaaacaacctcccagctaagctaagctaggctagcctactattcataacctcaccaccacgcgcgaaaccaaaccacctcgactatttcttctctctctctctctttcccacccatgcctctccctcctcctccaccaccaccacccctctcccctcttctcctcctcctcctcctccattcgccattcctccccgcccagctccccctaatcctgcacgcgcgcgcgtgcggggaggcaatggcgccggcgaaggtgatatcctgcgcggtggtcaaatgtggcgga

SEQ ID NO: 4759 - DNA, 5715 bp, Oryza sativa
tgggccggaatacctgcggattctgggcccactcctgcctctgtggtgcgttgctcacgccgccacgcgggcctcttttgggccgcaagaaagagaggcgagatgggctcctttgctcttccttgcagcggaagaagccgcgggccgtttcctcctccccgagaccaagacacaccaccacgccaccattcccacgcctcacgcggcggagagagagagagagggtgaatttgctagcgagatgccggaagccgaggccgcggcggtggtcaccggaggcggcagccgcgccgccggccccgccgactacgagcgcttcatcaccctcttctccccggagggccgcctctgccaactcggtgagtgcccgccgccgcgacatgccccctccacgccgaccaaattcgctgctggtgtctgcgctttggctaacgatctgctgcttcaattccgccgcccgcctccccgtgcggccgtgctgtgtgctctcgcagactacgcgttcaacgccgtgaagctggccgggatcacctccgtcggcgtgcgcggcgacgactccgtctacgtcctcacccatcggaaggaggtgagcacgtcgcgagagcggaatccccttgtcccctcatttgtgattcattctgcggccgtttgatttgcttcgttcccctgatcaggacaagttgcacgacccgacgaccatcacgaacctgttcgcgatcaccgaccggattgggctgctcgccaccgggatgccaggtgagccacaactttgctctctcagattctcagttctaagtgctgcgtggaacatgcggtgcgcgcgtttggatcccgctggcacaatatcatttacgagttacgaattgcgaattggaggatcactcgactttatcctgccgtagaacgtctcagcgaaaccggttccaataattaatctctgcaactcttggtgttcatgagagcattgcgatgtgataaggatgttttacataccgatgatgcgcttgttcgactggatgctaattttgctgactccctatattgaatcagttttagtataggagtagtatgcacttccaggatacgtcatacatgctgattagatgaaatgttcagtgaatgagtgaaccactgtggtgtgattggatcctacatcctagtagtatgcactagatagaatggaatcttggccttggttgcacaatatactgacttatttggcagtcgatcgcccctttactaccatactctcatctattttgtgtttctgaggttgtaaatggctaatgtgacaatgtgagccagtactgtaactactgtactgagctattgtcttgtttgatttaacctatgtgagacagtaatgtaactaggcaacttttgcttgctaagtaatcaatcgttctatttgactactttcttgtatgatataatgtactgttttgttactaatgcctgataacttgttatatcattctgttggtggacagttccttcagtttagagggagttagggacttctcaattccatagcatgtgatttgtcactgagctctaaatatcttaatatagttctgtttagaattttatggaacagctagaatggctcacatcatcataagaaacactctagaggccaatggcaggacataccatcgcagtatcattttacttgtctgcttgttctgatcttttgagttttgacgggctatatctttattccaggtgatggaagggcaatagctcaggaggcaaggaacgcagctgccgagtttcgcttcaagtggggatataaaatgtctccttgtatgttagctcaatggtaagctttggtctaaatgaaatagatggctcattgtacaatacctatgtcttacaaacatctaaaatgatttgatcatcacgctattttatataatggttatataattatctctaggccgctctctgcttgtagggattgatcatttgccactcccattagaatgtcaaaggatcaatttcgcccattcacattaagacttagtattggatatatgagaaaatatggtgagagttcatatgagatcaacgggctgggaacttttctgaattctgataagcatatgctcgtgctttactatcaaacctacccttattttgttaagctacgtggatacattactctgttcaatcttcaatagcctaacgttgtttactaatttcactgaactgttctgcattttactagtggtgtatcattgcttgtttgtaggattgcagacagagcacagatccgcacccagcatgctcagataagaccttatggagttggttagtgctatccaatttgtgttttgtgagtggtgaaacctgccatcatcgtctaccatcaaaggattacaatgattactttgatcctacacattttcctctgcagtttctatgatctttggaattgatgaagagaaaggaacccccgagctcttcacatgtgatccagctggacaattctttgcacacaaggtattctaggaattttttgcagttcattaaatagctcttttcatcataacacaagttagtcgtgtttttttgtgaatgactacaacaaatgcaaatagcatgctgtattttttttcagttatcatgtgcaactagaaactgattaggtcacagagccactgaacaatctagatggagaaaccaccccataagctcaagcattttctgtatctgagaaacatgaatctcctatgtcattgcaggccacaagtgctggtccgaaagagaaggaagttatgaactttcttgaggaaagaatgaagagcaaaccttctctatcatctggcacaacaaaaggggtgtgtgttactattcttagcaaaccatgaaattgaacttatccaatgctgactagaaatgtataaaatggcattcagattagtgagtaaactaggtaagcattgatctgtaatggaaaaaatgttattgaattttttagttacagtaacatgttcatatgaaatgtgatggttcaacaccaagccacacattgcagacagtacaagatatccaaatctcatacatgcttaaatactagtaactagtatttaacacaacaaaagttcccttttctctgaagctgaatttgagaacatcattattaagggcaccactctgttagttctctttggatgcttaccacatgaagttttagctgtttctttaacaacagagtgcgttttgggatgtctatctgtgcagcatcttcgacagactactgtcaataatgcatgcctgcaagttcttttttccctcatgctgttgcgtatttatttgtacattagcacttttgtagtcacaagccctatccaatacggtgatccaatattttgatcccctttgtgattaatttttactgactttgtttccagttggcaatacggtgatccaatattttgatcccctttgtgattaatttttactgattttgtttccagttggcaaaatctgcgttgaaacatgtcctggagggggatttctatgcccgagaatttgaggtagtgctcattcttagccctattgtagatatgttctgtttgcactcactattgttaaataaaagagtgattttacggttcttgaggagataccgaaagataccatattttctagtgtaaaatttagtacatcccagtgtaaggtaaaaaaaatgtactaaaaattttggaattcttaaagaatgtaaaacttctctaaataaaacgttaagaaatatttgcactgccattatactgaacgacgcaagtcaaactttcttgtcagcttggatttatcaagaaaggggatccaactgtaactctgcacccagtgaaattcaagcgcacgcggaggtgaaggacgagagcagaacaaagtgctcgatataggacgatcaccagtctttcaaatcttttacagcatggaagttatgcaaaaccattaccgctaactgattactgtacgctatagctatatgtatgactgcgctcaagctgtgtcaagtgtcaattatgagttgcccccggatttacgataccaactgatgatcacacatcaacacttcaaactgtaactgtctacgaaggaactgcatcctcctgctcccgtgtaaccttagccagggataattttcctatgaagttggtcgcaaggctgccgaggaagagatctccgttgaactctgtcaccgaagtgaccatgttgatcacattcccttcagagtcaccaagaaccctcacgatctcgccgttcaacgacacctgagccaccactgctcccttgagcgtcgccttggtcctctcgacgagcgccgggaacgacgcgatgaccctcctcgtcaagctccagcgagagatcaggtccagccatggagacctcacctgcagtttgagcacagaaaattgtaagtttgagcactgaaaatgttgtgtagatgcttatggcagcagaaaggttagagagcagagacctggagaagggcaatccagaagtgaccatctgaacccagccgaatgttgtctggattccccggcaggttgtccacgaagatctctgcctccccagccttctcccctttcagccacactctcaagcatctgaacctgcacttgacaatatcacttcatggtcacttgacgatagagtgaacagactcttttttttatgagcaattttaccgttcttaaggagatacatgagatactattttttttctattttaatttgatatctctttatatctagatactataagataccaaattttatactaattttttttacctcatggtacatccttatgaaccgtaaaattactcgttttttattattattttagataagggtattttctatccagattctacatccaatcagatatatgcagccatttaaattaggaacttagccccacaaacaatccaatctgaaattcgttcctaagaagatttgcactcgtaaccttaaaatgttactcaggtcactgcacgtgtcatttcacagatgagaagttgagcttgttactacctcatcgtctcgcagacgacgacgaaggcctcgtcgggcggcagggcgacgccgttggcgaagccgaggccgtcgagcacgacggaggcctcgccggtgcgggggtcgtacttgagcaggcggccggtgaagcggtactcgaagaagtcgaggaaccagttgtcgaagctgaacctggtgctggcgtcgctgaagtacaccgtgccatcggaggcctcgatcgccgcgtccgcgaacctgaagacgacgaacggagaagaacagtagagaattcgcagtcgcagttacagatttgcactgtgcaaattgcatagtagtttgcagtgaaacaagtaatttgcaggaagataacctgatcgtggagccttcgacagtcgaagcaagaagcgtcacgcgtccattctcatccactttcaacaatccctgcagattttaattagtactccctccgtccctaaatgttgacgccgttgacattttttaaacatatttaaccgtttatcttattaaaaaaattaagtaattattaattctttttctatcatttaatttattattaaatatatttttatgtatacatatagttttatatattttataaaagtttttgaataaaacgaatggtcaaacatgtttaaaaatactttcttatttagggaacgaggg

SEQ ID NO: 4760 - DNA, 25460 bp, Oryza sativa
gcagctcctcctcctcccccgctggaggccgctgtcgtcgcccctgtccttcgcgcgacccgccacggaacgcgtggccgcgaggcgagcccgcgccgccgccgtggcgatgaagttggtggaggacgccacccctcccgcggcgggggcggtgcttctcgccggggcgcagtcgaggcacgcgatattcagggacgagctcgtgaggagggctatatacgccgccgaggcggctcaccgcggccaggtgttcgaccgtatcccaccctccctccctctcgctctttagcttctgacatgttgaagtgaccgaagctgcttgtgtgtgggggtggggcgtttggtttcctcagatgcgcgcgagcggtgacccttacctgcagcactgcgtggagacggcggcgctgctcgcggagctcggcgccggccccgccgtcgtcgccgcagggctgctgcacgacacggtcgacgacgcaggcctcggctatggctcactctccgtccaatttggcgctggtgtcgccgaccttgtgaagggggtaattatttcgatgattcgatctctcgatgattcgatctccttagctactactaactgttatttggatgacatgagcatatgcactagaaaattatttgctgggagctattttctcttgcaaaacttactgaatgtaccaaattgattccagcatgtcaacaacattagtaattagcagatcagatattttattccttgctcaactatttttgtaccatcatatgatctgcataaatttccctatgtttgagcatagtataatctgagctgaagtgcaagattagatgacaaacggctgtacttctatgataagtctttgtatgggccccctcttctttcatttttgatatttattggacttgtcaatttcctgactaggaagtggccactgctagatcattgatagcgaccgatagaactttctgattgttactttgttcattggggcttctagattatagttttttatgcctttctgaggtgggtactgagtttccgtcatctctttattatattgagcagagggaacctgcttgtattgacttgtacttcagtattgtagaatctcaacagattcctggttggttatcagatccaatcagcgtggtacagtttggtgatttttgttgcctgctcttttcattttccctgtttgtggatgggctattaaatgtatgatgctttactattttgttgtaacttggggcactttttttttcttttttctttagataatggaagctttattaagacttagtcaaatacaccaagttcttggggcacttatatatgtttagtaagcatggctgttgtctgagaacattgcgaattggctgcaatttaagttctgctgccttttctgtaggtttcaaatctaagtcatttgagcaaactggctcgtagaaatgatacagccagcagagtagatgaagctgacaaattgcgtacggttttccttgcaatggaggatgcgagagcagttctcatcaaacttgctgacagactacacaacatgaggacgttggattctttgcctaaggtcaaacaacagtgctttgcaaaggaaacgctggagatatttgctccgttggcaaatcagcttgggatcttgaattggaaggaacagcttgaaaatctgtgcttcaagtatctttaccctgagctatatgaggaactgtcatccaaccttctcgagttctacaaccaagatatgattgcagctgcaataaggcgactggaacaagcccttcaagtgaggggactatgctatcatactatatcagggaggaacaagagcatgtacagtatctacagcaagatggcaaggtaatctcgtatattatactccttttgtaggcatgaccagaatgaatcaaataattgcacttattttagttatattatttatgttgttagacaaactaacctccattttgaccaagtcaagcacaaaattcaacagaacaccctgaggaatgcttgctatcctgacatttatgtacatatcaacggatatgctaatgggatttacttgattataggaagaaactggacatggatgaaatctatgatatacatggggtgcgtgttatactcgataacaaagctgattgtttcaccactttagagattgtccatcacttgtggcctagaattcctggcaaattcaaagactacatcaacagccccaaacccaatgggtaagactctgaaaactaatactattatgcaaaaaaaagagtaagtcaccgtgataactgtatgcttgctaacttgtaggtatcaatccctgcacacggttgttctcagtgaagaaacactgccattggagatccaaattcgtacgagggacatgcatttacaggcagaatttggaattgctgcacattggagatacaaggaagctgttcgaaattgttgttcatctgttcctgaaatggtggaatgggttagatgggttgttacatggcagtgcgaaactctgcacatagatcacccttcctctcttacacatggagctccaccaagggcaatatgcagttgttcttctcagtctgatgactgtcctttttcgtattcaaaacgatgtgaccacagtggaccaatcctagtaatattactggagaatgaaaaggttggtaaccttttaaattatttgtatgttccaatgtttttttttacctgttgcctacctggtattgttgttgagcaaggaaactaaatttctgaatggtgctttcagatgtcagtgcaagaattccctcaaaattcaactgtactggacctactgaagaggacttctagctatgacatgcagttgaggttaagactgaactgccatgtcgtgcacaacttgaaccaagagcttaaaatgggtgacgtggtcgaactgatccctttggctcaatgcaatcctggagctggaggttatgcgagggagttccaccaaatgtatgaccaccggctcacagtttcgcagtcgtgacaactctaggataccaaaaactatgtacatatatatacatgacagattgacagcccatcaagatcgtcggaagtttaggtttccctttactgacaaatagaagcactactcgggaatcatctgaaaaagatcaaggaatcgtttccctgtgccaaatgcgcgcgcgtgtgtgacatatcttttacatttgtgtttgtttatatgttaactaaagaggagtagagtgtcaatacgtgaaacatttctggagttttagtccaagaaatgatccctgtttgggacagtgtatcattgtaagcttctatggctgtgcaatgtgtgacgtttcttcaactgaaatatatgaaaatatatgggtttcctgcctgcatctgcttgctctgactgatatagcatactacttactaacccagatttgaagtgcagctgagtttaaccacttactgtcacatggaacaaacgaaaagtgtatcattgtaagcttctatggctgtgcaatgtgtgacgtttcctcaactgaaatatatgaaattatatggctttcctgcctgcatctgctattctgcttgctctgactgataaagcatagtactacttactaacctagatttgaagtgcagctgagtttaaccacttactgtcacatggaacaaacgaaaaataagtatagggagaatagatagggagaaaggagaaaaaaaatataagtaaagggagaaatagatagggataaaggagaaaaaaaaaagtgaaacgacgcctgagagattcgaactctcgcggggaaaccccatgtacttagcaggcacacgccttaaccactcggccaaagcgtcgtgtgtgcttgcttgcacagcaatactttctatagcatgttcaaacaaacactaactcactaaatagctctggattagcacttaacgcattctcaattctggttgtttgctttacaattggtttgcacttggcagattctcaagacattaatctgacgatctcagaacatgctccaagagcgtcaggcggggaggaggaggcgacgataacagttgaagacattgctttgcttctcccatttattaaaccccattggtttggattcagaggttaggacggagatggatagagattagggaaatcgcagcaaggtgaggaggaagaatagggctaaagatcatggagacaacaaagctgaacctagaagaagagatgaagcgagcaacaggtacgcgagcacaattcatcgctggactttgcgcttttggcacttacatttgaggttgctgctggtgctccagactgtcagcaatgtgtagtacgctggtgtgttcttcgtccagagggtagacttcgagtggttaatggacggcacatttcagattttcactcagcaaatcctcttgatcgcacgaagtacgaaccactattctgcattccggacatctcctgtttggctgtctccatggcattagcggttcttcctcctcaccttgctgcgattatctccgtcccagcctctgaatgattgttaatccaaaccgataggtttaaatggcagaagcaatgctttgtcttcaactgttatcgtcgcctattgacgcttctggagcatgttctgtagttctaggatattaaggtcaccttaaatactaaaaaatggtttgcaaaattaaatgtgccaatgaatcgtagaacaaacaattaaaactgctacatgactgtggagtaccattgtttttaaggtggttttagaagatacaattatagctaatttgcgaacagaagcaaaaaagacgctttggccgagtggttaaggcgtgtgcctgctaagtacatggggtctccccgcgagagttcgaatctctcaggcgtcgttaattttttttcctttttttattttctcctgtttatatttttgtgttagccttttcctgtttgcattttttttggggtgagatttcagaggttaatgctcgtctagacgtctactctgtcgatgtgagactgacttgtgatcatctgttaaattgttgatccttgtgggatgtcaatgtgacgattttttgtgatcatctattaaactgtcaatccttgtgggatgtctgctatttctgtgaagtgctcccgaccccaatagatgattgatcggtgttcggtggtgggggttgggaatcatcacccacgcacgaaaaatggagtgatttattagcgcgtggttaattaagtattagctattttttttttaaaaaaattgatcaatatactccatccattccaaattaatctacatatttcataggtataccaagaccaagaaaagctaataactctctcatactatatttactctagcaacaaactcaatgcatgcaccatccccaatatttcctagccaataataaatcaaggtattgtatatgtgttataaatacttgtgtgcatggaatgcatgcatcaatgtccatttactccaatgcacaaataacgaatagactctaataaataaacacaaatgtgtagatcatttaggaataacctcaaaaaaaactatatgtagatcgatggaatggagggagtaatattttaagcaactttcgtatataattttttttgcaaaacacacgacatttagtagtttgaaaagcgtgcgcacgaaaaacgagaggggagttgggaacggctggtatcgaaaacagcgagtcatttatcgtaactcacgaacttaaatcaaacggttaagattttcctttaaaacatctctagcacttctcacttcatatggttctcacagaagaagaaacaaagagtagaaaataaaagagtcatttatcgtaactcccacgaacttaaatcaaacggttaagattttcctttaaagcatctctagcacttctcacttcatatggttctcacagaagaagaaacaaagagtagaaaataaaaaaagaaaacaaaaattaacgacgcctgagagattcgaactctcgcggggaaaccccatgtacttagcaggcacacgccttaaccactcggccaaagcgtcgcttgtgaatgcggaaagcaacaaattttacttgtttccatccaaccatgcatatacccgagcctcgaatttcatttttacctctcccgctcaaggggacgggagtttgatccgtcactctagatcctgacctaatggacaccggcgccgaccaggcaccacctcctcctcctcctccccctgtggcggccgcctccgccgccgccgacgagccgcgggacctgcgcgtggtgcgggagatcctccactcgctggggctccgggagggggactacgaggaggcggccgtgcacaagctcctgctcttcgcccaccgctacgccggcgacgtgctcggcgaggcgaaggcgtacgccggccacgccgggagggagtcgctccaggccgacgacgtccgcctcgccatccaggccaggggcatgtcctccgccgcgccgccgagccgcgaggtaattgatttgagcccgaagcccctcttcgcttttgtggaattttttttcgccggtgttgtttgctgcggaggacatcgaattttccatcgtcggttgcgaaatcgtcaggactgcgtggtttttggggttggatcttgcggttttgtgtccaaatcggagccttttagtcttaggaataggtgaatttctgcaaaaacggaatccttttgccttcggatcaggggatttgtgctatcaaggcagctcactaaccctttagcctttggatcagtgtatgttatacagatacgccatttgtagactaagacccctttaattctaaggatttattgagaaacttcataacatttgaaaaaaaaaacatgttacaaaagcagacactcattcacccctatgaacacaaaacctatccttatgaacaccccctaaaagactgaaccggcatgtgttgtgattcatgaagtcaccacaaagatgtctcgctatcaatggatatgttgcctatcaatgaaagaataattaatcataaatgcaagcacatgtaagtctagaacttgaacctgggtaggctgattccaccacaagaacctaaccagttgagctacgctcactttgctcctatttggccctttgatataaaggattggagctttttaaatcctataaaattcctatggaatgacttattacatatagattttgaaaaaaattagcaagatctcatatctcttggaaaattttcttcgagtctatttctctcttctgatacatgcatttttttcttgtggtttataaatcaaatgactattcctgtctgttttcctgtgctttatactttcattcctatcaaatttcgtgcttttcctattctccgttttttaatccaatgtttcaaaggagctttaataggtgtggatggtatacttttttggcaagaagatgatataactaaattaatgctgacaagattttttctttaaaatacttgagcttctaaccctacttaattgtcgagtgctctccaaaattcacaaagccgcaataccaaattggaaaccgctctttagcagttttcttggtttttgtgaaaaattgataaagaaatgatgaaattcagatatatttcatttaaaattggaaattcacttggttttctatttgactggttaacaaagctgttttgttaactcaagccagttcaaaacctcaaaattgcatgaaaatcaagcagtttttgttggttttgtaaaccgtgttggtcccttttattaaattttaatgtttctttactcactaggaagctcttcttttgagagcgtaggctagttcctctaaggttagttacaaggtggtgataggcatgtgaatattggataagcaagtcgatggcattgtctaaggaggaaatggtgtataaggcgacccaatggagaggaggatgaggttggaatgtggtagaggaggtcgggatacaaagaagtaggtaatagttccaactgaggatatgatgaatgggttttatggtggtgaagaagtatgcggcggaatctttgggcagcaggatgtgggagataggatcacacttgggttggaggaggttgatgtttgtggcaaaaaaaaggagcattgaatgtggctctggtagcaaaagaagaagatcaatcacaagcataggtaatttgatggcatcaatcaatgtaaaaaaaagataaaatagcatatgagagggcaaaataaggaagtgaagctagaaaataagtgcaacaaaaggagaggcaattttttacaatggaaaataaggggcacggtcaattatagaggaaaaaataactctatattacttatcttttttttaattcataaacttcataagtagagctaaaaatatgatatgatgttttgggggttatatatgatgttttttagccaaccatacattgtcatgtcaatcctagaagtctcttatctattcttgttcaaattgaattattttgcaacgtagaaatgctcggttgggcctatacaaggtcgagaaagtgacctaaactagccaccctaacatttctattatattatgcaacaaaatcatcttaagacaagttgtttttttcccaataagccagcccattaagggctttttgtgggtctattcttaaggaattttataagatcctatgttcaatcattatttaattggttgctataacgtccatatacacatgaaaaaattgtcgtaacatgacggatatcttcactttggacaggagatgcttgatatagcacataaatgcaatgaaattccaatacccaagccttgtgttccttctggatcaatctctcttccacattatgaggatatgctattgaacaaaaaacacatatttgttcctcgagtcgagccaacaccccatcaaattgaggaaactgaagatgattataatgatgatggttccaatgctaatgttgcctctcccaattccaattatgaccaagatctttttggatcgatctctcttccacactatcaagacatgttattgaaccaaaaccacctatctgttcatcgagtggagccggcacatgatcaacttgagaaaatcaaagatgatggttccaatgacaatgctgactcttctcattccaattatgtccaagattcttctggatcagtgtctcttcaacatcatcaggatatgtcattgaaccaaaaccacctatttgttcatcaagtagagctgacgcttgatcaaattgaggaaattaaagatgatggttctaatgacaatgttgactctcctaatttcaattgtgtccaagatccttctcgatcggtgtcttttccacattatcaggttatgccattgaaccaaaaccatctatcttttcatcaagtagagccgatgcttgatcaagttgaggaaattaaagatgatagttctaatgataatgtcgcctctcttgattccaattgtatccaagatccacattatcaggacatgttattgaaccaagaccacctatctgtccgtggggtagaaccgacacttgatcaagttgaggaaattgaagatgattgttccagtgacaatgttgcctctcctgattctaattatgacaaagagaagaatgacagtaacaaacagaagccttctaagaaggtttctcaactcaatactttggttgctgcaggtaaagacaaagtagattgctcaactgaactttcttagatgatcgtccaatggatgaaccattccttttcttttgaaacatgcacaatttttaatcttgcatttttattgccttttattaaacataccatgtgcctaattttagaatttaatattctcatcatagcctgaaacattgttgtaaagattttaatgcaaaacatgcatgtcttggtattgggtctatgtttgaattaaatattgtattacatggttactatagttatcataagtagtcatatatatggtcccctatgcccttggggggttgattttggtttccattaaaatctacatatgatgaaaacttgctgagctttttagcttgttttcatatcttatttaattatcacatgagcataatacatattgaataaaaaaaagcaaaatatttattggtaatgagtcgcatgtctttttgtgaagtaccacagttgttccatttgaatattagaatctacaagtttcatgaaaactgtgttgaggtgagcaaaaatactcaaaataaaagtgttgccttttgggttgagttaatgcactaataacttcaaagtaaggatgtgtagactggtcaataaccggctactagtgttgtgtttaggatggagcgttcatcatgttataaccaatacatagtttgtctagttacttaagaaggttctaaacatgaggttaaaggtgatcttagcaacttatgcaatttggtctagatattgaatgattttgagtggtttggatgagcattcatacaaacttggctgagaaagtgctattataggggagggttaatgcaagtaatgttgcatttcgacaagcgaaccaaagagacgatattctaaaatctaggaagccaatatgaggaaatgttgagtagtggcgtacaagcaaccaactagaaaagaaagatatcttgaaagtagagtgatcagggtcgacattgtgtaggaaagattataatgaaatggaaaacatacgaagaaaaactaggtagatcacgagggtgaaaaggtatgaaaaaatggagagagatagagggaaatgtgctaatagtagatgaattgttgtgacatgaccttgtcacatagaattgctagggcacactatatttacatgccaatatatttatattgcattttcctacatctaagtaattagatttctcgtacaattcatacttgggtatgatattctcatggatagttggggatgtcagcaatctatagcttacacggtcccttatgaaagactctattggtcttattgtgctccttgtgagcacatttggatacacattcaaatagattaagataactcgatggaatgtataccctcaaattctttttcgataatgtaatcaatattaccctattatttttctagcatgaaaatctcagatcaatccaaaaccatgtccaactcaatagttatatatcataataatttacaactcgtccactcataaattatatttttttaaagaaccactcaccatcccttccctcctctttttcatatttgtatccaataaacaccttgcccattctcttgctcatccttctgtctgtttgacagattggaccaatttatcactcgtagttgaaaggaacaagagcgatttaatgatatcttatcacttgtaattggacttcaagcctctttttttagaactacttcaagcctaccatcatcgagttatgcctggtgtcgtggcagctcggtagagccatgatatcgactgcgcagcattgtcacgtgtgtcatggatctagctagcctgcctttggtgtgttggtaaggcttgaggccatggggctgcgggttcagctttgtggtgttcttgaattggtggttatgtctggcacatagggtggttgtgtgtgaggatttgattgtggaatgacgaaagctttgtcaaattcttgcaagctttgatgacggcaacaatcttgagcgtcgtcacgacatcccatttctccacacaagtttccatattagaatcttggtccgatttcccaaacaagcaacggcgacgtgagcgtccccatggaattgttgctttggagaatcttcttcctatgacagtggccattattaggaacttagtggcatcttggaccatcttgtggctagggttcaccttttcgtatcggaaattatacccgcttatcaacggtttatagaaacccgataaaaaccaacaactttcggtcaacacggtatgaaaaccagctaaaactgaccggttttgaaaacatagcagtgtgcacgtgttttccgtgtaacagacaaaacaaattaggtctaatgtctagtttcacgtaaaaccgttttgttctatcttcttgatgaaaaggctatcttttgctatttaactttggaaattgctatgcatatgacccaactgtccgactcacgtacgattgaatttgatcaacggttgtaaacggctgcagtgtatatgaatatgctatcatttgattgatctataattgcttgtctctagttgtacatgagttgtacaactggatctcatgagcaattttacggttcttaaggaggtaccaaaaatttagtataaaatttggtaccttatagtacccaggtatcaaaaggtattaaatttacaatagaaaaagtgatacctcatggtacctcctcaagaaccgtaaaattactcggatctcatacatatagcagtactcttttactttcctccctgtttatccctaattaactttacactgttaggcctaattaattttctctacattcgtcccgactggattctcaagtagacgacatgcgtacgtagcatccaaatacacgactcgtgcgcccgtaagacaccaaactcccctcttaaaacgacgcgacaatcacaagccgccgcgcccctgcactgcaccaccctctcgccgccatgccgtcgcttgggatcgcgccgctgctcgacgcctacttccgccgccgcttcgccgcggcgggcctcgtccaggcgtccgttccgctggacggcggcgccacgacggtgcaatgctggcgcttcccgccgggggcgagcgaggagctccccgtgctcgtcctcctccacggcttcgggccaccggcgacgtggcagtggcggcggcaggtgggcccgctctcccgccggttccgcctcgtcgtgcctgacctcctcttcttcggcggctccggcacagcggccgccgacgcgcgctcggaggcgcaccaggccgaggcggtggcgaagctcgtcgccgcggtcgtgggggcggcggcggcgcgcgtgtccgtggcgggcaccagctacggcggcttcgtggcgtaccacgtggcgaggctgctcggccccgcggccgtggcgcgggtggtgatcgcgagctccgacctgctcaaggccgacgccgacgaccgcgccctgctccgccgtggcggcgccgagcgcgtcgaggacgtgatgctcccgcgcacgccggagcggatgcgccggctgctcggcctcgcctaccaccgtccccgccgcttcagcttcaccccggccttcgtgctccgggacctcgcccaggtaacaccaccaatccaatccaccatacattgctgcctacatttgctgaacaaactcgaacaagttcttgtgcttgccatgatgccatctgacatcgagatcaagtagttcttggatcatctggatgatccgtgatgtcacctcatggaagtgtgacgtagcactgtagtatcatacaacaactgattgatcactgaatcgtcgaaagagatatggtccctgaattcccaaccgccttcgtagctagctagcactagcagtcactcacctgtcaccaactcaccaaccaatcatccctggatggagatgtctccctcaatttcccaaccgtttcgccgttcttccaatcaattcagagtttcagaccgccgttcgatccagcctagcttttccagttagagacatcctactgtttttgtgtagttgacaagcacagaggcactcacactgtgtgaatgtaattgccatctttgccaggctaataatcttccaatcaaggtgagactgaatgaactctgcgttttcctatctgaatttcaacaaacaacaggcctacctgtcacctttccccaacctatccgagctggattctcaaattaactcgtcgtcctttttcacttttttaagataaaatgccttattcattaattgttcctgagagtcattatctttgctgacagcctcttgactttagtaccagtaacttgttctctaaaagaatataagaaatagtaacatttaacactgttgcagtatctctacaccgacaaaatagaagaaaagaaagagctgatcaaggggataacactgggggacaaagaaaaattccagctcactccacttcctcaggtatgcatagcatttagcagctgacaaataattacagaagtgctttacttgccaagtttacctttatcaaatgtctctgtctgtctaatctttcaggaagttcttgtattatggggagagcatgatcagatatttcccatagagaaggcatttgaagtagcaaggtcagtacttattccttctaatataattgcattattaatacatatgaagcaaaacttttgccctctttttgtttaaaaaaaaaacagtagaattacatgttgaagttgcaccttgtaatgttacttacacaagatgaattaacgcaaatgcaggcaacttggtgcaaatgctaggttggaaatcataaagaacaccggccatatgccacaggaggaggacccgaaacggttcaatgaggccctcctgaacttcttgttaccagctccaaattcgtcgttgtgatggggatatcaatgccaacttcttgagcggctatctgtggagagtacttgatctaagttgtacattgtcttatggcacagggtaaaacttgtaccttttgagataaaagtgggaaatatgatatagagtatatgcattgtttttcttctcatatacaaaattgggttgaatcctctgcacttgctagtttctacagtaaaataaggggggaaaatgaagttccctggatttaataaggggaaaaaagccgcctctaagaatgaggggttacatacattaaaccaagcactggtaaaaaaattctattctgcgctaacttatgcgacgcctgatttgtcggacccagccaacctttacctcctgaagtaagaggagtttcgctttgatatcttgtgctaaggctccataagctgatctgttgagatccctcccctcaagcattctcactacatctggattgtctgtctgtccgactgtccctaggtaacactctgacttccttggcctgtttcaattgctctcttgcatgcaattagctcagcaaagcaagcatcctcagccgggatgatggaagaagttgtcctgcaccggatcggatcgacaagcgctcttggcgcgggtggtgatcgaatacgctctgctcgggtgcggcggcgtcaagagacgcgatgcttttgctgacatgatatgtaaacgatgcaaaatcgtattagtgtgatcattagggaatgaagacaaaagtgcaattaaaatgcttgtcagcatcacctctttctttctttctgactagctgctttttgtctgcaactcggcttgacgcattgctttgtcacgcattgagaatagttcccttctcctctgttctcatccaaagaatgatgaaaattacattatgttccccccaaaaatatggtgcagcttgttggaaagatttatgcatgaagctaagccttcatccacactatcttatgaggattgctaccgtccagcaggttgtaccgggcggtactggtaccgcgcggtaccaagacacatctaaccgttgaatccgggatgggtaggatcgggagagaaaagatgagcaagggtggatgagggagtacctgtttcgagtcgtcgttcccggcggcggcggcgtccaagtcattgtcattcccggcggcggcgcagagcaacaagggaacgctggcagcgcgggagaggataaagtctggcggcggcgcgagagagaaaaaagggaacggcggcggcgcgggagaggaaacaagtccggcggcggaagaggaacaagtccggcggcggaagaggaacacggcggtggtggcgaggaagaggaacacggcggcagcggcgaaaatcatccagcttcgctagggttcaagccgctcgatctcgatccagacccatctattgcacgcgaaattacaatactgcccttccaccgattatcatcactcggtaccgcttcggggacaaaactggtaccccgcggtaccgatctacgccagccgttcgatctgcctcgatccaacggtcaataatcggtaccgcaaggtaccgttggactgtaaaaatcctcctatcttataccacttgcattggagctaagcttcagcgagttcggtttaggattagactatggtactacaaagagtgactgagtgaagcaaaatccaaacagcaaaagtatttttcatatgtactagttacacagaggtaaaattaatgcatctcacagtttccttgaaaaatgcatcttgaagctaatgctaaagcattaaacactcagggttttaatgttcatgcatgatacagcttttctttttatcatatgcagttaatattaaacaagaacaacaaataataactaacaagaacagatagtgtcacacagtattgcaatgcacatttctggagttactttgtatttctctttttgaaactaaagagtcagtgcttatatatttgtataaaaaaaggattgcacaaataattttaggaagacagctagaaaaaaaacaaagagatatgtgcgaagaaagaattgttagctgccagttccaaatggctaatagagcaactgataactaattagactgaagaaaagagcagataacattgcctacagtgctcctacggtgcagtttctactttgctacgactgctgtgcaatggcttacgactagccaggagagatcatatcaaactagaacaactttcatcaattggaaatcgaaaagccaattcgctaattataaagcggcatatatcatgcgaacttatagataaatatatgattgcaggcttccaaattaaacaagatctgatactccttctagtggccatactgaatgaacaacaatacttgcgcagataattagggatagacattgagtaccttcttcacggcctcgcaggcattctcattatggcgaatatcgttaccccgagcaatcatagtgtggacgtgatcgagatacccctcccagtgtgattcatcagccagagtacccagtccgtccaactcttcttggctgtagtccgcgagttcgttaggggctaaaggggcaagtaaagagcttcgcgttccgcgctcggcgttgaacttgtcaagggccttgacaaccttcttgaaattctcataccgatgagccttctcctcctcggttctgtatctccggccgtgctcgctcatccccagtcctcaaattttgccttcatggtcacctcatccaccacattgtcctcctcggcggcatcatcgacgacggcctcctccttgtcggaacacttcttgtcatagagtggtttccccccatggttcatttgggagttgaggtaatcgatgtagtcaagataggcaaatgtgccatctttcctggtgaaccttgccatgacggatggctcgatcacgtccctccaattaacagtcacctcctcctcctccttcctggtctcctccccggctgctacaggtaggaaacaaattgaagctagcaacgacgaggaaccgaatctaatctaatctaatggcgctttctttcaagaacaaggcatagatagatacctgagtcatctctatcttgcttgaaatagaggaatccgagcagcaatccagccaacgaactcgtcaaggcaagaacacctttcactgcgccacggccgacgccgagatccctctgcgcggagatggacgggagcgtgagccgctgcgcgcgagtgaagaaaattttgatctgagatctgggggaaacgggagagcgtggtgctggactactccccgccgtcgccgccgccgccgatcgctgcgcctgcgcgctgcgtgcggagaacctccgggtgaggaggggagcaagggcccggaggaacatggacatggcctcgatcgatcgatggaatcgctcacctccgccgcgcgtcgccgcgatttctagggtttagtgtttgacggacttcgccgcggatgcgcacggtgtcgaacggaattccgacaaaatccgatcaaattttgtcacagtttaaaactcgatcagtttgaactttgaagaggtcgcatgggccttgcgcacgcgcaaaattgggggccgggccaagctctaggggttacaaccatccttatttgatgggccaatatgggcttctaccttttgtctgactgccaactaaatgatattgggccgagatgttctcctactagaggcagcccaacagatttatctcgaccgaacaaattcgatccgacggttgaacagatttatctcgtccgctgttacattgttttttttaatggaaaaacctgtcacattgttcagctcatttggatattacatggaaattttctggcagtgatgagtacaatcatgtaatcaactgcactaattgttcttgagagtcattatctttgattacagcttcttgactttagtatcagtaacttatttatcaaaaagaatgagtaacagtaacaggtaacactgtgttgcagtatctctacaccgacaaaatagaagagaagagctcatcatcaaggggacaacactgggggacaaagacaaattccatctcgctccatttccccaggtattccatagcgattagcagctgatgaataattacaagagtgctttacttcccaagtttacctttatcaaatggtctttgtctgactgtctcacctttcagcaagttcttgtattgtgggggagagcatgatcagatatttcccatggagaaggcatttaaagtagcgaggtcggtacttattccttctaatataattagagtaatacatactctctccggtttcacaattctttaagatttgaaccacataatcttcaaaatacatatttaactataattttctattataatatttataataaataaatatattttacttttattataatactttgtaatgttgttttactgactttgaactaagtacttttaatgttattgttcgttaatgatataaaagtttgaatttaaccctgtccaaaacatcgagtattatggaacatgatagagtatgaagcaaagcttttgctctctttttcaaaaaaaaaatattaaaataattgcaggggaattacatgctgaggctgcaccttgtaatttcacttacacaagatgaattaatgcaaatgcagaacactttcgtgcgaatgctaggttggaaaatcataaagaacaccggccatatgccccacaggaggacccgaaacggttcaatgaggccctcctgaactcttactaccagctccaaattcattgttgtgatgggatatcaatgccagcttcttgagcggctataagcacttgatcaaaatcatatattgtctaatgatacagggtaaagtttgtaccttctgagataaaaatgggaaatataatatagagtatatgcactgtttttgttctgatatacaaaattaggttgaaatcctagacttgctagttgatacagtaaaacaaaggggaaaaatgttctctggatttaattttgagaaacagctgcaccctttattagtggttgtaggcacaataaaagactaagaacgagggggtaaattaaaccaaatactggtaagaattttctatgcagctattctgccgtaatttatcgctgcctgatttgtcatttgtcagaccaacccaacctttacctcctgaagtaagaggagtttcgctttgataccttatgctaaagctccatacacttatctgttgagatccctctccagaagcattcacgtactacatctgcaattatgcattgtctgtctgtctctacgataaaccttgacactccggacttccttggcaagttcaattgctctcgtcaagggacacgatgattttgctgacatgatctgtaaaagaagcaaagtcgtatcagtttgatgatcattaaggaatgaagacaaaagtacaaattcaaatgcctgtcagcatcacctctttctttccgactagctgctgtttgtctgcaactcggtctgacgctttgctttgtcatgcattgcgagtagttcccttttcttctgttctcatccaaagaatgatcaaaattacacgatgctccaaaaataaatatggtgcagcttgttggaaagatataagtatgctttaagctaagccatcattcacagtaaaagtagatcatttgcatttggagctgcagtttaggattttagactatggtactacaaagactgaggcaaaatccaaacagcacaagtgttattcacatctactaattactgtacagtttctacttcgctatgagcctatgattgctgtgcaatgatgacttacaactagccagaatatcagatcaaactagttggtatctgcttctcgaatataacgaccaatagccagaacaattttcaccaattggatatcgaaaggctaattcgctaattctaaagcagcatttatcacgggaacacatagattaaaatataattgctggcttccaaaacaaaagatctgatcctctttatagtagccatataccgagcaatcgcagtgtggatgtgatcaaggtactcatcccagtctgaatcatcagccatagtgataccaagtcgctcaacctcttcatcggtgtagtccgctaattcggtaggggcagctaaagggcttcgcattccgcgcttgatgtttaactcgttgatgcccttcatagccttcttgaaattctcataccgatgagccttctctttcttggttatgtatatccggccatgctccttcatccagtcttcgaattttgccttcatggctggctcatccaccgcgttgttgccatcctcgtctgtgtcggcggcatcagcatcgacgatggcctcctccaccttgtcggaacatttctggtcatagtttggtttccccccgttcatctgaacgcggaggtaaccgtagtactcaggataggcgaaggtgccatctttccttgtgaaccttgccatgacggatggctcgatcacgtccctccactttacggtctcctcctccttcctggtatactcccaagctgccacaggtacaaacaggtagggaacgaaacaaatcagtgtattgaatagtaggctaagacatttaacggtaacctctctcaaacagtttgttggcggatggcatgagtcccttcgaccgaatctgccgaaacccatggcgaagaccacgagccaaggatgatgcgaggcgaagggtcgcacgagtgcacgccgaagaaggacgacttcgccatgccgaagaaggacgacttcgccaggaccggttcgccccggcatccagcccagagaaggacggcttcgccaggtccagttcgcccccgcgagggccgaagtagccttctcggcccaccaagcttagagaccatagggccggcgatcgcccgatggcccatcaagagcccatgagcccccctttacgttatgtaaccctgtaaacgtccctttcataagggcaactatgtaaattcctcagtacaacctagaccctagaagtgagaatctgtaacggggctataaatagccccctagggccatgtaatacaggggagaaaattcaagaaatcaatatacttcgtttctttccaaccactgttaagtaaccacgtctttcgacgtatgcggttgtcgtttcgataacagctggcgccgaccgtggggacctccgagcgaaaccactgagagcgaatgccaccgaagaaggtcgtgaaggagaaggttacaaggcgaaaggaaagcgacgccggggcggacatggccgccgaagaaggagcggaaccttcggcatcaatcgccgaagtgggaggagccccgtccgcttcggcaccggcaccgtctgcttcggcgctgatcacagcattgctgccttcggcccctgccacctctgagcaggcgccaagggtggatgaagtggcgaaggcggctgcagcggcaagggcgcttcagaccagggcggagatcctttcggcaggacagctgctggtgccccctgccgctccgtcgcagccaacagtggcccaagccgcactccctgccgtgcaagttcaagtcaactccgaccctgaaacacaagccgaagccgatatggaaactattaggcagaacatggcacgactccaagacatgcttcgccaaatgcaagaacagcaacaagcgtacgaggcggcgaggcggtccagggtcccttcggcaccaatcctccaatattcggcagggtatgtcccgcctcaagtctgtccacaagtgcagtcccagcccgttccgccgcaagtctcacaggcatcggtgcacttcgccgggcagccggcagccgcagcagtgcaccaggccccctatggacaagctcagcagatcgcggcccaagtgtagcctcaaccacttggccaggtgtcgcaaaccgtagcggaaggggcttcggctctgcaggcgcaattccaagctttccttcagcaactcaatcagccccacaacatttcgagtacagctccctcgactcgtccagaggggagtacaggtcaaggtgcacctagttggttgccgccgaaccagccgaatctgggggcttcgccatggagtcagacacctcagtacgacttcgtcaatgccgcccaggcgcaaactgttcggccgcaaggaccgacaccaggctttggaacaagccaagcaccagcccaagtcgccatgacatggtcgcagccagttttcgacccatccatggcgacccagcaagtattaccaatcgcaaccgggcagccgagcaccatggctcaaactcacgcgcaagccgtaatttcacctttcgccacgccgtacccgcagcaaggtgcagcaaacagagcggggggcgagaaggggctgccgctgagtgggggaattaagaaccgcccaattccaccccagttcaaattcccacccgtcccacgctactcgggcgaaactgacccgaaggagttcctatccatctatgagtccgcgatcgaggcggctcatggcgacgaaaataccaaggcaaaggtaattcacctcgctctggacggcatcgcccgttcttggtatttcaatctgccagccaatagcatttactcatgggagcaattgcgcgatgtttttgttcttaactttcgaggcacttatgaggagccgaagacgcagcagcatctgctcggcattcgccaaaggccgggagaatcgataagagaatacatgcgtcgcttctcgcaagcccggtgtcaagttcaagacataactgaggcgttagtcataaatgctgcttcggccggtttgctcgaaggcgaactcacaaggaaaatcgccaataaggaaccacaaacacttgagcatttgcttcgcatcattgacggttttgcaaggggtgaagaggattccaagcgacggcaagccatacaagctgagtacgataaagcttctattgccgccgcccaagctcaagcacaagttcaagttgccgaaccacctcccctcgcggttcgtcagcctcaaacggcgatccaagggcagccgccaagacaaggtcaagctcccataacctggaaaaagttcaggaccgaccgcgcgggcaaggctgtgatggccgtcgaagaagtgcaagccctccgcaaggagttcgacgcccagcaagcaagcaaccatcagccggtccgtaagaaggtccgaaaagacctttactgcgctttccatggacgctcttcgcataccacagagcaatgccgaaacatcaggcaacgtggcaacacgcaagatactagaccacagcaaggagcaaccgtcgaagcacctcgtgaagcagcccaagaacaacccccggtcgaacaacgtcaagatgcacagcgaagagtaatccaagtgattacgagggccgacccggtcggccatttgtccaaaaggcaaaaaaagatgcagatccgagcggtccacagcatcacttcgacgggggagggggcgccgcagtatatgaaccagccaatttctttcgggccagaagacgccgaagaagtcatgttcccacatcaagatccactggtaatatcagctgagatagccggctttgaagtccggcgaatcctgttcgacggagggagttcggctgatgtcatcttcgccgaggcgtatgctaagatggggttgcccacccaggctcttacaccagcaccaacgtcactccgggggttcggcggagaggcagttcaagttctcggccaggcacttctgctgatagctttcggctcgggagaaaacagacgcgaagagcaagtactgttcgatgtcgtcgacatcccgtacaactacaatgccatcctcggccgtgcgaccctgaacaagttcgaagccatttcccaccacaactatctcaaactcaagatgcccggcccagcgggagtgatagtggtcaaggggcttcagccttcgcctgcgtcgaaaggcgatcaagccgtagtcaacagggccatgcacaatgtcgaagccgaactccacagccggccaaaacacgcgccaaaacccacacctcacggcaagatagtaaaagtgcaggttgacgatgccgaccccacaaagctcgtatcgctgggagacggcatgggcaaacaagaagctgagagcatcctagcggtgctaaagaagaacattgatatcttcgcctggggccctgacgaagtggggggggggggtttcggcagacctcatcatgtatcacctagcagtcaagccggatgccaagccaagagagcagaaactgcgtaagatgtccgcagatcgtcaagaggcggcgaaagccgaagtccaaaagctgctcaaggctggggtcattcaggagatcgtccacccagaatggttggcgaatccagtactggtgcggaagtcaaacggcaaatggcgaatgtgtgtagacttcacggacctgaataaggcatgtccaaaagacgatttccctttgccgcggattgatcagctcgtggattcgacagccggctgcgaactcatgagtttcctggacgcatattccggctatcatcagatccatatgaacccaccggacatcccgaaaactgctttatcaccccgtttggcactttctgtcacctcaggatgcctttcggcttgaggaatgctggggcaaccttcgccagattggtgtacaaggtcctttgtaatcagttagggcgaaatgtggaagcttatgttgacgacattgtcgtaaaaagccgtaaggaagttttcgatcatgcgtccgatctgcaggagacttttgacaacttgcgcacagcgggcataaaattgaatcctgagaagtgcgtcttcggagttc

SEQ ID NO: 4761 - DNA, 28859 bp, Oryza sativa
cgccggcggcctccgccgcctgctcggcgggcaccatcgaccagagccgctccacgttcaccgccggggagtagaacttgttgcggagcctgtggaagtagcgcatgccgaccttgccaaagtagcccgggtggtacttgtcgaagaggatgcggtggtggtgcatgcctccggcgttgccccggcctcccgggtgcttccggtgcttcccgatgcggccgtggccggcggacacgtggccgcgcttcttgcggttcttcctcaggctcgtcgtcatcgccgccgccgccggcttaccttggggacgtgttcgggaatgggagggatggaggcggcgaggcggagttggtggattggataggaggaaaccctaggaggcgaggaatggtgagcttgatgggctattgggctgggccttgcttcttttaggcttgtttctctcttggtttgttatgctgggatgttgggctgtggtttggggttttatcgccattttggtccaagaaggaaggagattttttttggaagctaaaaagaaattagatttttgtttcttgatgtgttgtcctggtgtttttgttgtggaatctccatgtagatgaactatgcaaatgcatcacaaggggattttactattttaagagtcccatgtcacaccggacacacggttggagccctaaaggaatcacgtgacatagatgaaataggagaaagttgtctttcaaaccactatagtaagccagacaagtgtcgataaatatttttttcttgttaaaaaacatcattggttttatctttaacattttggcagtaagattgccacatcccaatggatagaaagttagataagagacaacaaagaaaggggaaaataagagaagagaagcgtcttttgaaccattgtaagaactcggaagtggaatgtgttaatcacttgacatggttcttttctcgtcgagtaatatcactactattagtttatcttttcaacacatgtgtttgatgagaacaataagataatatggtaataccgttacctataataaagaataactgttagggatactggtaggtcgaccccaaggcttgacccaccatcagggtttcttaaaccgccggggccggggttaccgcgccccggcggtaagcacggttaccgcggtaaccgtgaaaaaccatgaaaaaccgtgcaaaatttatcaaaaattcaaattattttttaaatttatttgaatttaaggaggttaccgcggtatttatattaccgtaccccgcgataagtccggtaaccgccggtaagggaaaccctgcccaccacgccccccgtgctagattatgggtcatgggtcatcttgcccccgcaacgttcctaggcagttgacccatgggtcgacccataacccaaaagttgaataagcatatgcatgagtactggcactgcaaaaggttcgatctcgtctagttacatggctttcatagtggcgatattgtccaacttgtcgcccacaacgccgatgcccctgatcctctggagcaacatcttgattttgtcatagtctatgccttgttggatctctagcagaaagacgatgctagcaatgaggaacacgatgaggacactgggccgtcaagcaagcactactaagagcctctagcctcagcctcccgtgatcttctctatggtgaaattcacaaacatggtgaccggagctccaagagacacatgttgaattggatgccgagcccgacgtcgagcacaaggggtgagcagaggtggagatatagatgatgaggtaatgagcatgagaagtaggctaccgattttgctgtagtgttgacgcagatgcacgccgtcgtcgcctccacccaccaacatctactggagcctgtgagtgcgtaaacgtggtgtaagatatgggtcaaccccatgcgtggtccgtgcgtcacgaggccaccaacccatgttagcctaggtgaaattgtgggttgacccatatggtttttgccccatagatcgtgggttgggtcactgggtaaatgggttgacccagcccatctacatccctactaattgtgtcatgtatcaataatgatatgcacaaacaaggaatctctgaccgtccaaaaatatgatttaaccaacaccaaaataaatacatgtcaaatcttgaatgttttcatagaaacgataggtttggtatgttgtaattaaggaaacacgtaacttctataccccgagcaataattattccatgcacataacgtcccaaccagctgaggagtcgaaaccctaaggattgcaattgtcaacttggagcctgcataaaaacttcaaaactcatattatatatgtaatgcgcaaaaaatacttgcataataatgtctgagagtgacacatgatcaattcatatgtatacgacattgttatttttttcaagtattgctaatattcctttaatatttcttttagagctagatatttctcaaaggacaatgcaaaataatttatttttagattaaaaaaatatcaaaagaccctcccctccctagtcctaaacctaaaaacccaaacccaaacccaaaaccaaaaccgtccataaacccacgaaatccggcaaaaacggaagattagacaggaagaaagaagggaagggaaagaaaagcaccgcagtggagaggaagaggagcaaaccctctcctctcctatatcaaccccaactccgccttccctttggccccctcttcctttcccccctccgccccgccccagattcctccgccaccaccgccaccgccatggacgacctcgagcaggccatcctgctcgcctcggattcccccgccgcggccgccgcctccccggccgtgcgcgccgaggcgctcgcctactgcgcgcgcgcccgcgacgagaccccgccgtcgtcgctcctccacctctgcctctacggcctcgcctcctccccgcacgcccacgtccacttctggtgcctccagaccatccacgacgcgctcctcttccgccgccgcctcgccctccccgacgacctcgccctcctccgctcctcgctgctctccctcgccgtctcctccaacgccgcctcccctcccttcctccgcaacaagctcgcccagctcctcgccctcctcgtccgcttcgagtacccccatgtctacccttcctacttcctcgatctcatcccgccctcgccgccgctgccgggacccaccgacatgttcgcccgcgtcctcgtctccctcgacgatgacctgctctcccaggactacccgcgcaacgccgaggaggcctccgatgccgggagggtcaaggacgccatgcgcgcgcagtgcgtgccccagatcgcccgccactggcacgaggccgccgtgtccctccgcgccgccgaccccgccgtcgccgcagtagccctcgatgcggcgcggaggtgcatctcctggatcgatgtctccctggtcgcgaatgacgtgtttgttcccttgctctttgacattgcgctgtccccggggagcgtggctcctcttgctgccgcggcggtggggtgcctctctgctgtggcaacaaagaggatggacgcgagggcaaaggtggcgttgctgaggtcgctcatgtctgcccagaaggggtttggtagccctgacagcggtttgaaaaatggcacatttggtgacggcatacgctgtcgaggctctcgagtgttatcgcaagcttggctctagtgatgctgatggagccgcggcattggaaatgctggaagaggtgctgccagctgtatttgcggccgcagagagcggcgatgatgatgaggttgattcgggctcggtgcttgagtttttatctgggtatgtgagtacgatgaaggcaccgacagagaagcaacttggacacttgggacagatactggaggtggtgcggatgcagatgtcatatgatccagtttataggggtcatcttgatgtccttgacaagatagggaaggaggaggaagacctgatggcagagcagcggaaggatttaattgcactatttcggagcatttgtcgtgtggcaccaggtgccactcagctgttcataagagggttgcttgtgacggccctttcatctgcagaagttagtgttgaggatgttgaggtcgcgcttactctgttttaccggcttggggaaatagtgggtgaggaagagatccggactggagctgggttaattagggagcttgtcccaatgctcctttcagcgagattctcatgccacacacaccgcctagttgcattagtgtacctagacacaattagccgctatatcaagttcatgcaggagaatgaccaatatgtgccacatctgcttactgtgttcttggatgagcgtggcatacaccatcagaatgcccacgtgagctgccatgcaggatacttgctcatgagagctatcaggctgttgaaggctaagctagtgccttacttggataccattttgcaggtatttcctctatctcttttaataggtttaagccagtctagttttctattatagatctgagttatgtgtgtctatgagttaacagagcttgcaagatgccctagtgcaattcactgctacggactgggcaaacaaagatattaagttctccagctcagaggatggcagccaaatattcgaggtacaatgttctcacctttgtctagctgttgttttacactgggaacactaatcttggatcaatgacgcttgttatgattttaggctgtgggactgttgatcggcattgaagaggtgtcaccagataagcaggttcagtgcttgacagctttacttaatcctctctgtcaacaggtgatcatcgatctctttctccccctgtttatgctggccttaggtcctatgggtttaagaatcttacattcatcggtgaaaatcaatccagatcgagtcacttgttatggatgccaaagcacaaggacttgaagaatcatctccaagagctataggtcttcaacagattattgttgcattgactatgatcagcaaggtatgctgttcatcctcacacatcacgaggagttggcaatatcacattccgtgaacgtagtatatcattttatttctaaaaaaacgttctgattcgctcatatgccaaatctttggttctgtatatggcaagtgcctcaagtattaatgcttgatcttactgtgtctggatgctgtccttttttagggatttaatgaacggcttgtgatgggaagcaggccgacacttggcgttatgttcaagaaggtacattctgtcattctccattccacgtatatatatgctttttaattatcatatatgtgcataatttccatttttcgtatgtgatttttttttcgtattgttctcagacccttgatgtagttttgcaagtcctcatctcatttcctaatgtgaagcccctgcgatctaaggtaagtaactgttatcaacatcttttgcaatttactgcttggatgattaaccaatttgtaacttatgcaatgctgaaatacagatcatatcatttctccaccgtatggttgagatattaggcatttcggtgcttccatgtattccaattgcactgcgacagttgctcgttgataatgaggtatttcatgtccctgtttcctggttattggttttgcaagctattgcgatctctaatagtaactgtagcacctgtgttccctttttcggtaactgtcctgttttagctgtatttctctgaggaataataacggcaggactttggaaactatcgtactttgtaatgtttcttttatatacttatacaacaaaaaggtgcctctgttgttaatcataccatcaaaattatttcagccattggatcatagtattaaccattaaattagatcgatgttctgttctacaaggaccgctttagggccatacagtggattggcccagttagactccacatctcacttttccccctctttggcccatccctttgagcggacaatgtccactttatggactctaataataatttagtagttctacaactattttgtttacagttaatattatttctccatcttattgtttcatcacagttctgcagcttattttcattcattcgtactgcagcaatgcaaggggtatcatatagttcttaaaatagcaatatacaaaggaaaggattgtgtagactgtcaatccaaacaacaatggaaatcaatgaatatatgattgtccacagaaatccattaaacattcttttgtgcaattgtgttaatttcttgtgtcttagccttaatgtttttctagtacctgttgaactgcatattactatttgatgcaacatcaaattagtaccttattatttctctaaaaacaatattgtcgtacatataattctattttgcggcccttgctgacatcatctttttacaggcaaaagatatgtcggaatttctgtacttaataaaccaaataatatgcaagtttaaatcttcagcaaatgccttattggaggatgtgtttcctgccatcgcaagtcatttatctgtgatactatcacacgatgccttttcaaatggttttgcaagcaatactgaggtaaattgaattggtaaataagacccactatattactgcattaatttgtgtgttaaccaattagtttaatgttgttttctctaagcattttgttttgttgttagtcactaaatatcatggctgttaaggcgtcgctatggcatcgctatagtgctagggcaccctgagggggtcaaggcatccctccgccttagggcttaatgcagagagggagagggagaggtgaaggcggcagcaactacacccttttcccttttctctgctccatgtcatcaccattttgctcccccttagctctggtttccactctcttctctcccctgcgccagattcatcttgactcaagggagcagccgccagatccatccaagggaaggagcacatacagagagaagcacttgattcattctgaatcagggggaagggagcacagatagaggaatagagctagcatgattaagaagagccggtgcgaggaagaagcgatagagccgtgaggaagaaacgacatcgggggcggcgctgtgagaggagagacacacctggtgcgggtgttagggttatttctttgtctttgggctggtatgaaggatattgggcttttgtgggctggcctgctaggctggttttcttctgatcgctgctaaccacataggttatggcatcgccatgccttagcgttttactgctatagccttaccgccttaacaaccatgctacatatatggcaatcatcttgatatgataatgttcttggcttattgcatagttagtcacacactattgtttgtagctggcttggttcttcatcagctagtaggccccatctgaattgctaccttttgtctactttgttcatgccaatttggctaatctatgtagccaggcttttacaggtatttcatggattgcgtagttccttgtatactgtattcatgccaattttgttcattgcaggaaatgcgtgagctgcaagagctggaaaagagattttacgcattcttgcttcatatagcaacacatgatctgtctacagttctcctaactcctagttgtaggcattatctagagaacataatgcagttgcttttgattacttcatgcagccataaagagatatcacatcggaaggtggggtttaattgatcttgaatttcttatttccacttcaagcgagttacattctccatctccactttaaatagaattgtctattttatactcggttattgttttgtagacatgcgtacagacttttgtcaaccttatcaaagactggtgtagtagctctgaaattgaagataaggtattgttgtgttcagttcttcttatgtcatgttttgaagagtctatctagtacttgggcagttgcattactcataatgtcatgtatttcttgttttcctcagcttcctggcttccgagtgtttatgattgagaagttcgctactggttgctgtttgcagagtgtccttgacaagtcatttaacttccgtgatggaatttcggtaggacctgtcaaccatacaatctatatctatctaaatttctcgtacctgttttactgtgttaaatgtataccatcaagtagttattatactgtttgtctattgcttcattaaattcttggtaattttattaatgtccgtcctgatagggtttataggcatttgattgtgacctccagcctataggtgtccgattggaggtgaaactgcagtttgtagtctaatatgtgatctcttatcacttcctaaacatcagatttacttggatcaaatggcaatctaaatctccactctatataaactattcaggtgattatgtagcttgttgggcacactgatttcttaaaaattcttagaatatttaacttgagcgataaatttctttgtactttgacaatgtatatgttttctgtaaccaacctttcatatattattctcatgatgtttaaagtgccactaggtagtgtttgaattctattgccataaatgccttttaattgttctcaagcagactgggttgcgacatttgaatcttattggtcacaacctcttttgacattcccaagccccacagtttcatgttggtccctagaagcgagaatacactctactttctcttaaatttgaaatacaatctgcaaatatttctatatgccccactactatgtaagggagcgtcaaactaatctgttccctttgctgatggaatgttaatatgacaattgaaaattcagttggccaatgggatgcaatgagctatgtcttggtgctttcattacttctcaaggagggcataaatgattagaggctcagtggccaaagtaggcatgtagcaatgcaattctcggtgacagtcttgctaggttatcatttagttaattactaatctaaaagcaaatagaacatgagttattttcttcctttaaatgattgttgtctcacaacttattgtcttgtcattttacttcattactatagttgaaatggacatgacttttgcgtggtgatggatgtatttctttacattcaagagcttagtctaatctgcttctttcttagattgccctgtttggtgaaatcatgatggctcaaaaggttatgtatgaaagatttggcgagaactttgttgtaaattttgtaacaaaacttcgagaagcacactgcccaccagaccttgctgaacagtactaccaaaagttacaggtatgcttgttcttttgattccactgtgtttgaggttgctaactgcacaaaagctagaacatagctatcattgcaattttaaaaagttgaaccgttcccttaatttacgaagttaaatgtaagtacattgtgttgctgtctcgttgataactggttgacttgccatcaaaatgccatcgaggtttgggaagttgttagtaccatgatggagctctagtttatttgttgtggcttatatgagagagcaagtatttagcatttaccttcagacttgagtaatgattcaatgggtaattatcatttgtttgtcgtattactaaagcaatggtgtttgttctatggttttattacaaacaaagtaataagatgctgacataattcaggaatttgtaatctgatctcttatctgctgtatcaaatttaaatttttcacttttacttttctccatcacagggaaatgatatcaaggcattcaagtcattttatgaatcacttgtcatgaaaataagacaacagcagaatgggagtcttgtcttcagatagcgtcattcaattattttaaatctgtttgccagtgaaagattcctcagttctacaatttgaatataggtagttatttcattcttttcttggcttatcaacaatatgcttattcctgcatgacttgcttgtattattgccttcacatctttgtgttaacttgctataatttgcagggtagttgtatcatctatgtacataaagctctaccatttctgagatcagaaggtattcccttgattttgatacacttcttttttgcatctttgacccatctgttattaaaatatctctccccatggagcattattttgctgtatacatggtgtgcatcttcgttgggcactcccttgttgtcctcaccaccattagggtggtaatatagttgatgtaaagcttctggtttagcctatattctgtaatgatggagcatccgaagctctattcatacacctttcaatatcagtaatcatacctcgcattattgtgaaatctgacctcaatgcatgtttcagtgtagtttatgccagtggcacataactgatgaaaaattacccttgtatgcttgcagatgtatactgcgggaatatttttaccgagcctggctaccgtggcaaagttccttgatcaaggcatgttagtgagatgcaggggatacatccccagagtttctgctgtgagcatacagggtttcattatgtttgttttgatatttctctggaagtgatcattgttctgctccgagcttgaaattttttgtaaggcgattcgggtgaagctaaacagatgggataggcaaaagagtgatgtgtgggccgtgtttttcctgacagaaactgtcacaccgcctgttgtcgtgttaccaaattttggcagtggtttttcacccctttgttagctggggtgctgtacagattctttaatatagttgcgtcgttcgcattaataagtttccgtggtcaccttctcgttaccctgattatccagtgacagaagaggcatgctatgctgactgcaatgtaagagttcaactttgatctcttctccttttgaggtagtggaaattttctttttacccatagaggtcggtatttttgaacggtcgaaatctttcatccttgtttttgcccattctgtgactttcgtgcttgttcggcttcctttcagaatttggataaatttgctttggattagaccacgtaacagagtctagtcactgttacttgttaggcaggatggatatggctgtgaagtgaaggccaggccatcaaagttgggtttgatcatatcttctgttcttgttcttgtgatccaactatccaaggacttggccaggagcacatcagcgtgctagagacggacataacgatattgattgtctagcttatatgactgcacatagaggcccatatttgtaggttgacaagatgtttatggctttatggccatatgacttttgttgaaaatttgcttgcctgctgttggtgcatattatcaaatttgtcatcgaattctttcgcacgtcattggaatcatctgcaaaaaaatgttgttccctatggtggtggctccatgtatcttgcgagacccatccacgtagtcattttttatcatcttctgaaagtcaatgctaatccaatcatgcacattccgcaccgcacgaggaaatatggggttttaatttggaactttggagccaattttcgccctgcccatatttggtagtgtaacagtattggcaaacattgttatcaaactaaatattttttgtgatattattttagttaccaaaaaatttgggtgagcaaaagttgactctaatctaaaccatggtctgcttcctttcatcaagaatccccacattacagaagttctaaaatactcgtatactaatttggaggtgcagcaaagagcatgaaaagtgatttcactgttctcacaattttttgataatttctggagcttctacacattgaagcactaacttggtagtgaaagggagtgaagacctcccaaaaaagggaagggaattgaagcactggaattggattgttcatctgcactgcacagctagaaagggatcctgacaaaggaaaatgccacacaaaagaatgggacagttgcaaagtccaatagagaatgtagcaaaacaaagaacacaaatgccaaaagagttgacaaaaaaaaaaaaccctgcatcatccaaaatacacaagagacaaaagaagcactcaccaagatgagctaaccatgctcatcaactttttcataccactttagctgtttttcttggagggggcacttggaggttggaaccaagtgctctcacccaagagtagtaaaatatggccagctaatcagtttgagaagactagatatttgaagacagattaactttcttgtctatttggacagtagtttaatttgtctatgccttcaaaccctgttttaatcacacctaccatgagagtttgttgatcagcacacatgcctgctgctggtctaatgtccattgaaaatgtgtgaagacaaaccacttacttagaaagttaacaatgctagttaaagtaatgactacatatatgctgattgatgttgctattggagcaaggctggttaaaatgcctatattaaaagaaaagctatctgcttttgacaaagataatcaatttgattgcattatcaagtataagatagttatttacgactagcctggtgacttggttttctgtagcggcatagacctgttttttcttcatttcaaatgtcaggtaatgtgtccattgaggaaggcagcattcgtattcaaaaggtgtggttagtattcagttcagtgtacagaatgggttgactaaatcaagctaaagatcgtctctaattaagaagtaatcaagctagtagctagatgttctctaattaaaaaatgattaagctagctactgcataacatttgcttgcttgtagccgacaagttgtgataaattaactaaatcctgcaccaatcaacaggcctgtgaagaatgcattactccaactaagattgatgtgcacaccaacagcactgcaaatccatatggatatatacggaagaaacatcagcagaacatcatcttaaagaattctgattgggaatatgtgctcacgtaggggagcaagaatgaacaaaaccagtagctaatgcccatcctgaaccaaatcaagaacccctgacactgaatttttccccctatcttcttgtttctctgatcaaaccaagaaaccatgcaatgcatttatgcatgtatctagagcattagcttgtttagtagatgataatgatagatgctttaggggtcaaaatcattatcttaaggctgcggttgtacctgccgaagtgtttatcttcaggtacagagaagaggagaaactagtaacagtcaggaagcaagaagtgcatattgcataggaaagtaagttcagaaagtatgcatatgacgtagaggtcgatgcttagcagtttggtgaggagtctcgtgacatttgatctcttcatggaaagagattgcaaacctaccccgtatctcacgaagttaacctgtccttcacaagtgtttctagaacgtgtcaatttcatcaagctgattaatttcaggtttattgtcattgaggagaaaactaattctaattagatatacggaagatcatgtacggactaatcacattttctttccgaggaaagaaacttacagattgtttttaaaaacgaacttattatgttttttaatagataaataaagctttattgaactcaatgagaactaaggttgttaaaatcatgatcctaaatcagaggtctctgagtaggatcgcaaataaaaaatagtatatgtaggaattgtaaaatcgtggattctatctactagaatcgtagaatcaggttctttaattaggattgtaaagtcgtagaagtgtagagctgaatcaagatttttacaatcttcctgaaaatacttagtaagattgttttgtatcaccttattgtaattggttgaattcaataattatctcattatctaaaaataagtgtctcgattaactgatcacgtggtacatagccaagttgtttctctgaatcattttggctgacagagatcagcatccactgcaaaagtcaaagtggatggaaggattttatattgtatctctgcacacgcattgcaagcattccaaagcatatgcatggaacagttgactgtcatttctgaagcgatggacttctgctacgcttcaccagctaccggagaaaaacaagaaagtaacacaatctatacacaaaaacggcttcttaattagttgcatggctaatctctctttgatcatcgtgtgtacaagagccgccattaattagacgtcaaaactcaaaaccgagttttttttttcaaagatcctgaaattaagaaggtcgtcactgcagagttggtgcagatgattgatttcagaaacaatatagtacatatttgcattcgaagctcttcagttcttttgttttttcttcaccttgcaaagcacgtaggcacttggtttgatggtttccagaatgatgtttcttggaagcaagtagtccttggcaaataatctgttattatcatcaaatgcagattacaggattacccttaacctaaccccagttctgacttaatcagttcctactcctagtgtttgacaacctactgcagcaaagaggattacactaattaaacatttgatccttgcctgaattcatgcagcatgcatgcgtgcttgcacggccgtctcatcaggtcatgtactaatcaattaacagccattgacccattgtgcatatggttttcccactggacatatgtaactaaccagtaattaatttcctgattagttcttgattgggcaccaagaattagctaagtagctaaccaagaaccaggcttcaaaatttcagttttgaccatttctattgggggcaccgatggtaccgaaatttctaaatattttgatccgaaataatttaaaacttgaatagcttcttatcggatgaattcttttttgataagatatatactcgattacatggttagagtgtccctatcttcccatggccattattcagaggagcaactcgtggtacatgcatggcaattcctgcgccacatgatcagtggcacgattagtaaatcataccgacatcagatccatacatgagaagcctctttctctgtcaccgagcacacgtactttacaatatatactttccctctagaaggaaaaggaattgaaaatgaaacgagctttggttatgttctcacttggcttgtttggggccacatggtttgtttttaattactgtaacttcagttaaaaatgttaacagatcaatattgtttgaccctctttgacgaatttaatttcagtgtaccaagtgcgtgttctatttacatatgcttgaaagttactgaggcatacacatacccattgaaacacaactctgattgttgagctatagttggtatgcctaaaaaactgaacaagcaaactaaaaaaaaatacaggtaaaacatttatatttgtatcattaatggttctagaaccaatgctaaaaaaatagaccatggctatggctcggctaataagccaacaatctcctaaacttgctgggcaccaactgtaaggttttgagagtagaagatagagatgaaaaaatatctcgttttttacgtgcacgtttcccgaactactaaacacagtacgtttttctttcaaaagaattctatatgaaagttgaataaaaatcaaattattctaaattttaaatttaaaataattaatactctcaaatactgtactatctaactctgcatttgctacatttggaacttcataaccatgttgatgtcgtgaactcagattcccagcaaggtgttctcatctggatggtgcatgcagatgcagtcgcaggtcgcagctggatgcccggattccagtggtggcaacgatgaccaatcgacaacgacctgcacacacagacaaacgtcgttttggccgccatttgccaccattaagagcatgtccaatagcatactataaaccagctgtaaatatattttaaaaagataaatgaggagaaagaagaacagcgggctacagatttgtagccagctgtagcatggactccaagacttagtgtgtgtatgccatgtgggaccagatattaatagtgtagtatatatgtaactattatatgaataagctattagattgcctatagatgaattgaagctagtagtgggctatgctattaaacttgctctaagtacatcacatcgatgctgggcagcagcttgcacgcactgactgatcgacgaatagtgatcaaaatattcagtcagatcgaccaagaaacctccaaaccgacgagaatattggcatctcttctcgcgattgggactcttgcaaacacctctcgatccatccatcgtcggctcatttcctcttcctcctcctttgcttgttccgagtcaaaaacgcgtatgcatggactggaatcaagcgacctcctttacggcgcatttcttttttttctctgaaagtctgatgcgtttgcttgcattgcaacagacggtggtgttgcttttctttctttaatttgggggcagttaatagtttgagttggtgatcactggatttttctttctctctttctgatgaattggtcttaatttggctgcattgcctgaagctgggttgatgcgttcctttgttcgcgttggtcggctcgtatacgtacgtacacacagggacacggtcaccaatttggtactccatccgtttcacaatgtaagtcattttaacatgggactagctaaaaaactgtcgagtgttttttgaggggaaaactttcaaatctaactatagtatataatttcactagaactatattataataataataacttatatatatgtattaaaataatatatgcaactttatatgtaatttatatagagataacaatatagttatagtgtagttacactataattacaatgtaattacaatgtaattacagtgtaactacaatgtaactagaatgtaactggaatgtaacttagatataactttgaacaaatctaccgtaaacatacaatgatgggactagcttgtgaaaaaagggtttagatttaatagcaaaatatctcagcacaaatcttaaagcggaatcaacgactaagaaatttgacagttttcactcaagaaaattgtcgacagtcctctagcaattccgttttagcatttcccacattcatattgatgttaacgaatctagacatatatatctatctagattcattaacatcaatatatatgtaggaaatgctagaatgacttacaccgtaaaacggagtaagtacttctttgcatgcagctgaatggatgaattaacgatgaataatttggttctatgataatattcgagaatataaacgaatgaattgaataaaacaaagtcaaaaggttgttctaaaaaaagcattcttataaattttaaatttatacacgcaaagtttcttttataaagatttgcaccatttcgagacatgaaaaatgtaatacttaaacatgttttggtcgaattttctatatgatgagaaaaatctaatacgaagtatgaaacacactggagtgtatggccatgcttgcttccatccatccatttccacgatacaaaaatgaacaagaaaaagatggacacaattaattagcacgctagtctttgcatgtcgcaatacaaggtaggtaaaggccgggggaagcacatcgcaccatcaccacatataaaaatcgtcacatcaacctcatccaaatttcgcatcatcacaaaaacaaatcaaatcccctccaaatttataacccattaatcaaaattaaaaatatcccccaatggtcaacacacacacaaaaacacacacgagatgatcaaaggccattccatcccgccctgacaggtgggccccacctgcagcctctcgccttcgcctatatatccactcgtgacacacacagccccctctcgcttgccacgcacaccaccaaatcgccaaccaaaaagcaaacccccgcgtcttctccgatcagctccgctcgctcgccgccgacgagctcgccccgccgccgacggcgacggcgcatgctagctgcgtatagcccgcggcggagatgaggtcatccagcgattgcaaggttgtggcggcggcggcgaggaagaaggagaaggaggcggcggcgtggccgtggtcgctgtgggggttcctcctgaccggctgcctcggcggcggcggcggcggagggaagaagaagagcggggggaagaaggtgcgtccccgcggcggcggcggcggcggcctgcggcggctgtcgttcacggacctgacgggggcggcggaccaggacctgtcggtgtcgctggtggggtccaacctccacgtcttcaccgtcgccgagctccgcgacgccacccgcgggttcgtctccggcaacttcctcggcgagggcggcttcgggccggtctacaagggcctcgtcggcgacggcgtcaagccgggcctccgcccgcaggccatcgccgtcaagctctgggatcccgagggcgcccagggccacaaggaatggctggtacttcacccctccacgtgtcccttttccacttaatcatcaaaaaaatagaataaaaaagtgatatgatttcatttgattaattagacatgcacgcgttaatcactttagttagttaatcatttaatgcgataattaaatcagattgatcgattatgtttgtataagattaacaattaagcttggagtaattaatctgagatagtgtagtgccagcttccttggaagagtccctaaatctaatgcttgggggaaacaacattttctcacatggtttcttatagtaaaagagtggccatcaaatatagcttaattggtagagtagtagttgccttgcaaggatcactcaaatatatgtatcccagtatatgaatatcctagggcattgagtaaccctctagataactgaaatttgcaggtgaggaacagtattttttttttctttttgagggtgagagatatgagatatcgttgattttgttttttaaattaatattattgtttttctttgggaaagtgtcgattttccttttatttattgcatagaagcaaagttgtgtcgtttctcctgtagcaacagggaatgttcagtcaaattacccaatcgtttctttcctaatgctatttagtttcccatcaaacagagactgatcagcggtaattagtttggttatcggtcgactagaggttaccacctaaaagactgtattattcaaattttatatttgaaaattttgaacttttacgacttatgactagttaactaccaattattcattaaaaaaattgaatctgaaattttatctggtaaaattcagtaactgtcaggggccagtagcttcggaaacccggtttctgaaacgcttggcctaaacaattaattacagattgtttaatttcagatcaactaatactactactactcacacgatcatctagaacataatcaaacaggtttaaaaatatcttaagcagcacgattaggacgtgcgaggcaaagaacaagggaggggtagttggacgatgtgacggttccggcgacggtcggataagtttccagtgatctaatcatgctgcccaatgcaacagtgccactgaaatggacgtgatcatgctgctgattcgctgctactactactactacctgatttctgatgattctgacgtcgttgcttgcaggcagaggtgatcttccttggccagcttcggcatcccaacctggtgaagctggtcggctactgctgcgaggacgagaaccgcctcctcgtctacgagtacatggagcatggcagcctcgagaaccacctcttcaaacgtaagcactgaactgatccttcgctaattgattttcagcttaagtttgtactactgttccattgatctatagcactagttgccaacttgccattgtgctaattttttatctgacgagatgtctctttaccatgtcatgggtgtgtgtcaaattgaagctttagttcgagtaggactacctaattaactgatggttaatgagtggtttggtacggtcgtgaagtggagatttaaaacagaagttggcttgaccattctcacacaaacgcaatgacctggcacggcatggtgccatggtctgatggtcattgagaaaatgaggttatattccaacttaataatggattatagatatcacaaaatgagagagaagcaaagccattattcagaagtctacttcaaatgggtagctttgctactcaaaaaacttggttgcgtctttgaggctttcagcttggatgatggatatgttttccttcgtttggctagccaacttctttagcttattagagttcagagttctgaccaaactgaatttgactggccttctctgctcacttatgagcttgcaaaacccatggaaaatagtatttcattaggtaagggtcaattatacattcactcacccttgcgagacaagctatagattatgctactagacgttttctaatgctagattacagacgtcagatgaaagtgaggtcacctgtagttgttggatcaatttcaggttgacatagtaatctagtgtgctgcaatcttcccagctgcctcactggctcaagctgattgatttgttcttggtcatgacgaaatctcctaactcgttgactggatatcgaatccctccaaattacaataataacatttcttgaaaattcagaaggcagaaagaacaagaaaccaaaattccacaaaggcgacaacacgcatggccggctagccagtactgttcatcgtcttttttttctcctctgctgcaacaatacgcataaactgctttgtttttccttttccagctttcttattcgattgatgtgtatacataacatggctatcagctatcgattaattaattataatgatgacatgcgcggctttagctgacgttgatcctgctgagatttctgaagatattttcttttcttttcttctttttctgcagagattcctgcagtgctgccgtggtcgacccgattaaacatcgcggttggcgccgcgaagggtttggcgttcctccacgacgcagagaagccggtcatctaccgtgacttcaaggcctccaacatcctgctcgattcggtgagtgccctgtagcttttcctaggtagattgacacctctcatatgcatgcatctcagttagctaggagtttttgatgcacacatcacatatgatatactatatatatagtatcatcctaatgaccttttcatcatcatcagtgaaaaggtagagtaatgactaggaaattgtacttggcacagtttggattttgaagcattttatgacatgattatgtcagagaaacttagtatcatactgtacttatgctgttatagtgttatgcatcacttcatacttaactagtactagttaatggttattatcatattgtacttctctaccaaagaaaaggaaaggaaagcttagtgatgtgggctatggttcataggttgggccgtaagtgagttctgctcaagattgggctaaaaggaggcccaaattttagtttcaccactgaaaagcgtcactgaaaataattttatcgggtcatataatcaaatctttattatctaaaaaatataatcaaatctttacatttttttccatgaccgtgtcaatgttcttttttttgaaagaaaaagcaaatgttaagtttgggcctttaatgggttactactcaagatgggccaaaatcaggcccaacttgaatttcccccactttaaagcccattcattagtaataagcccaagtaagagaatcgcatcaaatgggctaatggtttttgggcctgtgaattttgtccctccctccaggattacaaggcgaagctgtcggacttcgggctggccaaggacgggccggagggggacgacacccacgtgtcgacgcgcgtgatgggcacccatggctacgccgcgccggagtacatcatgaccggccacctgacggcgaagagcgacgtgtacagcttcggcgtggtgctcctggagatcctgacggggcggcgcgccgtcgacaagacgcggccgaacagggagcagagcctcgtggagtacgcgcggccgtgcctgcgcgacccgctccggctcatccggatcatggacccggcgctggaggggcgctactcgccggcggcggcgagggaaggcggccgccgtcgcctaccggtgcctcagcgggagccccaagaaccgccccgacatgtccgccgtcgtcgacgcgctcgagccgctgctcgtcgccaccgacgacgtccccctcggccccgtcgtgctgttcgtcgcgccggatcaggaggccgacgccgccgccgccgccgacgacgacgaggacgacaaggcccggcggcggcagcggcggacgcggaaggacgagcagcaccgccgccgcagccgcctccggacgtcgcccaagggcagcccgaggaagcccgccgtcgccgctgcttgccggaacgaggagttctgggtgtggcacgtccccgccgaccacaaggcgtgagcgagtgacacgtggcgcgttgcatcgcacgccatgtcagccgccgctttgctttgctccacgtgtgcgacgaacattgtgtgtgtgtgtgatgaggtctagtagtaacactggtgatttgattaggatttgcatgcatccctgtactctgtttgtttcagtgagatgcagagtgagagagcgatcaattcataattcacagcacaacgaagatcagatcagaaaatatcttatcaggtctcgtcttctttaatccaacccttgtttgatttgattggttgatcccttcgaaagtcaatttgcatttgacaatggcagatacggatgaacagatcgatctcgacgatcacatcaacctggattatttttcttattaccggccgttgacaaggcattggtatctgacgaggtctcttgccgtgtagttagttttagaggttactgtcgccgtcgtgccctcgcatgcaacgtgttcgtccgacgacacgacccggcacgggcggcggcgccgacttcgcgacgccacgctgtctttgaccggctccgacgagcgcccgccgtataaagaaagaaagggtcgcgtagctgataaaagcacggtgtccatagctagctagatcgtcgtcgtcgtcttcttgcaggagaaagatggagctcccactgcggtgttttcatggcgctaaggtggcggcggtggcggcggcgggtgatggcggagtcgccggccgtgcggctgttccggcgaagggcggcggcggcggcgttgcgcggggggtgaaggtggtggtaagagggctcgtcggcaaggccggcaaggtgttcggccggtcgatcccggcggcaaggttcggccacctcgcctacataaggtgaaggcgcagctgcgtcctgaaacgtcagtgatctgatcttcttctcctctctcactctctgccatcgagggaggtgtgctttgtactagcttttttcttcttcttcttcttcttcttcttcttcttcttctttttttttgtttttgggccaatgatactttgtgctagctaggtgctcgacaaaatgcgtccttgattgatgcttggtgattttcactagatctgttcatacgacttgtaaatagtagaacatgctaggtacaaggtacttttcagattacactgttcttcagttcttgtacttagtacgttttcttttttttttcttcttctgtatgaaatacgctcgtaataacatcgatcttattaaggttgtttaactttttggtgttctgttagatctgcagttccttcttttttttatatatatggacaatttgatggtcagatgaacagaaggcctttaccaagtagtttctgaacttctgatgctagatctatacgaaggttaggatggatgcacagctgctggtttctacaaacatcagtacatcatatcccgttgcgtatgtggttgccatgagtcttttctgttttaaaaaagaggcagattagaatgttcgatacagctatgaatcattgatttgcttctgcattattcatgcatgcagccatacagctcaagtattcgttgttttgtctaatacggtgtactctgtatctgggtttctttcagaccacagtctgcgtcagatatttttcttctctaatccatttgtgtatttgtgttgttcaccagtagtgcacgtctggtatgtacttgctacttccatcttctgaaaacaacgagggaaaaattatctttggcttgtaatactaattaactccttacatattcttgaattcctcttcggtgttccagacactcttgtatgaaagtatagagctattttctcgtagtacaaaatgaggataaaatccctctcattacaaaacaaagagggaggttatgtgtcttatggaagaggccggggatgtaaaacatttctgttgtctttaaaaaaaaagataaaagagggatttgaagaattgtatttgaaattctgaattatacataaccaaaattgatatggattcgggattgagtcggtctggtaattgcagatagtccaacattaccaataaatcatgttggctttcaaagttttaacttaaattggtcgacatggagtactagtattgcacttgtttggctgcttgctgaagtttgcggcacttgagttaggagtacaagtgtttttttaaacggaaaacggtacaagagtgcgccttttcattaaatatagaaagaggttaggagtacaagttacgaccatccataacaaatgtttgattcattgctaaaattgaagcatattaacccttaacctcacatgttattatagccaaaacttgccacaaaatctatggtcaccgtctaaatctctatcttcggtcctgccagattagtaccaatactcctactgtgatggcgatgtcatcgtttcgttacgctgacatgcgagcgtacaccgctagtagtacaagtgtaattcaagttgaacgatggatcatttctgtcgtaacttcacatccagcggatagatgagatgactgatgatcacaagcaagacagggaaggtccctcgtttcgcttatatagggaataagacaaacggtataattgcaaatgaaaaataattttttcatatacgtgttcctacgatctaaaagtaaaggctaaaaaataaacttcgataaaaaaaaccctaaaatcaactctaaatttaaggttgaaaatttaaattttagttgataaacataagcataagtgaaaagatgaggctggaagttgtatatacagtactttattctcatcttttgtttatcggcttaccggtcgtggccaaatttaatcgttaaagttctctttaaacattggggctgtgtttagatccaaactttgaattcaaacttcaaactttttccatcacatcaacctgtcatacacacacaacttttcagtcacatggtatcaatttcaacccaaacttctaactttggaaggaactaaacacagcctggatttcaaatcgcaaataatacacatacaacaaatggaaaactcccacaattttttgttgcttcgttcacgggacttcggcttgtcacttcacttcatctacaactacaagttctcacttgagcatcctgcaatcctacctatgtttcgtcttgttcttttgtccctcttttgccatgcataccgctgttgcttttccagttttccatgacccatccagtcaaaccaatactccctccatcgcaaaaacaaacaacctatgagtaaatttgacactatacaatgaatttgaataggagtattctctccgtcccataaaaaaccaacatagtactggatgtgccacgtcctaatatatcacatcagttctagattcatattttttggaacggaacgagtatatcatgattagttgtactagttagtatcaaattcacttctaggttatttttatttttgataaaaaggagtacatatgatagcatgataggaatacgatgccactaccctttaacaaaaggagtattcttgagcaagagaagcaagcagccattcgttcacaaactctggtgattgatcgtgatggccattttccttgtcttccagagacaaaatggctctgattccctcgcctcgggagagcacgcaagattgagatagcctcctccaattattgggtcactcacacacacacacacatctacactgtactactctactggtcactctcgaggtcttcttggcccatgcagaagatggaaacagggaaagcaacagagaattgacagggttggtctcgtcctgctactcctgtttgccgtatctgaatcctgccaagctttcagcagttcagaccttttctttttcttttgcggaggaagttcagagaaattttcctgtggttacaacagcagccagcaatcagtgagaactggctggctgtttatatccaaagacaagtccgttgtttggtccaaagacaagtctggaagaggcccctccaataattggtgtggatcactactcatcccataaaaaaacaaaactaagacatgatgcaacattttttagtacctggttcagaggatttgatcagcgtagagactgcatttacgttaggttacggtcagataacagtaattctacagttcatcagtgtttaactggagccaagggtgtgtttagttccacgccaaaattgaaagtttgactaaaattaaaaatttgaagaaaaaagttgaaaatttatgtgtgtaggaaagttctgatgtgatggaaaagttgaaattttaaaaaaaagttgggaactaaaccaggcccaaatgtgcctttcggacggtcagtgccaccaaaacgagcgaccgaaaaccaccgaattttttttatttataattttttttattaaaagttttacaaaaataattttccattttgaaaattgacggaagtagtcgcctaccgcccaatcgccctctcagagggcggcgaaaatgacgtggcagacggccgttcgctctcgggcgacggccgtcaacgaaatttgcaggcggcccccttgccgccctccgcgagggcgattttgtactgtgcggggggccgcctgcaaatgggcggcgagggggggcatggaaatttgcaggcggcccccttgccgccctccgcgagggcgattttgtactgtgcggggggccgcctgcaaatgggcggcgagggggcatggaattttgcaggcggcccccttgccgccctgggggagggcgattttgtactgtgctctatatttttgtataaatatcaatagttatcaaatctttttatattgaaaactatacaagattaaaatctccaagactgataaaatacaattttattattttttagggcatatttggattgttaccgtacaaatattttattaatttttagggcatatttggattgttagtgccaaatttttcttcacgaccaaatatttggtaaggtaaaattgcatttgatcatatttggtttgctgccaaaatgtaaaattgtagtgaagaatgttctacataatctcaaatctagattacgtattaccaatgaataggcttccattttcgtgtgttgtgtgctagtgggaaagaagatatgaagaggttgccttcagattgtcaattatatagcgtcgttttcactgcaatatatgtgaactcaatgagatacattattcattagatgtgacaagacgatcacgcgtgggcgtgattcactttatgtaaacaggcagcgccgaaagttgatagtgataactcgagctgccgcttttcatgtgtgctgttgtggactgtgcgcgctactggatctgacactaccgtgcagcgccgaaagtgtgttgtcgtgagcataagttgttctagcaccatatgaatgaaaagaactatgtagacgagacaaacacaagtagtactgcagtagtaatagcaaaagtagtactgttttacaagtttgtaagccaaaagaaacggtcacataaggactgaagaggtagaacactactgacgaggcctcttacccctgtccctcctaccctgcgccctaatgtgcccgtgggagtacgtgagtcggtccgggggtacggcacggccaacccgtcctgcctgtacaggtgtgacctctggctgctcctgagtgtgcgcctctggagctcctccaagctgagaggagcctagtacgtcgtggtggtctgcaccgtgcaagtcgtcgtcgtagaactggctagtaggaccagtcctaccggcgtgagacgaagaggccccagtaccgaagatcccggctgcaaatcctgctggacaaggaccatcagtttcgtacaggtatttaacagtattaataaaaagtaaagtaccgtgtgggcgagggatcgacgctccgtgagaggaagagctggcgaacgcgcccgaagaggtggcgaacgcccctgcggagctcgtggaagcgccggtcgtgcctgcgaacgcgctcgaaggcagacgaggtcctgcgatgaggaaacgtgcagttaaaacatggtgacataatcgtgcaaaagctgaaacaaaaatgaactaatatttgggctgaactgtaccgtgcgaaaccggtgctgtaggtcgcactgctccgaagctaggggcgctcgaaggcaaacgaggtcctgcgaggatggaacatcaagttacgacggggtgatgttttcgtccaaaaacagaaacaaaacttaagaaacctctgggctgagcagtaccgtgcgaaatag

SEQ ID NO: 4762 - DNA, 10115 bp, Oryza sativa
acgacatccccgcgcgttgagtgaacgatgttcacctgctttgcacagcagtctgagaagagttagcctcaagtttcagatggattcacccgacaactttggagctcggcttgtcagattcttcgctcaaattacgctatggttctagaagaaatgtgcatcgatagtggtttgtactccctccgtttcaggttataagatgttttgacttttgtcaaagtcaaactactttaaatttgaccaagtttatagaaaaaagtagtaacatttttaacccaagacaaatttattatgaaaatatatgcaattattgatttaatgacattaatttagtattataaatattactatatttgtctataaatttagtcaaatttaaaaaaaaccaaagtcaaaatatcttataacataaaacggaggaagtaataaacagaggtctacaatgaaacaaatgtggcagcagatggctcatccaagatttctctgaaacaaaagaacttcgttgatggttcgtcattggtcttctcaagaactcatatccaggtaggagtgaccaacaagctttatggtgttaccacttgaaatggggaagagtagtatggatgatttaagtttgatctgattctgatgtggaatgtaataaacagaggtctacgatgaaacaaaacaattcttttttttttgtttgtttctaaagcctatgcgcgttgagcgattctttcaatttactatagcaggcctgaggcaaaaaatatactataaacattagagtttaggataaggttcggtccaaaatttaaaacattgatcatcaattttatattagaacaagttcagaaaaaaaaatctaataactttacgatattacgataatacttttcaaggcaattcacatataccattaaacttaagcatctgagaaatcattattggtcaaagttttaaaagtttaactaaattttatcttaaacattaaatatttatgtatggagaaagtatcatgataagtaggagtaatagacacatcaacatagttttgctacaaaaagtactgcaatatttttttctttacttcacgctttttcaccatgtgattaattgctaactctacctactaagtagtaagtatatgttcgtctctctcttatctcttattttttgacttccatttttcattttttaatttatcagtccattttgcaccgttaattttcaaggaatctagtagacaattaattatttatgtcctagttctcactagatatgagtactagaaaaacataggcttagttcggcatcctgagttcccaacccatctccctcgtgttccgcgcgtgcgcttttcaaacaaataaacggcccgttttttacaaaaagtttctatacaaaagttgcttaaaaaatcatattgatccatttttgaaaaaatagcaaataattaattaatcacgcgctaatggaccgctccgttttccgtgcgcggaacatatgtttccaactagcagcagcgaacacagcattagtcatgtgatttgcaattcatagttaaatatataaaattccgtgtaaaataatacaatgttaaatatatgctgaaaaatttgagttttctattttctccttgagatacttcttcttttaatttacctttttttattggaattaatgtttttggactagttatttttgttttgtttttattttggatcatctaaactctgttttgtgagtacattagcatcctcataccgacaatcatcctttttacgtgcaactcatcgtcaagaagagtggttgcatatgcctagataaacgcatttgggtggtccaaagtgcattaaatgaaaaaaaaaagtaccaatccaaagtgaaaaagattcagtacagaatggtttaaagtaaaacagagaagctaatggagtagcgcactgtcttgctcagcttgcaagacggtcgaatcagtagatagtgtggagaggggaagccccaacgtgtgtttctgagcttttggctcatgattgtactcctaatacttgattaataaagctctctgtttgcggaaaaaaaaggggagtaaaacaatcggtaatgtttggctaatagaaatgggaaataattttccacttaccaaaagacatctttaaatcctaaccatttattccccctcttccatttaatcctaaccctttattcattttacaatcccgatcctttccctattttccattatccaaacacacccattgggtaataacaaccggtgcaaaagtgcgattcattccttttcaaaatgggtgtaggcacaagtaggtacagtatgtgactacgagcccacaattacccaatgaagtttgtcctgtttttattgagttgctataacgcctccctactttgaagcatccatgaattatccaatcctagggtattacagtgtacacttaatttcaagtagctagcatgccaagtggcagagtagtcaaatcacctctttgttacctaacctacgtaccatgatatggtactcctaagagtgacatatataacacatgctaatctcaaagagaaaaaaaatcgaaaggattggatagaagctttggccgttgctgggcagtttcggcgatccatccggcacgtatatacccgccaccactctacgcacgatagaattgcaaccaacgacactactaaagtactaaacgttaacttgacccaggtcaacaacgtgactgaattaaaattttataatatagctgaacttggaccccccacgttaacacacggagcagtagcattgcatctatcagcttaaaaatgttagatctgacggtaatggtgtttactttgaaagataagcatggaccagaagagtaatctagtcgtcgatagcaattagcaaagggtcgatcgaagctagaatatatatataatatataaatgacacttgatgaatacaatgataagcatattttccgagcgtcttcgttagctgttactccctcctgcctacaatataatataacgattttgagtttttatttgtaacgtttgaccactcgtcttattcaaattttttttcaaatataaaaaacaaaaagttgtgtttaaagtactataaataataaagtaagtcacaaataaaataaataataattttaaaaaattttgaataaaatgagtggtcaaacgttgcaagcaaaaactcaaaatcccttatattacgggacggagggagtaccactttcgtttttaacgtatgacacaattgattattttaaacgtttaaccatttattctattttaaaaatttatgtaagtatcgtttgctttattctgacttaatttattgtcaaatgttttttaagcccaacttaaattctttatatctatataaaagttttaaataaaatcgaatgataaaatatttataaaaaactcaatgacatcacatattaaataaacggagttggtatgagttgcaactttgaaaggtatgcgtctgacgttgagttgagcttgatcgtcatcgctacttaagtgcctcaccgaggggcagcaaacgtatcgatcgatcatcgcacattttgatcttccattcctcaatcgcctcctctccggcctaattctcctccacctcctgtgatctaatctctccccgtgtgtgtgcttctcttctcccaaattaatggcagcttcgtcgtcgctagccaagaatcgcgacgtgatcagcaccaccacctccgccgccctcgtgatcgccgccgccgccgtcgtctacttactcctgttccccgccgcggccacgacggcggcggcggcgctgtcacgcgccgcggcggtcgtcgccgcggcggcgatcaccgtcgtgccgcggatgctcgccgccctgcagtcgccgtggttcctccgcgccggcgggggcggcgcgctcacgagggcggcggcggcgtcctacgtccaaatgtgcgccgccgcgagcccacctcgcggcgacgacgacctcctcgccgccggcgcggccatggcggcgctgctagtggctgttctcgcggcgtcctacatgctactagtagctgatcagtggacgtctcgatcggcggcgagtcgaaaatgcaggcagtaaattaataattaaaatcggagtgaggcctcactgtagttaattaactgggtttattttttattttttacttttctgttctgatgacgagtaattatattctgagtgaggggctttgcttcgccgtttgatttatttactgtacgacttccttttggtccgtagtggttcactctgtcgtttgaggactttgtattagggccgaaatcccgaaattttgaaaatttcggaaattttggtccgaaatttccaaaattttgagcaaaatttagttaaatttgaacaaatattacctaaattcatgaaaaaattttggtcgaagtaatatcgtatcgaaggtgactgaaatgaccgaaatttccgaggtccgaaatttccaacctactccgtacttctctcgatcagtcttttgtgcatgcatgaatcagtttatatgacattagaaaatggccgtaggaaacagacctgatcaactgactttatgctttatgctttatgcagtttgcagttgtacctgatatgtaagcgatctctctctatacttaaaaattagtaaaacattagacttgttcactttgatgccaaaaaaaaccttaccaaattttggcatagttgtcaaaatttgccaaaattttgataaaatttcttatatagttaccaaaatttggtagcaaactaaatgtagccactttttttggtaactttaccaaaatttggtaaggttgaaaatggcatcaaagtgaacaagatcattgttatatactccctccattctataatataaaacacaactatttttttaggtgttccataatataaggcatgcatgtttgcatacaattaactaggacatcttctctattaaattattacttttttaaatcctccacccttaagatctctaattgtaacatcttgggtatttagctatagtattaatcacgctaatgacttgatcacactggctgagagcggtattgattgagccacgattctggctaggacctataaatatgttgattgttgttctattatggatcttaaatgatatttcgatcgttttcttgtcatttatttatcaagtcatatccatatgcatcattgatttattgttagttagactaaatctgttgaggagtgggataatttagtttcgatcaaactatacgtagattagttgtcacgaagctaggtatacatgcacagtagaaatcagaactgaaactatagtaaattattcacaaactatttggttataggttgcatacatacatacgtacgtacgtacgtacttacgtacatacatatacagactggcatacatccatgtgtacacatattcattataaatcttatacgtatgcatctcatatattgtgcagatacatggtgcttataaatacaaactgaactcatacgctctgcattcaagtaaaaggagaaattaaatgtattaggaaatgtttatatgattttagaccgcacaatttctatttaggaggttgcatatttaaaactttagttgtagtagcaataaaggaatttttgtgttgtctcaatctacaaattttgcatccaaccaaataggggcacaaaagatgtagggcctgtttactttgatgccattttcaaccttaccaaattttagtaaagttgctaaaaaagtggctacatttagtttgctgtcaaattttggtagctatataaaaaatcctgccaaaattttggcaactatactgaaattttggtaatgctaaaatttggtaaggttttttttggcattaaagtgaacaggcccgtaaaccgagccatctcaagccaaattccaaaattatccatttttgcataaaactccctgaattctagggcaattattaatcggtcccttaactctggagtaacctccaaaattccaaaagcttatagactagaatgcaaaattactaagtattccaatttcaccagatttccattaaattgtaaattagtgaaacctctcaaaattaatccaccgaacatgtcatggtgaggtgtcaatcaaggaagcagccaccaaacaacaagtaagtgagtcactggttaagttccaccaagttaactagttcagtgtgaaaccattcattccaaccaagcaactgtatcgtcgataccaagagactgttcactttaatgctaaaaaaaccttactaaaatttagcatagttaccatactaaaattttgacaggatttcttatatagttattagtaagattgaaaatgacattcagcagtaggcacagcagtagtagtactaccattttctactgcaaagagcagcagcggcagcggcagatcgccatagtggcagcaacattaggggcgagtagcagctatgaagaacaacagtacaagcagtagaatctcaactggagtaaggcagtcttgactagaaatcagtagaggttagggagataaagagatattcaaccagaaattatacacctcaccaacaccacagctcaaccatagtatccacagtaaagcaacttggtagagagaaagagagagatgaaccaaatctgaagaaggagaagtaggggtgttcggttcctgcatgaacagtgatttcagctctaggaggagatggtacttcagctcaagaaacaagatggatcagtaacagcagaagcaggacaagaagaaaggaggagaacaggcaactgttgtaaattggatcaggaggtaaaatcagcaagaacaagaaatcagaaaaatcgttagcaagggtgcaaatcaagtaggaggtacctgagcttcaagaagagaggggtttcagtttctggaggagcaggtggtgcttcagctcaaagaggagaaatcagagttccatcaggagaacccttgaatcagagtccagaagagtagctgcagaaccagagttccctatatcagtcacctaaaatcatggcaggtaatcaggagattgaaatgaaagtacaatcatatcatggcatgattcttgagtgatgcatatactagtatgtgtaggagttgtgagttgcatttgcatccattagaatatgaacaagaaaattaagtaatttgtgaaggataagtctttgtagtccttggtcgtggttcttcctttgcttttgggtagtttcaccttttaaggacagcatctactcctttagcatactttcagttgctaggacagctgcggttagtaggacaacagcagttagcatctcctttatgcctcatttatactttattcagtttggatgccttctaggacagcatcctattcaaatttcgaattttagactagggtgcagcaataggcttacagccagctatggctatatatatgtatccaacctccctcgggtaggtatggctttgagtttatgaataaagaaaaccagaaaattgccccatcctaagtgccatcctcttctcaatgagagtaactattaaaattctaacaatttgagctgtagagtaggaggtgtaactagtaggacataaatatttttttatttaactgataagtaaataggttaatgttagtttataattatttggggttagtaacaagaaacattttagtttttctagaatcattatgtaaatgcatttaggtaaacagctgcgcatgcatttgtttggtgaatcctgaaattataaatagttagaattaatgagtagagttataagtctctatagcagagcatctagggcaaatgattctagattagagcatggcatatattagttctgtaagtattacttcctccattttataatgtaagactttctacatttcccacatttatgtaaatattaatgaatctaaacacacatatatatctagattcattaacatacatatgaatgtggacaatactataaagtcttacattataaaacggagggagtaatcaatataaatcgtattccactgtgagaaacattagcagccttaaaaatcaaccaatgcattagttcttaatattagtgatactgaatgtataggattactctggatagcaagtgcacaggtatatctttagttcgaataaacctaaacttatgggtctctacagcaagtcatctagagaagagcataatatcagaatctaaactttagtagttgatcagcataaccttgctaagaccaataccataaacaccattatttaactgtgatttcagtagtaagtatactttggcatcaagatgaagatttataatttctaggtcattaaatccctcaagtgatactaccattatgcatcatgtatgaatgaaatcatattaatcctctagattactattcagcatggcaacataaggatctgatcatgttagtttattagtttgtaacaaattttaatatttagatgtgttgctttttctaatacaaggatctaaatcactaatggaaacgatagagagcaagagaatagagtagagcaaagaagctacattttcatatattacataagccgtagacaccatttacataggggtatatgtccttttataggacttttaggtcggtttctacaataagcgacccgctacaatagcatgtttttacagctcatgttacagctcatctaatagcacaaaactagcttgctaccaagacagacgtgctgcttgccaagcacaagcagtaatgaaactacctgatacagtgtacacctttgctagctagtaaaatttgctttgtatccttccatgccaacacaacaaagcatacaactcacttgtgtattctatagcccattatcactcatttacaactaagcttagctaatttgtgctagaaacttcaagcagcaacaagcaaccaacttgaccaactagtagtcaaatccaatttgactttgttatttcaagaacacaaattaatttccaacacgatggtcattgcataagcataattaaggatttaatcatgctagagtgatttctattttagtaatgcaattcatagacctattcatgtcagcattcattcatcatgaacatataggcatcatccatcttagcaacccaatttctctagaaccctagatccagtaaatacaaccctaagtataacatcatcaagtgaatcattaggacaaattcacaagcatcaccagtacatcacaatttacataacaacaccatacaagagaggacaccacactagtatatcacaatagggatcagagacgggaggatggaataggtagctcacctatggagcagagggatgcagccaccggagttgcctgtgtttccaccggccatctccacggtggctgcagtagcaggagaccggcggctggggttagtttaggggcagagaagcgaggatccaagaaaccgattcaggccggcgacggttgcggggcggtggctagaagggtcgccggagtggggtgtggcagcaggcgcaagggagagcgacggcactgcctgggaagcggcggcgctgggtggagagcctggttatgtaatctggatgatattctcaagtttggtattgaacttgtttgttctcaaatggttatatgtgcattatgggtacatgctaccatttttttatctatgtcaagtgctttcttgacttgtgtcaaatgctctacaaattgcaaggtacatgttgccaaaatttagggtacatgctgtcaaaattttgcttacatgctgtcaaaattttgccatcggagcaacagtttatgaatacacatatatacaatacatgcagcaatatatgcagcagttatatgcagcaatatactccctccgtcccataaaatatcgaatcctagaagcccgatgcacttttagtccaagcggtgaaagatcaaaatacccccatcaagtacaaccatgattagcacttttgttttgaaaaaaatctctgtgaacactaaattgttcccagccccttcctcgatacccaggcatcccaccaccggatgttcgccgtcgatgcatcagggctgcaggaat

SEQ ID NO: 4763 - DNA, 27294 bp, Oryza sativa
tccccagccgaagttcccttaggttcctcggaggccttgtcaagatggcgtaaagggacagtaggataggtttcaacgctaggtgtcgtcgtggtaaggaatctctgggtaaaacacttggcgatagtgtgtacttgataccaactttgttggagtagaggtagtaggagaatcgctacaccgctggtcgaggaccaggtagtagtcgtaactcgaccacttgaagtaaaaggtagtgggagaatcgctacaccactggtcgaggaccaggtagtagtcgtaactcgaccactggaagcaaatgtacgagagatcactacgatcaactggttgagaaccagtgagtaggtgtctctcgatcatttggagtcgtggtacgaggaccgctacgctgccggtcgaagactagttgtagctgttcctcaaccatctaaagtcatggtgcgaggaccgctacgctgccgtagtcatacctcgaccatctgaagttaaggtgcgagagattactacgtactggttcgagaaccagcgagcgagtagaattatctctcgaacaccaatggaagttgcggtgcgagagattgctatgtactggtgcgagaaccagcgagcgagtagaattatctctcgagcaccaatggaagttgcagtgtgagagattgctacgtactggtgtgagaaccagcgaacgtgtagaattatctctcgaacaccaatggaagtcgtggtgtgagagattgctacgtactggtgtgagaaccagcgaacgtgtagaattatctctcgaacaccaatagaagttgtggtgtgagagattgctacatactggtgtgagaaccagcgaacgtgtagaattatctctcgaacaccaatgaaagtgctagagttggtttattacatgtgtatctcatgtggccagcatgactcacatacccaacttatagcatatccggatatccgttcgcaatcatgtcgggtgatcaagccgacggcgttcgtgaggaattatccgttaacaaccttttcttgagtagtccagcgatggccggtgctatgagatagatcgtcggtcttcgttggtaggttgggtgcgataactccgcatttgtcgataatgttctcgataatagagtgtactcgaccataacctactcgagtgctcaattgttcctaaaaaatattttctagaaggcaagatatatagcagataatatcgagtatgtacttaaaaaaactgcatggatcttctagcattatcaggatataacatgcagatgtaaatatcatgcattatgtaaaccgtaaacaagcatgatttatacagaagaaaacagagcgagcccccagcgttaggccgtagttggcctaacatcggggacgcttgcacaatagatattgtataaaaaatatgctctaggtaaacataataaattatagatctgataatgctgtatgatctgaataggtacgataaattacatataaaatattacgtacttttgtagatacatgccggatatatctacgaaattagtagattaatttaaaaattcaatctgctaattacctctgttgatgtagttggataatctgcacatgtacaagtgaagcaaccgtggatgagtactgtggtggttactcctgtatacacgtggctctttggctttgtgcccacgcatgtagacaaattgacagcaagaccaaaatatacacgctgtaacagcgtgacgttaggtcctctgccatggtttgtattccgagtagaaatcaaggagattaatggatgcccgctagttagcctggtgcatgcgagtggagcggcatacagggcagtttcgctgtccttttcgtcatgtgcttgtgtgtcatcgagaatcaacacgaagccgacgaggacagggctcaagcgggagcactctcctgattagatttttggcggcgacgtggtctcaaagtaatcaatcgggccgaggcctcacgatcgacaacattgaaccgttgttctccgcagcggcgacatcttgaagcttggtcgatctcgccggatcgaatagttaatgatgatggttccgatcttgtcggggcacgtactctggtcagattagatctccctctcaaccgaagtcgtcgagtaggttgttgttggagaatccatctcttaaactcatctcgtcgaaaccctgaagcaccaaaatccccctacctggcgcgctactgtcgacgtttgatgtcgcaattctggtatttacatagtatggggatcgtcggtgctaggatatacgcgagactgaggtaaaagagacggagacagggatttttatacaggttcgggtccctgagttgtcaggtaataaccctacatcctgttggccggagccggagttgcttttattcaccataatcacaccagtacaatatgtggggtagcctatctaaccgtcgtcgacatggcggtttgaatgtctgactcgtagtcgatgacagggtagtcttcctcctcgaatccgtgcccggcgagatcagagatagcgctttcgtctctcctgacagtatctggagacaccgtatgggactagccgtgcctttctctgaagtcgatatccggcgtcttgtcttggcgtatgttggcttgtatgttgtcccgtgtattgtgtcccctcttcttctaggggccttgtatttatacccatataggtgtccccttgtctaagtagaactagggaaaccaatatggatacaatccgagtagcccttgtcgtttccatgtagaactctggttgtctttccttatccggaactccctccatatctgaagttagtttccgtataagacatggtacgtggtgcgtcctgccgagatgtagtcgactactattaggtatgtggtatccataaccttgacagccgcggtatcgagatactagatattgtaatcagacaatgtttgaatctagaaattagaaccatctgaattggtttatgttcatctatgaaattatgtagtagtgaataataataataataataataataataataataataataataataataataataataataataataacaacaacaacaataataataatagcagcagcagcaggagactgttcgatacgtgaccttaaatacattcttgaattgtttttggggaggaggacagataaatatcactgagggttgatggataggatcttctagggtaaggaagagagagggtgaatcctatctccatcatcatggctttggacagatgtccgcttcagactgaaggaagctgctctatttaagccgtacgtgatcctacagctcttgtctcatgagtagtacttttccctgcgctggctgtggcaaggtccatgagttgagtgattagagctagtagaagccttcccggtaattaatgtatggaacattgtcctttggtttttgtgagtacatggctagaataaacacctgatgtctagctatagaatagatagattagtgtaaaaaatatactaatatattagtgaaaagactaatactctggctaacagcagctacatgcatgcatggaagcacctactagtacttgttggttctgtccctttagcatagtcacatcaactagctatcttctattagtagctgtcatgcatgaaaatttatatattgaggctgtgtttagttcgtgtgctaattttttttttaaatttacgaacacacatttgaagtattaaacatagactaataacaaaacaaattacagattccgcctgtaaactgcgagacgaatttattaagcctaattaatccatcattagcaaatgtttactgtagcatcacattgtcaaatcatggcgtaattaggctcaaaagatatcgcaatttacagtcggactgtgcaattgatttttttcgtccacatttgatgttccatacatgtgtccaaatatttgatgtgacagaaaagttagaagtttgaagaaaaaagttggaatctaaacacggcctaattaatatcaaagatttgcatatttggctaggcgaaacgcacgggtagaacgatagaaaactaggcaagactacgcccatcaactattttacttaatcatctctaactaaatttgcttaccattattacattgagatggtgatactaacaatctaacagtaaatattattaatacacgaataatggattgatgattttatcagtgagaataataacgtgatagtgatacttagcctgagacggccgatacctgaaacaacgatatcgagtcggctgatatcagtgtgagatgaggaatgcctcacacaactagggaattcagcggcgtgattctcagattagggtatcactaattgggggagaaaatggattgaaggaacgatattatgacgattattttaatacctctgcagtgtatttttaactcatttactatgttaaatgtcttctattatttatcggttgttaatatctaagggtagtagtattttctgtctttaaaaacatctatatagctatatgtactaatcttgctgagtatgtgtaatatactcatatatttactatttgatgtgcgcagaaactagtcaagacgagatgtccgagggaaatgatgacatgcaaacctaatggggagcgtggtctacttagtctttagaagcatacaagaggacataccatcatgctaggtatagggtatcgtcttggtaataataagttggtaagcgaatcaaccgatgtattatgcaatgtagctggtgaaaaataaatggaaccattgttgaaagtgtccaagctctagttgtgatagttagatattacatcttgccttatatccttatggacttatatatatatatatatataaggatacgacagactgtcaaaaaaaatatttgggtcgtgacaaattatgaatacaaactcggtagtttattgtcaggacctaagttaaatgaaacattatctctagtgtgtagttttctcttgataaatatttgtatgccacatattattattactctattcttgttctgaacggttacatataattgatacaaatacggattaatggtgtagggggtgatcgcaaacgcgcgccccaagcggcaatgaggaagaattgcatttgcgtgcgatagcgggtcacagttaaggtacgaatttccccactagcatgaactctgtggggtcttcaaatataagaggcaaccatttcttcttgatacacaagcacaagcccttttgagaaacccttgtagattgctcgatggggagggaggcagtgctgctaggatataaattaatagccgaccaattcggcttcgtcattccatctctcctgtagaagtaaatagtgcggtttcttgcaaaaacctctctctcggccagttatctttcggaaatgctaatgggcgggtgatcgctcccccacccgcctagcgatcacccgcccaccctctcccctatactactagatgtactcctccctcttctcccccttcctccttcccttctcctctttctactacagtaaaccatacaattttttttaaaaaacaaaagttagaaaaatttatgtatagaaataccatatataaaaaaaatttgaattcaaatttaaatttgaatcgggtatgtaaacttttgacttataaactttgggtctataaactttaggtgtataaattttagatgtatagaaatactacatagagaaaatatttgaattcagattcaaatttgaatcagatataatttaaattcaaatttgaatcgggtatataaactttaggtatataaactttaggtgtatagaaatacttatatatgaaaaatatttgaatttaaattcaaatttgaaatgggtatataaacttttgacttataaattttaggtctataaacttgaggtgtataaactttagatgtatagaaatactatatataaaaaaatatttgaattcaaattcaaatttgaatcggatatataaacttttgacttataaacttttagtctctaaactttagatgtgtaaactttaggtgtataaactttagctgtataaatttactaaaatatgaaagtaatgcggtgccaaaaaagaaaaccagaggagggaggaaggggggaggtggggagcgaatctgatcgctatcccatccccacggtgatcgattgcccattaggcgtacccgttatctttcacgacagagctatcctttgttgacgggtcgtgccactagattactatcgtctatggcccgcaaactgacccaaatataatttgttttctctatgaaatccgagatattagagcccatcgtgtctgtcctgggatcataatagccaatttcaatctaatctatcgagaccaagaaaaacaacaccaaccttaaccggcgaatgatgggccgcttccgtctcattcttaatgatctagctctgcaggagctagtacatcttaacggtcgttccatacttccatcatgtggtcgaatgcccgggattcccgagcgcctagatagactgttcgtctatgtggatggggaagagtttgtttccctcgttaccttttgaaaccctcttctctccatgttgccggccctgccagagaaaaggagattctaattcgaatccttctggtgtcgtctccctgctccatccatgacctgatcaaattgatgcaaggagaacgctcctgaggaagcatcgaaggcaaaacagtgaggtattttcccaaaccattagatttacaaaatgatctttccgtttgcttattatgtatcaatcttccataggataatcagatggataatttgcatgtttattatgtaaagaaacctagaaccaccgtccaccactaggccgtcgtctcccacggttatccccctaagcccagcgatttctcctctcttccatctatcccaaccctcctcctatccccacccaacccgggaccctaaaggcttaaaccctaactcatcgagtcaccgccggtcgccagagttagagtagaaggagtgcatcacgaatcgggacataatagaaggttagcaattccgatatttaaaacatactacctccatctcataatacaactattctagcatttaaattttatccataatagagctgctgctctatctatttcctcatcataatcaatggcaactcccttttatttagtctcatcctattctttgattattatttttaaaaaaaagtgtatcagtaaaacggagggagtacttagtgtctatgtgatgagtttaaaattttgagaaacaactggttagtaactagcttatgagagtctggaaaacccagcttctagcttatagttcattttctagattttataactacatcttcttataatttggatgagaaactggactatttaaaaaagttttaaattttataagaagttgtagctgttagaagctttctaaacatgtaagaaagcaagaggaatgtgttactccctccatctcataatactgtaatatagcaatttagtaccggttgaaatatattctagtattatgatgaatctaaacaagttactaggttactatattatggacggagagagtatatgtgattttcctaatagtgtatttcctccgtccattaaaaaaacaaacctagcacatattaagacacatcctctccatctcatagtactgtaatatagcaatttagtaccggttgaaatatatcataatagtatgatgaatctaaataagttactaggttactatattatggacggagatagtatatgtgattttcctaatagtgtatttcctccgtccattaaaaaaacaaacctagtacatattaagacacatcctgatactacgaatctagatattgtgttatattccgtactactccttccgtctcgtaaaaattaacctagtattaaatatgacacattctattactatgaatctggatatacatatgtccagatttattgtcctggtatgtatcgcattcaattttgtttttttatagagagagtagatttgtattttatttgaccgagagaatgcatggcttaatctttgagacaagcatatgaaaaggataagaatctgcacccccataaaaaagtagaggcccgaaaagagcccaatacccaaaggaatccacccaagccgatggtggttttagccacgggtctcagtctcactcccagattctactcccgctcctccatcgtcgtcgccgcgagtttgctcctctcggcggcgccctcctcgtcgtccccgcgcgctcgtgccgctgctccggccagcgggtactccccgtggcgaggcaggtgagcggggctcttcgagttcacgaggtgtcgtttttttttttcggggggatttctccaggaggattagtagagatcaggtgtgtcctcctttggatcgcttttatctgttcgagcgattgcttggtccggtagcgattcgggtgtgagactgagccatctgcgcctctgttactgtttctgttttttcctttaatggggatggttttctgaaaattaggatggcacccagcggtatgagattgttgtggattgtttgatttcctggtggttggtgaagtcagaaattgagcagtactctctgtcataagacgttttaactttggtcaaagttaaactactctgaatttgactaactctgtagaaaaaaaagtagtaatatttacaacacaagcatagtttcattaaatttatatgatgctatcaactgtgaagaggcttcgaggcaagatctacaaacgtctgcctcggctcgctaccaaactcgtaagcaaacagcgggacgtgaagcaagccagctacaggtgctagacggctttctcgtcaaagcaataccaaagtgtttcaaagaaggattaccttgacttaggtctgcctccggcctaaattaaatcaacctaagttaaatggagtctctatcgttctgctgcaccccttctcaaacaacgcgtttgatttccttccttataccaaaggaattccttctttctcttgccgatcacatccaagggtcgaatacatcctgtctttgaacctttgtagtcctatgcatagtcagtactatagcctcactgtcctcgtcgaggatagttattcattaaggttaatttgattcaatgaccagaattctgcgaggatatatagctcggagacgacgggcaaaaatgcgttcatttgcctcaaacttttcggggtagaagaactcgttagttgtagttgttccgaagggacaagtcgctcccctctgctgaccggaggaagcactttggaaaataaaaactcgatctatacctccgggcagcagagcagagggaacggagccctcgtcccgaggcctttctatgaaggcgagcagcccagcccccttgttgaaattttgatattaaggaagccgtatttcgcaatagcagctccgagaagctgggcttagggtgcgcctcctgcggtcgtttcagtgattcaattggctggcttcccccagctcagactgatgccgccacctctcccaggaccggaatgattatccctgcccgatgggtctacattcatcctagaatgtcgtcggcatccaagctttgaacaatactaaaagctgcaactcgtctgctattccgatcttcctctgattcaagtgctaccagttccttcttcaactccaggccaggcaagagccgagaagggcttcccaaatttttcccgcggaggagggagaatccgcgagtccacgacctcctactcccgagcggcctctgactgaaaaggatcgaatttatttgagtttggttttacatgcggatctggaaatgcaagaggacctagaagaacgttgctccttagatgtatgcagctgaggcatcctaacgaatgaacgatttgaaccagttccccaacctgctttctccccgagaaagccttcctgagattaaaagaaaaaggtttgaaggttctgggatcagtgatagttcggaaccagcaaagggaggctgaaaagccgtagtgctaacgcacgccctgtagttttgaagcaggcttcgacagcagcgagctccgcgtcgaaaagcgaagcgagccgcgctagcgcgctacgattattccaaaattgccccttcgctttatcaacttccagttataagttgtaacttacttcaaacgatttgagacctcttgatatccaacattgttcttaccagaaccaaaggccacaggttattgctaatgccttccactatactcaacctgcatggcaattacttaatcaaagtcaagatgcctatccacataggaaaaacccaaagtcaaaagagcaattggcctgcaaaaataaaggatttgttctcttttgtaattagaacaaacataaacaaattggatagaaaaggagcggaaaccgattgattgtacacttgctgttctcaactgggcctctgaatctcctctggtttcacctttgcgagtcgaagtaatttccggaaagacacagaggagctctcatgcgtggaccaacagtagccctgtcctctcctctttgttggaagatgagtacacatcgggtaatccgcccacgagagcccaatcacaagaggctcatatagaaagcaatcagcccatagcccaatatcgagaccacagcctattattcaaaccacaaaggatccgtctttcatcgtccaatcttctcgatcgaacatattgacatcaatactcctttccatggccattcacggcccgcgaagatcaaccactcgtgcccgagatcactatccaatcaaaaaccagacttccaagatccatctcactcagacccttttgaatgtagcggataacaacggagcggggctatcgaattgatatgtattcgaatcttaggagctggtaatcactgatatgctcatattggtgacgttattgttgctgtaatcaaagaagcagtgcccaaaatgcctctagaaagatcagacagaagtaagacgagctgtaattgtacgtacatgtaaagaactcaaacgaatgtcaaaacaaaggaaagatgattatcttataggaagactgccaacactgactggggttgttcaatcttaagtggagtgagttaaatgacttggcttgctcaattccttcccggtgtaatttcataaaaggaatagcactcaaagcttgaagataagttttgtactcaattaatttctcagtccctctaatcgggtgggcaccggccggccggatccccctgaaaaccgtacgtgcgggtctcctttttgggtataaagataaaggagtcgagtttacaattgaataaattttcataatacatttgtcttgggttaaaaatattactattttttctataaaattagtcaaacttagagtagtttgactttgaccaaagtctaaacgtcttataacctgaaacggagggagtaatatgaatcactagctagctggggatgtaatttactaatttacataacatgtgattgaccattgctgcagataatatgtcttgtccacttcggctagttcttagtttgctgtattaatgtaaaatcagttttattcagtggacagtgatctattagcctcagtgccgtggttgctttattgggttcaaaagaattaattgaattgttgcaaagaggcaatagttttgatagtgctaagacaatgacttgtattgtaaaaaaaaaaagtgccacatgatggggacagcgcgatgaaaagaaatcagttgtaatgacgcacaattgttttgttcttagaatatgtattgttttatttttatttttatgttgaggacctagtagcaagtcttatgctcgaaattcttggtctgctttatgtagtgatcacttgacccatcttttctggcaatgctgatttaacctcattgactccatctggcagcattagtagaatatcatcgcacccaacagctatggctaccacacaagcctcagaagcagccactgagaaaggattgcctttggggatggatgtctccatggtggatgaatatgcttcccagtccaagctgctgcaggaattcgttaaaattcccactattggcaacgcttggatcttcaattccaagactggtatgtgctgttattgctatctggttttactgaacttaggtttcttactcttcttctcgtgttgtgcagaaaacacatctagggcgatagtttctgttggccaaacagatctgttggcaaacaaaaagaggagcttcctattaaattcccacatctcaaaaaattcctcaaattctgtggatttccagtggtctcccttcccaatcgaaatgagtggagtttcagcagtaattccatcgccatctgggagaaaacttttactaatacggaattctgaggatgattcccctacaaaactagaagtttggggcccctgtcagttggagaacgagattcacattgcacaatctgttcatggatcactctatgtcgacgaatggtaaactatcctgcctcttttagaacaactttcttagttttttgtgtggtagtgggtttttttttggaagaaagacagaggtaattagggacgagagattgctccattcgccactttttgtacttcatgtttcttaaatgcaggtttgaagggatatcgtggaatcaagaagagactttagtagcttacgttgctgaggagcctcctcaaccgaagccagaattcaatgattcaggatacaagaaggctggctcgtctgaaaaagactccaagagctggaagggaaaaggggattgggaagaaacttggggagaaacgtattccaagaaaaggatacctgcattgttcgtggtcaacatttcaaggtgtgtttctggttgttctgaaggttgaatccaaaatagctttaaaagtactgcaattttgtgaggaatagtttcattgcagcggtgaagtgcgagctgtgaagggcataccgagaacattaagtgttggccaagtgatttgggctccatcatcatcacatagcctggtttttgtggcgtggtcatctgataatggttaccaaaagacaccaaggaaacttggaattaaatactgctttaacagaccttgtgctctgtatgctgttcctgatcctttcatggaagaagctgataagccatcacttaagtgagaacacctgtccttgatgacaatatttattcagttctatttcaactatgcaccattgtaggcttcctgttctaacatattaaggtattaattgtcacattttagttattttctagtgatcgtgtgacactgtaaattcttctctcagaataattgtagcagcatatttttttcaaggaaaaaaaatcttccatatatattttcactcttttttcctcattaatcctagtcctgagcagacaaatgctaaatggattgtatgcatcatgtctcaaaaaatagaaagtttatttctgatgtcatttctgtttattgtacagtgtcagtaagggtgaaactgcacctacaaccaagttaacatcagagttgagcagtgcttttttcccacgattcaggtaggactgcattcagttttctttgctcagtactgttattcagtttaggccatatgtctcaactattatattggaagaagtacaagctacacatcctagccgtatttctttaattatgcattataattgttaggcgtaatttttcttctatggtttaaaatattttaatcaaattcccttaaagcatgtcaattgattgttcatgcttgttatcatgtattttaacctaaatatttgaacaatcataattcaaatgggagtgaatttggaaagtggagcattttgggctgatgagtaggtgtctttattatttccttgttcctgtaatcctgtggattgactcagtagatattaatttactgcaacaccaatacattttatttgcacatctacaattgaagttttcatgtctagattataacttagtactggtagctgatgcatgtagatgaatgttaacaatgcgtcgcaaaaatgatatggaatctttattgtacagtccagatggaaagtatcttgtgtttatctcagcaaagagtgctatagatagtggaacacacaatgcgacaaattcaatgcataagattgactggcctgcagatgggaaattggagggcctcagtgttgctgatgtggtacaacaatgcctttcctttacttgttaattttttaatcgatcattttgtttagatggcttccttttatatatagcttcaaagtcatggcttggaaaaatacataaatctaaccagtgtttatttgagcacattgtttgcctgttggctatacttgattaaagatatgtatttctggactttgtgaagtggaacttcaattatttttttaattattgaagtatctaaattcaatttcagttaaaagaacgaagttcagagggtaaaatttataatggtgtgtttctttttataggtgctctgcatatccgatatcaagttcttaatgtcttagctgttatgtaggtacctattgtgatgtgccctcaggatggttgttttcctggtctgtactgctctggcatacttaggaatccatggcttactgatggacaaactatgattttatcttctatttggggaagtaaggaagtaatactttctgtaaatgttgtgaggtgattacaagcatttttatccatcagttagaatgatatggctataaagtttatttatttatgaaattacctattttcttcacagccgtgaagtttcaagagttagtcctcaggattcggattattcatggaatgttcttgcactagacaaggataatattcttgcaggtaattccgtaccgaagttacagttgtatcccatagttcctttggataagatttcatattcatgtgcctttcccaccttttccagtttcaagcagccttattacagttcctcaaatatactatgggtctgaggtttgtcagactggaaaaccaaaccaatgggagtggcaagaaattgcaactccttttccgagtccttctgataaggtataactgaaaaaatgcgttgcttgttcaacttttccccaaaaacactgacaaaaattttggcagtgtaaagtactaacagtttctgtgatgtatgtttggcagatcagtgcaatattagcagaccataagttcagtatactcaaaatcccgattagcaactcttctaacaaactcgctgatggtatgtgtacaacccaaagctcctttctttaatgaaatgacagacagctctcctgcattcgaggaaaaaaaaagcctctgactgtttttttttcctggaattggtactctttggtgccttgtgttttgaatacttctgttactgcattcttcagttgacgctatgtttttcttgagatcagctgtactgtctagtacttgtaggctgatatattctgaactgcgacaaaatctaaccatgttgcatttactcaaggcaacactaaaatgcatttgtaagaaagttctcaaagctcatggtagaatactcttcttggttgtttgcatccttaaggatgcatgctaagcttcatttgcattttaatgtttgaaaatgtactttagtagaatactcacatcctctccccttcctaaatttttatattttataaaattgattcaggtgctaagctgccctttgaggctatttttgtgtcctggaaggattctgcaacaagaccaacaattgttgttcttcatggtggaccacacactgtttacccatcaagctattcaaaatcgttagcatttctttattcacagggatataaccttcttgttgtgaactataggtgagctttatttttttttcttccagtagttcttctgttgaactaggttaaaataccctgtcctttctgaattctgctttggaaatatatcatattaaacactaacattaatgtccacgtacacaccattctgttgcctagaggttcactaggctttggtgaagaagcactacaatctcttcctggaaatattggttctcaggtgcactgttgttgatttatttccatgttttaagattattttcttaagttgccagaaattttatatgaactgtcattacgtacaattgtttaatactcatgaacaggatgtgaatgatgtattgacggctttggactttgttataaagaaaggattaatagatgcatctaaagtagctgttgttggaggttcacacggtggtttcctgacaactcatttgattggccaggttcttagcatgcctttgttattctgaattctttatctatgcaattattcattacatttgcagtttatatttcctttagggattcaattatttgtgcctaatcgtttgcacaaataatctagcacaattcttgttgtaaactgtatatactcatttggacataattgggaacagtgtcttttgataatgtgtattggtctatatgaaactcttatatttgagaaatgtgctgtaaacttataattttgggagggaggttgtaatttgtaaaagagagtagtaagtttaatataagtacccaagcacactaagttatggtcagtgaacttaaaggctcaaagctaaacttggatatttcaggagctctgtagcagtgcacagctaaaaattcttttaaaaaaatgatgacaccaatttatattagctattaaattatatattacattgcaacgcttaagtccagaataatatcctagaaaaacattcttacaagagttaggatcagcatttgtttccttttcttggaagtaaagcttcactgcagtgtaagccgagctgtttttaccttttcatgattaagaagttcacatgtgatattctcaagaatatttcctgattttagaatataattatttccttgacaaaaatagtgagaaactactgctgcatgtgggaactaggtctatacagtttctttatgactatacatgcaagacaataagagttcatgataggtctatacagtttctttatgactatacatacaagacaataagagttcatgatgcacaggcaatagcacatggattcttctatttatcaggtcttcttggattctgttgaccttatgtttcatggactgcaggctccaggcacttttgttgcagcagctgctcgaaacccagtatgtaatttatcattgatggtaggaacaactgacatacctgagtggtgttttgtggagatttatgggaaagaagggaaaaactgcttctcagagtatccttcatttgatgatctttgtcaatttcaccagaaatcaccaatatcacatatatcaaaggtatgtagattctgcatacttaaccttttacaaaatctatgcttgaggaagaaagtgtagttccctcatgcaaatttgctccttgaggactttgagtaatcttttcttgacagtttaagaaaatctgcaggtgagcacgccaacactttttctccttggagcacaagatctcagagttcctgtttctaatggcttacaggtaatttcttatgcacttctgtttcatttttatatgatgaaagggttgtgaaatgattactagtagcaatgttgcattcatgttattgtttgcgtagacaagttcagtcaattttcctgaaaaccattagtgaaagcatatgattcatattgttccactatatactgcttgtatctatttatttattttcacttttacaaatgctggtttatgcctaatcataatcgcaacatatgcagtatgcaaggaccttgaaggagatgggagttgaaaccaaaattattgtctttccagaagatatgcatggccttgacaagttagttgtactttttaatcattttacctttgttaccccgatcagtgtcttctgtgttgcaacatttgactaagtcaaccttgcgtcccctgtgcaggccacagtctgattttgaaagcttcctcaatataggtgtttggttcaagaagcacatgagcaaataaacaacatgcctctgttaccacactctcaccttgcttaataaatgcttgtaatttgggtcaaagcagcccaaggaaacgtggttctgttggcattctaataaattaagcctgctgtaacatttctgtactgggataattcttgaaaatgtaaatgcatttggttataaaattttaccctcgtggtacggaactatggattacaaatatgtgatgttagattatgctttactttgaactttgaagtacttctagttcacggttgctgtcctgtagcctgttgggcttgggcattccttttatttttatctttttttaggaaacaatgggatcataatttcttttgaatttcagtgagaaaaaaatacatgaaagttcagttcaagttaggcacatggaaatgctgattgagaccactgtaacttctgcttctttgcatcaagatcccttgaagttgccttctggataatctcattttcatcagatggtacaaagagctttgttgtttcatacgattttaaaaaggacaacaatataagttattgcaaaggcttcttgtgctgttcgatgctttcttcgtggatgcggacctgacgcaaccttttgtccttattgctgggttcctcttgtctcattgtctatggtggtatgtacgatcattagtaactttttaagattccttttgttattttgggcccattctttgagacctgacacaaaaagaaaaccaaaatttgatgccatctgatcctcaccaattgtttgttgttaggtttgttgggatcgttgctaaggactgatgatgttttaaagctcaactgcagtcttggatcaaccactctgccactagactccatttgcacttcactgcaaaagcagaaaaatatatgtaagtattctcctttccttcgtctcctgaaaggctaatacgatttataatctgattttattgttttgaggcttctaacttgctgaattttgttggtcctaagttgtttcctcctgcactcagtctggtcctcttgattattgctgtagttccagaagaatctgattttgttagtagaactagtcccagacttaacatccaggatttaatattttttagtgttcatcgtattttttagttatgtttatacttttgtactacatgaaaatcaaagcatttagtgtcagagttctccagaaaaggattttggtgggaaggaagaatgaaagatacttcattttattaatcttaggtagccattatagaagtttccatgttttgtttgtctaagtgattcaatattttttcttgaattggtgcattgacaacgtcaaatctgtccatggattgcaagatgaacaattgggactgttgttcttgagttgttaatggaatttatgaagtataaattaaaaaatagtttgtgtctgaactacattaaagtgtatgaaatctgagtcttagtacggtagtacctgaaatttttcacgggtaactgcaatttgaattatgaaagagttaaggtgatataggttgagtggtgtgctctaacctctaggctcttttggcattgaaatgtatacccatacatcatgaagttgaagtcaggaattcaggtttctcagttttcatcttatcagtggaattgacaacaaaatatacttgagcttccctgcagcttgtttaacatactatattcttgagtttcccttcagcttcctcagcatattaacctttgtgacaatgcagatttagcttaacccagtagattgtgtctttccaaccgaccttacaagtgatttgaatcttctttgagaaagacaatccattgggaatggatgcactggcatctgaagaatacgcttcacagtcgaaactacttcaagagttcaccaatgctcccagcattgacggtgcttgggttttccagaccaacaatggtagggatgattttcgattatacctcattagtaatcatcattttactattttccagaagtggcgtaaagcaactcttgtgtcatgtttgcagaagacagatccacagcaatgtattcgattagccaaacaaacctactggcaaacaacaagagaaaatatattttgttttctcatattatgagaaatggtactaaccttctggactttcaatggtctcctttccctattcaaatggatggagtgtcggctgtcgtaccatctccatcgggatcaaagcttcttgtggtgcggaatggagagaaaggttcccctacaaagcttgaaattgttgatcaatcacatgtggagaaagagatacatgtagctcagtctgtccatggtccactttatactgatgagtggtaaaagtacagcataatacctgcacttttcagtccattcaacctatctgtacaatattctggatcatgatactatttttgttggcacaggtttcatgggatttcctggaaccaagaagagaccttaatagcatatattgctgaagattcacctgaaccaaaaccagtttttgatgatactggatatagaaaagaaggttcttctgagaaagactgcaataactggaaagggcaaggggattgggaagaggattggggtgaaacttactccaaaaaagggagaccttcattgtttgtccttgacattaataggtctctcagcaccttctaattaatacataatgttgacctgaccatagatctgacaatacgacttactgaaaccgtttatttgttgtattcagtggagaagtacgagctgcaaaaggcatttcaagatcattgagcgttggccaagttgtgtgggctccaccatcttcatgtggaaggcagaagtatctgatttttgttggatggttagagcacaatgggtttcagaatactcctagaaaactaggcatcaagtactgttctaataggccatgttctctatactcaactctttgccctttcgaagaatcagatgttgataatgcaccagctaggtaagtaactgagcacccatcttcagatcatgctgtaactttgtaaagtttacaaatttactttatttatcactagtttgttgaaataagaaaatgtaaagctctgaataactatgcttatggggcagttgtaagttgatatttccatgacatttttccagtgattctaaattagagcctgcttcagtagcaatcaacttaactccaagcataagcagtgctttctttccgcggttcaggtatgcccgcattagtatttgcgtattttcttgaaggaccttaaaccatgctagaaaaattcttcacggaaaatctctaattattttcaacagcaaggatggaaaacttctggtgtttctatctgcaaatcgtgctgtagacagtggagcgcacaatgcaacagattcactgcataagatcaactggccttctgactggaaaatggatcaatacctcgaaatcactgatgtggtatgtcctcagatttgtcttgaccggtacttatctgctgtctgcagtcaatttatttaacttctgaactgtgccagattccaattgtaatgtgtcctcaagatggttgttttcctggtttgtattgttcttccatgctatcgaatccttggctttctgatcgatgtacaatgattctgacatctgcttggagaagcactgaagtgatattatcaatcgatgtgttgaggtaaacaaggttgctcacatatgcctttctactgcttcaaaaatcattgcaatatcccatgctatttccttaattcctcctgcagtggaaaagcaacaagaataagcccagaaaattcagagtactcatggagtgctcttgcagtagatggccacaatgttcttgctggtaattctaggtgcacataatcagttaacttatgcatcaaattttattattttgggtgtaataattttattttatttttgtttgttttctagtgtcaagcagtcccatcgacccacctcaaattaagtatggccatcaagtgtcattgaaggatcagacatgtacatgggtctgggacgaagttaataataatccattgatggcagctaacaataaggttagatggtgtacaatttgaagtatacttaggtgttctttgatgctttgaacaatgtaatttactaaatcaggcttttttttttcattctcacattaccatctgctgcaggtaaaggctttgttgtcacatcaccaattcagcatactaaaaattccagtcactaacccctctgatgacctctctgatggtatagtcatggacacaaatattttagactatcatatgtggcttatcatccttcaccaagcaaatgttttttatatcctgcaggcagtaagcttccatttgaagctgtctttgtgtcctgcaaggacagttcgcacaaaccaactattctagtccttcatggtggcccacactcagtatctgtatcaagctattcgaaaacatcggcgttcctcgcatcacttggatttaacctacttattgtaaattatcggtaagtttgctgaaacatttctacagttctgatcaattaagcttatggcatcatctcactatcatctgaaaaaaaaagagggacaccgggttttggagaggaggctttgcagtcacttcctggaaaggttggatctcaggtatgtaatccagctaaactctgagtctttgtttctcatgaaccaacctaatttctgatgtgtgtcaaactgtcaagcaggatgtccaagactgccttacagctctagactatgtcattgagggaggacttatagacgcatctaaagtagctgtcatcggaatttcgcacggtggattcttgactacacatctgattggtcaggttagcatcctaacagattttagcctctcaaaggaaaagaagaagaagaacaaaatcctaatagaagttagtatatgtttcttgttcagcttgtaatttgttgttattttgtttcaggctccagatagatttatggtggcagctgctcgtaatccagtctgcaacctatcactgatgattggcaccactgacattccagattggtgttatgcagtggcctgtgggagtgaagggaggcaacatgcctctgaatctccttcacctgatcatcttcgcctcttctatcagaaatcaccaattgcccatatttcgaaggtgcatttctgttctcgccttcattcaaagagcaaaaaagaaatgttcttactgatcaagtcattgttcttaaaaacaaatgaaccagagaaatcaagtgattagctactcaaaaaggctcactgaactttgctgattttttttttctaaaaaaaaaaactttgctgatttcaacaggtgaaagcgcccctgcttatgcttcttggaggagcagatcttcgagtccccatttctaatggcctacaggtacatcaatagccgtttaaatttgcctcagtagtttccactttcaattcgttgtagaaatagtccataacaaaaaggctagatcctgaaacaacctaacaatcccgtgaaaagaaaatcaatcgacgggctacatcaaacagacattctttaaattcatctacactcgattaataacctaacaatcctgcatttgcttcactcatttgtcggatttggttaaactattcctgctcggatgatttcagtacgcaagagctctgagagaaagaggcggcgagatcaggatcatgatgttcccagacgacatacatgaaatcaacatgtaagcaagtaactgaaccgaatttcagctcatctgctttatataaaatgtcggcaacagccgttcggaaaaaaaaaagacattcagatgccattgtactattgcttttgtgcctaattttctccctcatactggaatccatgcttttgttcagaccacaatcggattttgagagcttcctcaacattggtgtctggttcaagaagcatcttagcatatcagcatcagatgcatctgcatgaagtcaacttgaagaaggggaggaagaaattacgtggtttaatctagtccaacaggtagatgccattgtaagccttgttcatggagctcgtccgtagacgagtgctccaaaatattagagacttccctattgaaaaaagtaaatggagactttaattggtttgagttctttccttttcccttcaattcacatgcttgatgattggatgcaaattcagtcggatttactaattactactagctactgctctgaccgtgattgatgatcagtccaacaacaatacttgcaaaatagtgcaatccaggagggtgttgttctttatgcacgttggcccatgatttttttttttcaaacaaagtcaacagccgcgcgagcaagtacaaacctgattcattaagtaaagtgtggttttgtgaattttactcttgcccggcgaaaaatttactgccccctgtgaattttcctcttcattctgaaatactttgcacaagccaactcacccatcaacatgccaacttaatgtaagcaattaaattggtgaaaaattaaacacgccatcagattgctacgttaaaactacaaagctggaaagcacaacaaggggggcgagagctataacaattttacaacaacaattgactatatcagatgtaccaaagaccatgtcagttcttcgttgaggcttgggcaagctgagatgctactttgtttgagaagaagctctcgagcctgcacaaaaagaaggaataaaaccaaatcaattagacaaccaggtgactgagatgctactttctttgaactctcgagtatgcaaaaaaggaacaaaaccaatcacttagttagacaaccaagtgactatggccttgtttagtacgcgaaaaaaaaatttttgggtgtcacatcggacgtttgaccggatgtcggaaggggtttccggacacgaatgaaaaaagctaatttcataactcgataggaaacagcgagacgaatttattaagcctaattaatccatcattagcacatgtgggttactgtagcacttatggctaatcatggactaattaggctcaaaagattcgtctcgcaatttccatgcaaactgtgcaattagtttttttgtttatctatatttaatgctccatgcatgtatccaaagatttgatgtgatgtttttgggaaaaaaaattgggaactaaataaggcctacgtttcaaacacggacgataaataattaatgccagatttcccccaaggtgaatcttctactggttatgatagaaagacattattgagtgcacataaatccaacatgagatgtaaccacccacgtttctattaatggttaggctaaatattttcaaagaaacattgacagatgcctgacttacaggtagatgaatatgcaaacacaagattgaagttcattgctcaccgtgaggcacacttgtaatagattgtatcgggagagttataagtttttgcattgctgaacattctcttcatgtcagctacaaacatctctagcgtcacataatactgctcagactcaactctttttgacattgtcttcaaatctgcagacaagcttagtgttcagaaactgaatagcttagatggcacaaaacatagcttcgccaagctgggaaaagaagggaaaataatcccctaaatcattccagcataccaataggatctttgataatgtcataatagtcaggaacatcacgtgaatccactggctctttgaatggccaagcatcaggatgctcattcatattctacaagacaaagctcttatatcagaattgataaaagtatgaagtatctttcgtaagacaacagtagatccaacacatcaggtcattgcagatctacaacatctttggaacataatcctttgaaaaaattgtctatagagcactgtacttggttgtcatgttaactcccaatcacaaaacaaaattagctatatctgctggcagatactcttttgttgccgatacacactaaaagatcaggtctgtttgcccatagttttgtttgctggtggccattgcaatccattagcatagtagcatatgcacatgactttaaggtgtgttttgagtaatgacatggatccttagtgttacattggtgtagccagttttgcctaatttctaaaccacactggactgatggttgagaatcactagtggctcacctgacaatcagcttaacgtttcaaaggataaatatgactaatgtctgaccatatgaagtagagttcacagtgaagtataccagaaatatttgaatattaaacttataaaatgtggccatttcaatcattgaaccattgaacagaccatccagctggtctggctttagaaaatatgcttgaaacagaaagggtgcaaaaaattcaaaagggagcaagcaaagtacaggtttatccagtgaggtcaaaccaaatggttgcatgtcatataaaaagatttgcgaagataaaagacttgccttcaacaatgaacgcattagattagtaagttgttgcctgtaagtactgtaatcaggagaaaaggctgatcttgatttggaatgcccccactgatctggcgtccacccagcttcccctgcatcacattgattgttctgatcaggcttgcatcatagctaaaccagtaaacctaacaaggcggcaaaacaaatatggtcgaataagacagatggatgaacatcttattttagaattctgttctgtatatttaacaatctccagttgccatatgatcatttctacaattggctctaaggaaaacatccttgggagaggacaggaatgcggtagaagcaatcatcatcgatagctgagaggcagcaccgcagtccgcagcactccaatgggatagcagtgcactgaactcatgaatgtcagaatgcatggtatcacactctggacaactccttgcatcctgactgaggccctgtttggcagggctacagctccagctccacctctactggagctagagctcaaccaaacggtttcagctccacccaaaaagggagcagagcgggctggagtgatctgaaaaaaatgaagtaaaggggtggagcggggttcaggccactccacagctccactccacacactgctcctagagttagatttaggagttaagagccctgccaaataggacctgaatgggggatgatgacaaatttgatagaatatttggatggcatgcatggccctacgtgtcatactt

SEQ ID NO: 4764 - DNA, 3542 bp, Oryza sativa
cctgtaaatgaattcatagataaaatgagttttggtttccaaacaaaaggatacgaagagtttaagggaacaaatttattaataagtatagaatttataggaagattgactaatagaagtgcctccaaatacaaaatcaatgtaaatgatgtgatagaaaaaatgcattctaaaggaataaaattcatgagccctttaataatagactctgaagaaagagcaggagaaaaatggccaattagtgaatttataaaaaataaaaccttgagtcagcctgaaaacttcataagttaccaagacagcaaagggaatgttagtattagatttacaaattataaaaccagagcttcggatgatttggatgcagaatcatctgacagagatattatagataacagaagacatattatatctgaattgatggaaaaattagaccatgaaagtgaaataaaatattatgaagataaattaagagatatagcagatgaatataataactctatgaaaagtgagtggcctaaaattagagacaaggaactttatttctatagagaactatccaggattaagaaacaaaaaaaagagaaaagcttggtcatagaaaccccgagaacccaggaaattaaaatagaacaaataaagtcagaagaaccaagagaagaaatccaaaagttagataaggtattaagtgaggaagagcaatgggaagtaaatgagaaattattactagagagttatgaagaagaaaacaacctgatagaggaaatagagaatatagaagaagaagataatgcagaacaatataatgattttatagactcattggatgaggaaggtttgcataatctagataatgcaatggaagctatggaagtagatttgggaataggaaaaaggaaaagatacggagagggttctgtaaaaaatgaaggagaaagagaaagaccagccagggcagcaggaagatggcctccagaaaaagaagaatattcatatcattatatcccaggacagtataggcacatgggcactaaaagaagagattttgagaaaccaataaaatttcaaaatcaaaaaagtgatggggctatactaaatctagcagcacatgatcccatagactggccaaatatcattagtatttggaaggggttaatagttcaaaaatacatacaaaatcagcataatatagggaataaggtgggggatatgataacttatttagaaacatttttgggtgaatctgctaaagtcctatgggaacaatgggttgaaaagaatcctaataactatgaagagctaaaaagagcaggaagtaatcctcacaactttgcaaatatagtatctaatattatcatagctgaagacccagaattaggatatacaaccctgcaaaatgaaagattaaaagaaatagaaaaatatatatgtatacatatatatatatacatatatacatatatatatatatatacatatatatatgtctatacatatatacatgtatatatgtatatgtatatatgtatatatacatgtatatatgtagatatatatgtatataggtatatatgtatatatatagatatatatgtatatatatacatatgtatatatatacatatatatgtatatatatacatgtatatatacatatatacatatatatatatatacatacatatatatgtatatatacatatatatatacatatatatgtatatatatatatatacatatatatgtatgtatatatatgtatatatatatacatatatatgtatgtatatatatgtatgtatatatatacatatatatgtatgtatatatatgtatgtatgtatatatatatatatgtatctcagaggtacgaaagcgtggtggagccagaatcaaacccaacaaccttgaagcactcaaccttgagtctgaagaaagaattaatgaatatgaacttagtgagaatatagacatctattatatatcaaattccaatatagagtgcataggattacaagcatttacaccaaattggtatagggatattaagtctaaaaaggatatagaaaaaattgttcaaagattagaggatatccaaattataggagaaattcctatgaaatattgggagaaaaatgctatcgagtgtaaaattaatataataaacccagaatatattattaagaccagcccaatagaagcaactccgaaagatatagaagaatttaagatgcatatagaagaactgctgaaactaggagcaataagagagagtagaagtccacataggtctgcagcatttatagtaagaaatcatgcggaagaagttagaggtaaatctaggatggtcataaattataaaaggctaaatgataatactatagaagatgcctataatatcccaaataagcaagaatggattaataggatacaaggtagcaaatatttctcgaaatttgacttaaaagctgggttttggcaagtaaaaatggcagaagagtctatagaatggactgcattcacctgtccccagggacactatgaatggctagtaatgccactaggattaaaaaatgcacctgccctatttcaaagaaaaatgcaaaacatttttaacgataatcaagaatttgtgttagtatatatagatgacttgttaatattttcaaaaacttataaggatcatattgctcacctagaattattttttagaaaggttgagcaaaatggtttaatcctatcaaaaaagaagatggagatatgcaaagaaaaagttaacttccttggacatgaaataggagaaggcaaaattcatttgcaagaacatattgctaagaaaattttacaatttcctgatgctatgaatgacaaaaagaaattacagcaattcctaggacttgtaaattatgctagaaatcacatcaacaatttagcaaagctagcaggacctttatacactaaattaagaaaaaatggtcagaaatattttaattctgaagacattaaattagtaagattaataaaagaaaaagtgaaagaactaaaacctctagaattaccattagaagaaagttactttatcattgaaaccgatgcatcacaacaaggttggggtgctatattaaagcaaagacctactaaattttccgctaaatcagaagaaaaaatatgtaggtatgcttctggaagttataaattaaaaactgtcaataatacagatagagagatcatggcaattatcaatgcaattaatgcctttaggttatacctagggtttaaagaattcacggttagaactgattgtgaagccatctgtagatattataaccagcttaatagcaagaaaagctcaactagaagatggattttatttgaagatattattacaggaaatggttatagagttatatttgaacatattaaggggaaagataatagtttacctgacatgctttctcgtttaaccatatttcaggtatgaaaagatcaatgaattacgccggagtcgagtgcttcacatttggagatgacaacaaactca

SEQ ID NO: 4765 - DNA, 1218 bp, Oryza sativa
aactccactccagactcaactcctggagttatatttaggagttggagctgtaccaaacaggccctaagactttctagcatttcccacatacatatagatgttaatgaatctaaacacatacatatgtctagattcattagcatctaaatgaatgtagacaatgctagaaagtcttacattgtgaaacggaggaagtaataaaatgtatttcaacttccttcatgcaaacaattttgcacttctcaagtcccagctatatgatgagttgtggatgatgaacttagcgcatataaaatgcataagaacgatcagtaggatttggcttaatttgttgaatgtagacatgtactggatatatttccacctatgaactatatagccactgttgcaaatacaacactaattgaaactaatactgtgaaaaacaaacaattccccccctaaaaaaacaattgtgcacagccagagttaggttttcattttccatgttggaggttgtgaagtacttcctccgcttcataatataagactttctagcattgcccacgttcacatagatgtcaatgaatctagacacatgtaagtgtatagatccattaacatctatatgaatgtaaacagtgctagaaagtcttacattatgaaacggagggagtactttgtaggctttacttgcatgggctcttttgagtttcttatttaccttttatgttcattcaagcaccacaaggaagtgtcttgcattgaatggttggattctaagatggtttctaattgcctacattctaataaccttcttaagctctccttcccaatatgttcacatcagactgaatattatcttatctacttgtctctcctgctgtctgtgtgcacacgtgcgtgctcgtacatgcgaaagaaagaaaccaaaacttactgttgccttcttgccacaggggtgtagccttcggaacacagagtacattgtgggggttgttatattcacaggtcatgagacaaaagtatgaacatttcacttttccctgtatatttaacttgaattcatgatatctgctgttttgaagtttactggatgtggaacattgttacaggttatgatgaattccatgaatgttccctccaaaagaagtacattggaaaaaaagctagataaacttatccttgctctatttgcaaccctgttcacaatgtgtgttattggtgctattgggaggt

SEQ ID NO: 4766 - DNA, 5534 bp, Oryza sativa
  unsure (1)..(5534): unsure at all n locations
tggtttatatatatatatatatatatataggtatatatataaaccatgcatatatatgtttcaatacatatatatgcatacatatatatatatgtatttatacatatatatgttatgcaaatgcatatgtatatagatatatatatgaacaaaatatatttacattatagaaaatgtgtacacatgcatatagaaacatatgtagtcatgtattaattacaatccattatatgtcctagctagctacgatttcgacgtagtagtacccgctgctagctcagaagctaaggaccggtgaattgtgtttccgtcgtagtagaattcacccttgggatcaaggatttcttcgttgatgaatcccatgagttgttcttgaaccgccgcgataaattccttgtgtgtggtcaggttatccctcatgcgaataaactatatgaatgtatgaaattgattagtaattaaacaagaaatcgctacgtaatgaaattttgaatttatttgtacgtacatcgagctctcttgtggtgatgatttggtctgcaaggcagtggcaatactcgcacacgtaatagccgcacaagttagttccctgcttttgctttgcgcactacaaataaatgacaaacaacgagagatctaattaatatacacttgtatgtatttgaatcggagaaatataaatgtagagcatgtgtactcacaggaaatttgaacttccgcctaagtctttctctccatttgccgcggaccaaatgacggaaccgataccaagccctacatggagtttaaagctatgattcgtagtagcaattaacataacaagattttcttaattaacaaaggaacttatgacggtacctgtctataagttcgaaaaccttgtcaaacgtagactcttttttatccattgaatcatatacgttgacggtgcaggcctccaggtcgatgagtaaaagcacccagtggaatctgcaatgtgcgtgggatgcattacatatgaaacacttagcaagttcgtacgggaatgaaatttggtatgtaggaagacagtaaaattaaactaactctgtgttgtatggcaacagtatgaacgtcttgtaatgctgcgccttcaggagatggacgagattgtcctctgtttcttgtggatattggtcgagcattgcgacgtttactttccgagggtcgatgaatccagtatcgaaaaccctccgccgtcgggccctttgaatctccattctacaacgataaaagggagtatattattttctatggtctacttatatacaaggacctaattaattaaaggagacgtatagtaagaaatctaactgaacgatatacttacaaaatccagcaactcataatagagacgtcgagggcgtccagctggtatagttcgtagattcccctgaaattgatccagagaatgtcatctccttgcaagaagtccgtgtccctgatcctcgctccgatcatctctctaccggtggcgctcatctccatgtacagctgatggaacttgtacatttgtgtgggtagggactgcagcagctcaggcttgacaagcggtttaccgagttcgtacatgtatttcacttccgccttttcgattggtgcgactcctagcaattgatccgtagttagaccggtgtcagtaataaattgttctatcgtcatttctttaccggtcaccaacggctcgatctcctggtttggttgctctccaagctgagggactggtttggactttccagaagatgctttcttcagcgttcgctcatagtccgatagcttgatggcctccttgacagatgcagacatacccctgaagaagttcctgacactggggtctataggaatcttcttttctggacttcgaggcttgaattgtctcttgacttctgatgcaacgtaagcgtcaagctcctcttgcgtgcaatcgtaccccgggtccttgttcttggcggcgtcaactttcgccttctttgttgcccttgtgtgggcaagcggtggagctgggggggcccctgactttgaaggtgccggaagaggagcttgcgggggagtaggtgtaggagcacgaggaggagtcggtgcaggatcctgaggagtcgatgctggagcctgaggtggagacggtgctggcggagcatgaggaggagacggtgcaggatcctgaggaggagatggcggagccggaggagatggtgcacgagacgccgcttgtcgcccagggaggatgatgtaccgcctgcgccatagaataatggcatggcatgtgtctcgtagatgcgtctcaccgtctcctccagggtaatccagctcgaggtcctcgtacgcgccttcgaccaactcaacttcgaccttggagtatcctgctggaatcggcctgcagtggtaagtacctgaagggtccgttgggatggccatgcccgacgccaccttcatgttgtgagagattatttattagtaatcaacatatataagcagcaactagcggaatggctaaatcttacctttattgataagttcttgaaaggaatatgcagctcacatggtgtccgctgagtgatgtcatcaacgggacaggtcgattcgtcctttgtttgcatggcgtccatgctctgtgatcctacctgccccgttgaggcgcagctgctacggtttcctgacgggctcaccattgcaggaggaatggtcggctggggatcatgggaccgatgtgcggccatgcgtttatcaaccttccttggcacctcctcttgcatgttgagttcgtagctcgatacccggaactctaggtctgcaatcttcgcctcggtatctctcttgctcctcatccgactcctgtacgtgtggatgtcctccttgaaaccaatcttccaaggaatcacccctttccctcgagttcgtcctggatgctctggagtctgcagggcgagtgtcagctcgtccctatctctgtctggtcggaacgtgccctgagaggaggcctccactgcatctgttagtcgtcgcgcagcctcttgtatctgatagccgaagaccagtgagccatcagctgggttgagcgttccaccgtgagcatagtaccagaacttcgatcgttccggccaattggctattgccagttcgatacccctctcaatcaagctagcctccatctgctcccacttcggcatcgcgacgctatagcctcctgaccccaagtggtgatggtacttcttcttggcggcattttctttgtttctttccatcatcgccttcccttgttcacctgtcttatatgcaacgaactcgtcccagtgatcccttagctttgggaatgtgtcgaagttcggtgtctgccccttcagtatatacttctggtacagatctcccttgaagctctgaaactgttctgccattttcttcagagtccaccttttcactttgtcctctgtacccgcaggaagggtgaatgtctcgagcattgtggtccacagcatctctttctccgaatctgggacaaagctctcatgatctccgcgtgcccttgttcttcgccagtacaccgtactgacatgcacgttatcccgcacaacccaaccgctgtgacgtacatagttcttggcggcttcggccggggcactaggacgtccatcttcttccacttccgttatgatgtgccgaccctcaagcttcttcgctgcacctcgttgcccgcgtgccctcttctgtccaacggagggttgactaccactagcctcctcctcctggttcccctccacatccctttccacgtgcccctgctgattcccctccgcatccctctccacgttcccttcctcgttcaagtactggtttggatcctcgttcccctcttcttcattccagtactggctgcttccctccgcgattgtatcgtacaatatctgttcctcatcgcggtcagccatctgttgatacaagaaacatctgctaagtcacgagacatttatgttttaacaatctaagtcatgtatgctaagtgtaaatgtcgtacattagaaccctacacaaccttacgtgctaagtctaattacaaatcgtgatataagctaagtctaggtgacgtatattatacaaccctagctagtaaataattatatactaagtctaattacaaataaaataatcttatattaaaactcaaataatattacatgctaatactaaaatagtcatgtatatgctaagtgtttcgtgcgtatatgctaagtctaattaagactacaatagtcaattgctacttgtcgcaccaattccgtagtcaataattacataccaagtctaattacaaataaagtaatattatattaaaactcaaataatattacatgctaagactaaaatagtaatgtatgctaagtgtttcgtgcgtatatgctaagtctaattaagactacaatagtcaattcctaggagtcgcaccaattccgtagtcaataatgtcatactaagtctaatttgcaataaaataatcttatattaaaactcaaataatattagaacactacacaatcttatatgataagtctaattacaggtctaataatcttaattaattgcattacaaatataacaatcatttatattattacgtcacttgcctgctccaattccttctagggctagctcttccactcaggcttgacggacgactccgacaacacgtcttttctgcaagataaaaaaaatgtattaggataaatgcgaagtaacatatatatatatgtatatatatatacatgtatatatatatatatattgcatttcacgttaacgttcgtcctcgttcgttcgctcgttcacgttccctagctcgttcacgttcgttcgatcgttgtcgttctcgttcacgttgtcgcggcaacgtacgttgacgtgttcgttctcgctctcgttcgttcgatcgttctcgttctcgttcgttaacggcggtgtggcggcatcggggcggcggttggcgcggcggcgtggcgacggcggcggcggcgtggcgacggcggcggcggcgtggcgttgtggggccgtggcggcggcggcgtggcgtgccgctggtggcgtggcgtggcgtggcgncgtcggcgtggcgtgacgacgacggcattgcgcgctcggcggcgaaggcgccggcggcgtggcgttggcatgcggcggcggcgttgcgcggcgtcgaaggcggcggcgtcgaaggcgacggagagagatcgagatcggagagatcgagatgcatgaagggagatgcggcggctctcaccccagagatgcggcggcagcggagtaggcggagccggcggcgaggacgacgagctcgagacgacggcgagatacggcggcgtcggcgcggggatttgccctaggcagtggcgggaaggagagaggccgagagagatcgatcggccgaaaacgttaagtgttggtgaataagacaagggcgcaccgggaatatatatacccctggatctttactcccggttgttctcaacaaccgggagtaaagatctctt

SEQ ID NO: 4767 - DNA, 2554 bp, Oryza sativa
ttcctgcagcccggaaccaaaggagaaaggaagccattacttgagtccagccagctacactcttagcaaggcagagaaggaaagtatgtttgaatgcttggagagcataaaggtaccgtctggatactccacgaatatcaagcgaataataagcacgaaggagaagaagttcataaacctaaagtctcatgactgtcacgtgttgatgacacaactgctaccagttgtaataaggggtatccttccagacaatgtccgggcaacaataacaaagctatgtgcattcatgaacgcaatttcgcagaaggtcatcgatccggatagattagaagcccttcagaatgaagtggtgcaatgtctcgtcagttttgagttgatatttccaccttcatttttcaatataatgacgcatctgttttgtcaccttgtgaaagagatccgtattctcgggcctatgtacctacacaacatgtttcctttcgagaggtacatgggcgttctgaagaagtatgttcgtaaccgtgctcgtccagaggcaagcatcgccaagggttatggaacagaggaggtcatcgaattttgcgtagaatttatcgaagaccttcgcccaatcggggtacctgaatcacgccatgaagggagactacggggaaagggaactctcggaaggaaagcaataatgacggtagacaacaatttattccgtaaagcccatttcactgttctgcaacactcttcattggtagctccttacatcgaggagcacttggctctagttcgcgccaggaacatcggtaagtccgatgcatggattacacggcatcacattgatactttccccgcgtggctacgacaacatctcatgggtaacgagtcgatcaaccaacaacttgccttcctggcgaggggaccgtctgggtctatcgcgacattccagggatatgagatcaatgggtacacattctacacgagagcccaagacatgaagagcacgaaccaaaacagcgttgttcgtgtcgatgccatgggacacgatggaacaactgccacgtattacggtgccatcgaggacatatgggaacttgactatggtcctctcaaggttcctctgttccggtgccaatgggttaggttgactggtggaggcgtaatgattgatgacagtgggatgacaactgttgaccttaacaaggttggatactcggacgaaccttttgtccttgccaatgatgtaacgcaagtctttttcgtgaaggacatgtctagcaaaggaaagaagggcagagggcctgatgagcctaagcgtcaagtggttctcccaggcaaaagaaaaatcgtcggagttgaggacaagactgacgaggattacgatcagttggatgggcaaccccctttcacagtgacgattgaccctagcatcctcctatcaaatgaagacaccccttactcacgcagcgatcacaaggagggaacaatagtgaggagaaagtacgtgcggtcaaccgtcaccgccgatgtaatgccgtaattattgtgtacacgatgtaaactattttggatgtattgattatccatataaatcaattgatgtatggcatatgttaattacgcacgattattagaggtttcaacaagtttaaatcatgtatatgttagttatatgtgatacttacaatttttaaaagttttaaatcacacaggtggcaatttcatatgtatgttaattagagtttttaacatttaatttactagcattcatatgctaattataattgactagaggatttttaaaagttttaaatcacgcaagtggcaatttcatatgttaattagagtttttaacatttaatttactatcattcatatgctaattataattgactggagaatttttaaaagtattaaatttaatatatttttaaaactatcattcatatattagagtttttcacaatttaatttactatctttcatatgctacttatatatgactattcgaatttttaaaaggtttaaatcatgcatgtggcatttacatatgttaattagagtttttagcatttaatttaatataattcctacgctaagtacatatgatgattacaatttttattaattttaaatcatgcagtatgtacattaatatctaattagagtttttaccaatataataatatcattcatatatatgctaagaatatatatatattggaatttttattaattataagtcatatatttgcttattacgatttatccacttaatttattatagacaaaaataatttttcgaagtaattgtcatcaatctttgtactttaaataatgttaatgcattaacttctattttataaacacatatgtaagcgaaaatcatatgcagtgctataatctttagtcccggttcttaaccctaaccgggtttaaaaagaatttcgaaatagcgggaaaagatatttactcccggttgttgagaacaaccgggagtgaagatcttttctttactcccggttgttctcatcaaccgggagtaaagatcttttctttactcccg

SEQ ID NO: 4768 - DNA, 6580 bp, Oryza sativa
tgcaaaagaatatattcaaaaatgcaaaaaagctaaaggaaagaagacttcagaaatacccattaagatgactataaaagaagaagggttttttaaaaaacccacatacaaggaatgcttaacaaaaggagtggatccattagatggggaatatattgattggaagataatagaaaaatttgaagaagcctccccacagttaaagaaggaattgaaggaagaaatacttaaagaattaaaacaagaaatggatcagaaatttgagcaaataaaaaaggcagtagatgagaaattagaagtttctttttctgatttggacacaatggatcttggtggccatgggcaaccagatgaataaattaatataagctaaatatgtttttcaatatatattgataatagaatatcaacaatttgggcgtggaagaagaataaaagaatgaagaataaaagaataaaagaaattcagaagattacccaagaaagaatccagaaggacaccctataaaggataaggggacaatatagggtgcggtgaatgacatatcactgtgaagagtaaaactttcggtggaaaggcctcgactttagccagctcccgtgaagatacagtagcgaagagataagcaggaggcacaggcgacgccatccctggcctctataaaaggagacgttggccttcactctggagacacacaacaacaacgaagacaccattcagagcaaagcttccaagcgcgctctcaccctccattccaccgttcttagtagtagtgactttagcctaccttgcatagtatattgaagcaaggagttgtgtaataacgctgtgtaaggtaagaacagcttgcttgtacctaccttcgggtttcccgaaagggaaaaccgtatgtaagcttatctgtttaatatgaagtaattttccttaagtattcctgcacgtttgttctagacaagtgtttatgctaaggaccctataggagaaacctcttcggtttgttctcgtttttagcctgcatcttgcataggcgtctggagaatcggtatccgtagagaagtgttcccttcgggtggaactgcctggggagacgataaactcttagctagaacaagtgtgacttggaatatcttgttaagttgcttctaaaaagatagataggtgaggcttacggtgagtaccgagtaggactttacatcatccgaagcaagcttctgaggctgtctaaataggattcgccaccctgcaaagatcctaaagttaaaatatctctcgaagtgaacagtattgaacagtaatttaaacagtaaactgaatagtgtttttgaatagtaatcagccgaataaacagtaaactgaatagtattcagccgaataaatagtgttttgaacagtgtatattgtctgaagcataggtttgtctgaagcataggtgtggtgtattttgtctgaagcataagtgtctgaagcataagtgtggtatcagagcctggtaatcatagagaagctaaatttagaagctaatattggaaagttaataaataccaaagataatatcaacataaggtgtagactaagccatactgaagaacatagttggcactctaataatagccaactaaatttaattgtagatttaatatataatttctatataaattggagtaagagacaagaagatttagagcaaaagttagaagatatatataaagaacaaaagcaatttgtagaacaatattcttttcttaataataagctaaatactacattagaattattagaagattataagataaggcaaaataaaatttcacagaatagtgattatattaaagaattactagacaaaatcaactctagtaaaggtaaggaaatagttttggcttcatctggcatagtctcatcttcacaagccattaattctgaaaaatggacatatctaggagtctctttagaagaatagcaagcagagatgataactgttctgataaacaaaaaggcaaatatgatgacatagatgagctgaaagatgttgcacaagtagataagcagctcgaaagatatcaacgagatactttaagggcaataaggcctcaacaagtatactgcatgggattttttgagaataagaatgggctttatagaatatctagagaagtagaattaagtgttctaacaaagccagtagaattaaaaatagtagctaaagaatttgaaaatagtttaagatattcaggatataagtatattcaccaaggtatgtacataatagatatcaaaggaatgacaagaaagaaattaggagctaaagtgctaataaccttattagataaaagatgggacacaataaacaaagcatctttaggctatctagaaggagatatgaatgaaaatatgttgataacccatatagcgcctgattcaatgatgcctgtaaatgaattcatatataaaatgagttttggtttccaaacaaaaggatactaagagtttaagggaacaaatttattaataagtatagaatttataggaagattgactaatagaagtgcctccaaatacaaaatcaatgtaaatgatgtgatagaaaaaatgcattctaaaggaataaaattcatgagccctttaataatagactctgaagaaagagcaggagaaaaatggccaattagtgaatttataaaaaataaaaccttgagtcagcctgaaaacttcataagttaccaagacagcaaagggaatgttagtattacatctacaaattataaaaccagagacttcgcatgatttggatgcagaattatctgacagagatattttgcataacagaagacctattatatctgaattgatggaaaaattagaccatgaaagtgaaataaaatattatgaagataaattaagagatatagcagatgaatataataactctatgaaaagtgagtggcctaaaattagagacaaggaactttatttctatagagaactatccaggattaagaaacaaaaaaaagagaaaagcttggtcatagaaaccccgagaacccaggaaattaaaatagaacaaataaagtcagaagaaccaagagaagaaatccaaaagttagataaggtattaagtgaggaagagcaatgggaagtaaatgagaaattattactagagagttatgaagaagaaaacaacctgatagaggaaatagagaatatagaagaagaagataatgcagaacaatataatgattttatagactcattggatgaggaaggtttgcataatctagataatgcaatggaagctatggaagtagatttgggaataggaaaaaggaaaagatacggagagggttctgtaaaaaatgaaggagaaagagaaagaccagccagggcagcaggaagatggcctccagaaaaagaagaatattcatatcattatatcccaggacagtataggcacatgggcactaaaagaagagattttgagaaaccaataaaatttcaaaatcaaaaaagtgatggggctatactaaatctagcagcacatgatcccatagactggccaaatatcattagtatttggaaggggttaatagttcaaaaatacatacaaaatcagcataatatagggaataaggtgggggatatgataacttatttagaaacatttttgggtgaatctgctaaagtcctatgggaacaatgggttgaaaagaatcctaataactatgaagagctaaaaagagcaggaagtaatcctcacaactttgcaaatatagtatctaatattatcatagctgaagacccagaattaggatatacaaccctgcaaaatgaaagattaaaagaaatagaaaaattaactttaacaagctggaaaggtataaaggaattttctcaacattatctatataatgcaacaactgctaagcaaggatacaataagggaatagttgagcgatattttaataaactacctgacccattaggtagtatgatttttgaggaatataaaaaggaaactgaaggagctgaaattaatatttcccaagccataaccttcgtgttcaaacaattaagaaaaatatgcacaggaatacaagcccaaaggtcaatgaaacattttgattataatttttgcaataaaataatacaaatacctttatcatatggagaagataggcctagaaataaaagaaaccatagatatcaaagtagaaatagcaataatataaagacaaagaaaaggtacttcttaagaagatcagataatagagcacctttcttacataaacgaaatgtaagaagatataacccaaagaaaacttatgataagacatgcagatgtttcatatgtaattcaccagatcatttaagtagaacttgcccaaataaagatcaaaaaagatattctagtaaatatgaagaacaagagagagttttaattatagatagcgtaaatgaaaatatattagtatgtgatgatgaaataaaagatgacgaatcaatatattctatcatagaaacagatgaaattgaaaacaccaatgaagagtatgaatcaaccgatgaagagttagatttaattgacgaactagccggtttaaaaatagaattgatggatcagttaaattgtgaacatgattggattagaggaaaaggagattataacattaaatgtgctttttgcatctattacccaagccaagataatagagtaacctgtagtatatgcttaaaacaagcttgtgctgaatgtataaaagcaaataaacaaaaatggagaaaagagatagaattagaatcagatgaaaggatattatctagtagagtacgagttttagaaaacagaataaataaactagaagtggaactagagaatctaaaaattaactatgatattaaggcattaccagaaaataaggatatacaaaataccgaatttaaagagcaagtgataacattaaaagacagtaatactgctaaaataattcaactaaaagatgccataactaattttggaaataaatatatagtaaaactgcctttcaaagaaattttgggaataagaataccggtaaaagtaaaactatcacccaaggtatcatataaaattctagcactagtagacactgggtgtacaaaaaatattattcatgataagtacttcataaaatgtccagaaatagttcatacaattgatgataataaggcagaagtctctacagacatgtccggaataaagaaaattcataatcagctagctcataatgttgaagtatacattaatggaactaaatatataatagatgagattacaataagaaacttatccatgataagtgatgacatgataattggcctaaggtttttacaacaatcggtacaaaccacagtaatacatgagcaaggaattacttttatcccatatcaaaacaatgtaagcggcgggtatcaactagtattcctaatgaaacacgaccaatcgttgcacggcctaaccgctcgtctcaccttgaaccgctagatcgagggtgccttgtagtggctagtgcgcggctcagataagtcatcctcaacggcgatagtgacatagatcgactttggcccggtgtatatagatggcggtgaaaattgggatgctacaaccatgacggcggtaaccagaattgcactacatgtcgcggcggttccggtggtgatgcattatatggtggtgggcagaaaccactgagaaggccgagctcgactaagagcaggtacaataacagactattagccagctacaaacatattttaatgagataaaaatgatagagaataacagcgggttacagatctgtagccagttgtaatacggactctaatacgtaatgtgtatatgacaggtgtgaccatataccaatagtatagtaagtaattattgtataaaatagctattagattggctatagctgaattggagctaatagttaactatactattaaacttgctctaacattgatggcgccagtggcggtggcaagcagcatgtcaaagcatatgtacgcttgatacgatcgagattcgagaggtgactgagagctcgagccaagagaccgcgagcctgtgcccgaaaaaaaagaaaaagaaggtgatctcaaagggccaaagaaagaaagaaaaaagaaaacgtgatctcaaagggccatattctttttccattggattgggccgaaatacagtttatccaatcactcttttgagcccaaggtcagaaaattcttaaggtcatgtatttctaaccccggtttggggccaattacattacagtccttccaatctggctctttccttctatccgaattttttcgtttttagattttttttaatatttacagaaataatctatcgaccaaaaaaattacagaaatagcccctgccgccctaatggtgggcggcaagctgacgtggcagacggtgggtcgaccgcgccgtctgccaccgtcggcaaaaattgcgattaggcccttgccacccatacagagggctgcaaggggctaattgcaattttggccgcccataaagagcttgcggccgtacttttt

SEQ ID NO: 4769 - DNA, 19757 bp, Oryza sativa
  unsure (1)..(19757): unsure at all n locations
atgaaaaagtacggccaaaagatttttctatgttatgttaataataaataaagaagtatttattggtaaaacttgttaatattgttataaaaatgtattgaagttggttgttgcgcaatttcaaatgttaagtgaggtattattttgtaccttattcgacgtattagtactcggataatttatataggcctatcgcagtctgggtcgtagaaacattatatggacttaaacaaggagaattatgtaacatgaagaaatagtagtacaatttgaacatgatacaactatttgcattgcggttacatagatgatattagattcgaactaggagggaggtagtgcaatagttgaacacaacgacgatgtagtaatgggacaaggaagcatgacagtagaaattttaatatgctaagttgtccgataatagctaacccctacgtgaggatccctctcctctctcaaaccgcgctttcaggccggcctcacgtagcctgtaataacaaattaatatgtcattataaaaaatattacagtgcaactaacttatagtaaaacactgttcgtacctcttgacaaaggagtcgtgaaccgtgagtagctcaccgcacgtcgtgcccggaacgtcccaagctgagccccctgcaccgcagtaaggtgagaccggtgtcggtgatctatcgccgggtccaacaactgaggtgtatcctgacatgccatctctgaaaaatatagtgtttcgtgttagaacaattcaaaaaatagtaatgtaaaacaaaagataacttgcaaaattatgaaatagtaataaaatcatgagattaattatgtacaacaagagtacaggctatttaaatatagcaaacgttactaatggtacataacgatgacgtgcaatttaacatatatgtagagttcaataatataacataacattacgtgtcgaagtccgacatacatcagcatacctaaagacgttaggcgccttagttcgacgttacatcacgagacctaaagacatgacatgccgaagtctgacattacacgacgaaacataaacacatcgataagttcgaaacgaattacaagcaaatccacatgccgacatagaacataagaactacaccacgtagccagacgtggcacgacgacacctaggacgtggtcgagtggaggtagtgccttcacccgtagggcgagctccatctgctgctgatcctgatagtcctgcctccgccgcacatggtttctccttgtctttaggacaatgcttgtaggtgtgcccatgttcatcgcatttgctgcaacgcttcaccctgccagcctccgactcgtccatatcgttgcggatgcgatgagtcctcctccttccagccttgcctcggagcttcgatgggtcaggaatattgagtacttcatcgttagtctctgtgaactccccagctatgccgaacccataaatctcgccgctccatgtatgatatattgcttgcttactgaagtactgtgacacatatactgcatctggtatgccacactccgctgcggcagcaatgacatggctgcatggcctgtggagcagcttcggctttgcacaagagcaatgacatgtgccgtcggctttgagaacacactcctgcttcactctcttgcggtagatacccctacctgccttatcttgacatagtatctcaaacctgtgctgttgggtaccttgcactagagctcgatgtttcatggcctttttacgcaactcctctagctttttctgcatgaaagctccaaacaaaatgctgttgttcggcatagagggaagaactgcctagaaccgatccctaaaatacctgcatgtcccatgtaaaatgaactccactatgccaactagtggcagtccacggacaccgcgcatcacccagttgtaaacttctgccaaatttgttgtcattattccatatctagcaccacctgtgtcatacgccttggcctatttctcttttggttcatgcagaatccactgagaaaatttccgaatctccaatccagttcttctaaccaatgttggactatccgttgggagaggtccaagagcttgagggtcagcaacggcggtcgatggagccgctgcacgctgatcactgcatttggctgtcaactcatctaatttcttccaaagctcattgaattttttctcatggttctgattgcacagcctcttgaacatgttcatgagctccttgttcttgaattgcttgaagaaattagctcccatatgacgcatgcaccacctactctgtacatcttcccaaacactggggtatcctcgttccatactcccaaactgcaactcttctatcgctcgcagaatgccagcgtgcctatcatgtatcaggcacacatttggcctcataccaacaacttttgttttaaccaatttcaggaaccagtaccagctgtcggtattctcactctcaacaaaagcaaatgccaagggcaatacctgattgttcccatctacccctattgctgttagtatctggccccgatactttcctgtcaagaatgtcccatcaatgcagagaacaggacgacagttcacgaataccatcttgcatgcatgtagagctaagaacgccctttgcagcacactcttgctaggatgttcaattgaggggaatttcttcaattcgtaagagctcccagggtttctttcctcgataacaccaagcaggcgtggcaaattgtcatacgaggcttcgtaagttccaaatctcatctctattattttctgtttggccctccaggccttggcatagctaatagtatacttgtatgtctcttcgatgtgtcggattattgaccttggttcatatgtgagattatcgatgacatgcgcatacatctcagatgcaacaaatgcacaagtaatgttcctgtggtatttctgaacaccaggtagaaaacatgtatgcttggtaacgactgacactgtccaataatccttccatttccccttatacgcgtgcactctccagggacaaccatctttttccttaacacaccgaacttcatattgcgaccagttcgacttggcaaccctaaactctctatgaagtgacactgcaaaatgttttaccgcctccttcatatcttctgctctactataaatcgctccctgaataacctcattttctttgtactcccatctcacactatcctcttcagagacaatcagcccagaaaaatcctcactagcccattctgctggattaatatccgtctcatcatctgacgaatcaccttcctctacacgctcgttgtcagaatcctccctctccatttcatccacaatggcaccaacagtctccccctcgtcggccactccacctggttgaatgcccactggagctactacgcccccgtcctctcgtgcgttgacctcctccacagaagtctcgtttacttcagcacttggtccctcgccatcatccatgttcatctgcacacctggatccttcgggtgaacaaacggaaccaaagctagaggccacccgcgttgcaatgcattttccaaataccatctccacactcgagagttttgaactggcattagttcccaataaaaaccctcagttgcccgacttactataacattcattgttatgtcacttgtctgtggatcaactctcaagcccctcattaaccatccttttatagaaggtacactcctctcagccggtctatcaattcccctttctgatacaataaaatctgacagatctaccccagttggcccgtaacggaatatttgtttgttcgacatatctgtcaacgaaataactagatcatattactctttcatgcaataaacatctacaacgtaatatcttcttgtgtaagccaatgcaacggtaatgtattgattccaaactagcatatctacgtagttaccgatatctacaatacgcacttctagattagtacaactaaaaccctaaaaatataatgcatttattcaaacaaatttttaaagaatacacactatttaactcaatagtcacatataggatctatgaatattacctgaaatcggcgtctgaatccggcagggcttcgccccttcttctcttctcctcccctctcttcttttttttttcactggaattgaggagagaagaatgagggctgggggctgggcagcaggccttttataggcagcgaggcctgccgcccggccagagggcggcaaggggccgcctgcaaaatagccggccccgactggcttttttgcgttcgggccccttgccgccccaccagagggcggcaagggttttcctgcaaaaaaccctccctccgtcaccgcccgttcctcccccgtttgccacgtcagcttaccgccccagaggtgggcggcagggtctatttttgtaatttttttggccgatagattatttctgtaaatattaaaaaaaatctaaaaccgaaaaaaactcccttctttactttgggcatcatggcagggtagggtagtagatagagagactattgttgttaatgactacttcaagatgaggaaggaagaagtcgatagcaattgccagcttgctagcggcacacacaaacatatgcactggtatgatactccctccgttttaaaatgtttgacactgttgactttttagcacatatttgaccgttcttcttattaaaaaaatttatgaaatatgtaaaattatatgtgtacatgaaagtatatttaccaatgaatcaaatgatatgaaaagaataaataattacttaaattttttgaataagacgaattgtcaaacacgtactaaaaagtaaacggtgtcaaacattttgaaacggatggagtatattgcgcgtgcctcgtgggtaggatcagaaggaagcaaggattctggggctttgctaatcgagcatcctttcttctccgtcgtctgatctgctcttcgacaaatcacggtcgtccgtgtggccatcctgtgctcaccaggcgccgtccgatcccgaccgtcaatcggccttggtcgatcctagccgttcgtccctgccaatcctcccggtggaccgggttcacgatggacaaccatcttccagttgttgatgcttgggacccacttgtcaccatcgtcaccggcttcgccacggctgatgcaataagtttcatttattgcatcataaatcgatatatccttgtctcagcacttttgaaattaataactaattcatgtaaactctaaaatagattattcaacttgcaagattcatttaaattcaagatctacatgtttgtttatttttatatacggttttatttcgcttttattagagttttttctcgttttgcgtgccaacgtgttagaatccacaatctcagaagaccggaaaagggttcaagagattaatcgaagatgccagacaaagtgacatatttctccttgaacaggttgaacctactttgtaaaaatgttttgtcgtttacaaataaaatgcatgctctgttaattactcgatgttggctagggctgcttgcccttagctcaatcaactcgtgagcagctcgcaaaacatctcaagttgactcgatattttaaacccattgaaacatcagctcaactcgtttagaaaactcaatgaactgagctgaacccaagccacgagcttttcgtctaggtccgtatacactacacaattcctactacacaattcctgagttcatgttggtagtaactaaattatacatgaattatacatgctatccccctgcaccatcacatattagtttctttgcgtatatatatctgactagaaaactgtcagtgcggcaacgggtaaatatgttttttatggtacaataactattaagagtcgagtaacaaattaaaacattgggatcgctatacattataattgaaaacgttaacgaaatattttcttggttttgggcaaaaagccaatttcttcgttccttttaacccagcccagttcgttacctcctccgctcagcctgcctcccttcggcccaacctacaagtggagccataggcccagctagcacaaccaaactggtgtctttgatagtgtcgtacccatatgattccggaaccgatcctccccaccaaatctgtctggatatttgttgatctctcaaaattggttgagagcttcttagccactcaatctcctctttccattttttccaaaatcggaacaatccgcaaaattggagataaaaacagcctagaagctcgtcgaccgcctatcattggcgactgttaattggagattaaattcggtgaattaaggccaaactgaagggaaatcatgggacaaatgatgagggaggagcggggaatcgacttaagacagatcaacatggtggtggcggtagggtttggcacgcgcagtggctggaggcaccctgtgtgctagcggatcgaatcagatgaggacgacgttcggaaaaacagaaacattgctattttttattaggtatagatatagataggtatgatctattagcttaactatcgtagataaataataaaagtcttataaaatcaagctcgttagaagctcgagcttagcccggtaaagctcacgagctttagctcggtaaagttcgtgttgagctcaagccgagctcaagtcgagcctgccacccatcaagcttgagtgacttgtgagcctcgcatgtttttcattacagccctagcgattcactatggcctagtttagttcccaactttttcttcaaacttccaacttttccatcacatcaaaactttcctactcacacaaacttccaacttttccatcacatcatttcaatttcaatcaaacttctaattttggtatgaactaaacacaccctaggtcagccctcaaaataaaaaatatcaatagcaacttcgcttatacactatgtaccgtgccaccaactaactagattacacatagaaaaacctactccctccatatataacagggaaatgctacataattattctgactattcgatcagaatgatacgtttgatatctggtaggtatcaactaatacaccgtctgaacaagatgatacctctaaggtattgtctgatatttggtatgtattggctgatattaaggtatcaggtgatattttagaggtatcatttaatcttaatgggataccactacgtagcattcctccgcataatatagaggcagtaaaaaaaaagaaaagaaaaactcatgagttggaagggtcccatctcatcgtgccggtgctccataccaattttctcgaatctacaaatacacaggagacgaccaccagccgcgtcacggccaagcacaccgaaattccaacgagaaccccacgcattattccgcgacgcgaccacgggaagacacgggacacggaagaggggagagagcgagagcgagatagagttcgagttctacgcccaaaaccctagcaagctcccccgccccgccccgcgtctccagtaccttacanaagcttccaaccccccaccccccaccaccaggtgagtggatctcccatttccccccctctccccgcgagctcgccccgggcgggggatcctagtcttgacccgtgtgcgtgtgtgattcattccgccgcaggaagagcgtgcttggatcgcgcgggggaggcaacgctggcggcgcgcaggtgatggcggatccgcctggcggtgggggatctagcgcttgcgtctgtgagcggagggaggcggaggcggtggtggtggtggtggtgccggagctggggagaagaggaggagagcagcggaggggaggatgctgagcgtggtgcgggtgcacctgccctcggagatcccgatcgtgggctgcgagatcacgccctacgtgctgctgcggctgcccaccggcgtcgtctccaccgacgatgtcccggaggccgcccctgcggatggctacttcatgcggtacagatggtgagtaactcctcgagactctgaaaatcttagttgaatcagatgagagctgtggattgtgtagttctgcttgcttgattgctaaatgttgcgcactaaacttattgctgaatgttgcgcactaaactttgaccaagcaaggggaattttcgtagctttggtcaggcagatttctatgtgcttatatagttgttaaagtttggggaatgctcatttattggctcaactccttcataaatgaagcatagttggatgtattcagattaaatggtctaataagcttatcgtttgttttgtctgaaaaatggagccttagagattgtaaaatttagatgcggaaacatctatactgctgagttggaaacatagtttgatgcatatgaattgaaccgtttggtacatgtttttcaaattgcattatgacatatcaggaagcacagtttagctaatattaattgctatcatgagtgattcattgaaaagtgccattaattgggtggtttctgatgataaaacaagtgttattagaactatgggacagtagcaagtatttttgatatggggtatgttatgatggcttgagaaatgttgtcgtgcaagaatgttagtagtatccatcttcgatggaataggtatataacacactttatggtgttctgttggatcatcctatagttcctattgaaaggccctgttctatgagttctatgagtttctcctcattgtctgttgagttgttgtagaattggatccattacgctgataataaacatgattttatatgctcaagatgtgcaaatagcactgatgtacacgatgcttatagctagtttctgtgagctgataatgcaaaacactagctctttaggtggcctttgttggtttcaacacttccagttccaatgggatttggttataatgttttgatttactccttgaaggtaccgtatacaaagtgatcgaaaagtcgcaatctgcagtgtacatccaatggaacaagcaacaattcagtgccttggttgcgtcaagtcaaaaatacctgttgctaagagctaccattgttctgctaagtgcttctctgatgcatggcagcaccatagggtcttgcatgagcgagctagtagtgcattaaacgaaaatggagctgaagaagaggagctatttggcagatttggtagcactggttctggggttcttagtactactggttctggatcgatgtcaaatcttggacagagtcctggtttgaataatggccccgtgcctttatatccttcaggcactgataagaactcgggtgaaacttggtatgaagtggggcgcacacggacatatacaccaactgctgatgatattggacatgttctaagatttgaatgcgtgtctgtggatgctgaaaaaaaggtacctgttggacctccaacttcaattatgacatcccgtgtgattccagcaccaactccaactccacgtcgccttatccaagtgaatggagatgttttgagtcacttagatttggacagccaaacatctttcgggacattctcagtgctgtcctacaatattcttgctgatgcatatgctacaagtgacgcgtatagctactgcccaacatgggcactttcttggacatacagaagacagaacttgatgcgtgagattattggttatcatgctgatatcatctgtcttcaggaggtatcatatatatcaactaaatttccctattaacttttttggtgatttgttctattatttcccccacacagttacagttaattgaatgctatgctagattatggtggttgggctgctgtttcaactgatgcaaattttccacacttacctagagttttctgaagcttcttgtcatattatgctctaataatacttgattggtctcatcattttgaactgaattcatataataaaaatgctaagaaacaaaactgccctaaaatagtattgtaggttgacttctttgtgaaattgaatccataagtaatctaccttcataaaattaagttgaatcctactgttttcaggtgcaactgaaccacttcgaagattttttttcacccgagcttgataaacatggatatcaggcactttacaagaaaaggacaacagaggtatatttgactgcatctggttctattataatacgcatttatacgcttcaatttcttatttgattctgcttcatgtttttaaaggtatatactggagctcctcatgccatcgatggctgtgccacctttttccgtagagacaaattttcacacgttaaaaaatatgaggtacggccactgctgatttgagagtggtatgctaatctgcaggctgcagctatctaatatttcttgtacctggttgttcaggttgagttcaataaggctgcacaatcattgacagacgcaattattccctctacccaaagaagagttgctttgagtcgattgattaaggtatgataaattaatagaagaggatattgcatgctaatttattccattgctgacttttcattattgctggttctgttttctttgaaggataatgttgcactgattgcggttttagaagctaaattcggcaaccatggaactgacaatcctggcaaaaggcagcttctttgtgtggtatgtcaacaactctgcttcagagaagcacttagatgctaattgttagcagcattctgaagggatcagttaaatgttttctttggacaacggatttggactcattcaggcctcgtttggatgtgtcgaaatccgaaagcccagtccatatatgcatgtatgggatttcagttcacttttcatggcttacatgtggatggactgggattgaggcccatccaaaagatatgccttgggagaactatgcaaggtttacatgaaattaagatgcatccacatctctgaatcttgatgcatggctttagtattacatgtttgtcagggtgacctatctttaattgactttttttttggtgggggaatgggggttgggggttttatacaattcttcataccgataaacagtcttgacttgatgcattatggcgtcatgggggtcgcaggtctcatcactttttcaactgttctcactctgcaggcaaatacacacgtaaatgtccatcaagacctcaaagatgtgaagctgtgggaggtctgtgccatcacattttctttatgctagttttgtgtaacatcttagaatttcagattgacactgtatggcttttgcaggttcaaactctcctaaaagggttggaaaaaatagctgttagtgcggacattccaatgttggtctgtggggatttcaattcagtccctgggaggtgtgtataaatatgctatcactgtagtatttatttggtaaaattattttgaaaccatggacttctaagtactcaattatgctttcagttctccacatggacttcttgctatgggcaaagttgatcaattgcatccagatctggccatagatccccttggaattttacgccctgcgagcaagttaacccatcagcttcctctggtacagtaaaatatattggtctggtgatcccttttatcccatgatcaaagaactcttaccaagggtcttgcttgtttgtaggtgagtgcatattcttcatttgcaagaatggtcggtgtcggctatgatttggagcaccagcggaggaggatggaccctgcaacaaatgaaccacttttcacaaactgcacacgagatttcactggaacggttgattacatattttacacaggtcagttcctggaccagtttatatctgtatgctttgatattataattttgtagcttcagtaaacatcttttaaggattacacagctagtgtcatgaaacatttaatgatggcccacacttgctttcgtatttcagcggattcattgtcagtggagtcgttgttggaacttttggatgaggaaagtttaagaaaagacacggcccttccttctcctgaatggtcttcggatcatatagcactcttggcagaattccggtgcaagcctagaatcagacggtgacaccttaggtatgtcataagggcataaccacattttaattatactgtaggactgcggtgctctgattttgctagtgcaaacagcacatggctcaagtaagatttggtgcctgcttcgctgtcaaagtgccacatgtgcaaatacctttaaattccagtggtttacatttgtaacaattaaagctaagaaaattgttttttgcacaataactcatctgaaagtacgcagaaatcgtcattctagtcatgtttgttgttgtccatcacctcatttcatctcggtgaaaagtaacataacatgtagtggatcttgtctattatgcgcaacacacgacaccctttcttcatttgatgttccaagctgactgactttcttcaggtcgcgaatagatggttaacttcagcacccatgcggtggaacattcttccatggtgtgtgggacttgaggagggatggacgaaagcggatcctcggggaaggaccaccagcaccagcaggcttagggtagtggcctcatgaaagggaggcttgtaatgttgattacctcttacatttccaactcatgatgtttttaagcggccccattgtaatatcactttctatagaaggaaagatctcctgagagagagacatttttatgacagattcagatgccatcatggctaggccatttcaaattttcaatcccttctcttctagtactatactgcagtttttttacccaaccctgatcgtgcagtgtgtacttgttggaacttgtcaaacttttatggcaaattttagttgttgcagggttgacaaatggggagatgaatggttggtgctttggtgggcacctgatgtcttggccatttatacaggtactgtggttttgctgtttgtacgtagtatagatggtagttagccttggtgtccatgtgccaccgtgtcatgagttggctggaacatgttacatgtatttggcttattctaatttggcttgtctgatctgatcgccaccaaacgctcaacatttaggcgatgaaaacagcgagagatcgctggagataacataaccccgtggtgttaatgaccatcgggtatcaagctcaccaatcttgatttggtcatggacattactaatcgtactcttggaagtttctctcttcgttggttggtcaggtctattgggacccacttgcagcgagaggagtggtgggcccacccctcgtggcgcaggtcgatgctggactgggagtgacgggcgcgaatttttacttgtttgaccccgcaaccgcgtgatcttcctccggtgttttgtcgctgacacctgggccccaccagggacaacatgaccgctgccgtgcgtggccgccggggacccacacctgcggacgtgtgcaggtgtccgctaggtccgtcaacggccgtcgggcaacggcaaaggatgcttctattctggagttattgctgctgtttgtttggacggtttcatgatagtcttaaagaaagctcgttccactaagagcacccgtaatggtaaagtaaggtgctctctataagacatgtacatctcagcaatagactagattaatagtaaaccacctcaatagtatgtctacatagatatctatagctctctaatgcattgtctcgtttttctctatagactatctccaggttagtagatagttttgctctctctcttcatttaatctcttccaagtagaaaaatatgctgacatggatctcttgtagagagtctatagataactattgtgggtgccctaatggcatctcggagatgagaaattttaagacacatgatcgagtatctatgtcaaggggtgtctaatactagttattattacaggatcaagtcactagagattgtttgtagtggctatattggctatgtatgatgtataatataaagcataacaaataaaaactttgccacatttagtagtttgaaaatataatatgtacgcaatggccaaaaattgatataagtatgattatattatagttgtggtggttaacagggcatttttctaacatattacgtggtagttatgtataggcaactaggcatcacaagctttcatcactacagataacaagttctacgaatcctatttgatgataataggaggttttatgtttcttaaacacatattaacaaatgacatcaagatctatttcctttgaaacaatgccatgtattcaattgaacaacatatacaataaaagttagagaaaaactcacaataaggatttagtgataaacattgcaatgaaagaaaaatgaaaaatatggtggatgatagatgatatggctctagcatttacactcactctctcgttttagtaaggataaaatggtaacctcttcctacatactactatctctctactcaatcttacctaatatcacagtctcatggtgcgtcgcgaacttgatccaacaacaggatattactatggtaagccaattgctccatctaaggtgcgtctccttgattgaataatggacatttgctctacctttatatgaagtctatcaaactagttgtacttttcaatatgatgataagtatagagtaatgcttaatccagatacgggctcatgttttagtttaagatcgtctccttaacattatctttattctataattataggcctattgtttgaacaacaagcacaatgtacttgtcaaagtcgaaaatagcataggttccaagatcaagtggcaataattacaatagataccacaatgtgttatataaggggggggggaatgtgacatactgtcagacaatggtaattattatagacaccacaatgtgttatatgtaaggaaaaaataataaggggaggttcacctaaaaaaccattgatccttaacctcccatgacatctccctgcaacaaacaatatataaataatgcaattaatttgcatgcagcatccaatagccatatcacgtagtctcattcaatacttcttgctagataatatgaccatattttttatttttacccaaatttctattaattttagttatcctgatcagatggcattgatacatagtacattaagaaaaatcaatttaaaactggatatgacatattctagtataatgaatctagacggatgtatgtccaaattcgttgtaagagcaaggataataataggctataagcaagttatatgcttatgtggaagagagagataaaaaaaagtggatagtgttggctctcatgcaagagccagctccacacaagctccaagaaatatgcattaaattcatagagtgagaaagagagagaatggagaaaataaggttaaccttatagctgacctattatacaagttagctctaacatagacatagtaagcagtgagctctactattaaatctactctaataggatgtgtcacatctaatactaggttggttttatatgagacgaaggagcaggacagtaggttattctcccaaacaggaaaaagcagaaaacaaaaagtcattcgttcatatcatcatacgctgtactgtactccctccgggttgataatacttgtcgttttagacaaggacacggtcttcaaaaaataactttgaccattattttctattataatatgtagaaaagtgttaacaaatatatgatcttattaaagtattttttaagaccaatctatacatgtagtcaccatatttgaaatacaaatattttaaaaataattcataattaaagattgtaaagtttgacctcacccttgttcaaaacgacgagtattatcagcccggagggattacgtttcaaacttgacaaaaaacgccgttatcgaagcctccgtgaaattccaatcaaattcagggtgcaaaccacaaatgccccccatttggaccatttgcctctcttcctcctctccatctccacgagaggagagaagaagaaaaggagccaagcaaaaaaaaaaaaaaaagcgagcacgcgaacgccgcgtgatccaaatcgaatcgaatcctcctccgccgccgacgagggcacccgccgcccgccggtgagcccgcgcgagcccggccggattcgattcggccgccgcccggttgatccgcccccccgaggcggcgggtggtggttccgagatctcccggcgagccggaggctcctccgcgtcggatttggcgccgcgggggaggaggatgggctcgcggataaaggagatggtgcgggtcgccaccgcgcggctcggcggggagccgtcgccgcgtgggggcgcggggaactccgcgttcggccgcggggagtcgtcgaggacggcgcggctcggcggcggaggggccagcctgaggcggcagccgcagccgcaggcgccgtccgtgcggaccatctgctgcaacgaccgcgaggccaacgcgcccgtcgggtacaaggtgagcgcgccccctcctggcggtttgatcgatctgttgagagtttcgtttggaggaggaggagggggctggtctaggtctagatctcgttgcttttcgcgcgttccttgctaatatgtggttgtgctggagataggtgtgtcaatgagctgacacagaagttttttttttttttaaaaaaaatttccctgatgctacatggttttgcttagtttttctggactggattttgttagtcatttgggttgcattaatggagaactatgaggtcattgggcagatttgagcttatctagcttttggaattagtaatttaggtagctattgctaaaaatgagatgtagacaccgctcggtttctaggcttgaggaattatagtacaagagctgaacgatgctattcattcttgccccaatattcaccagatgcatgctgtgtcggctactgaacctggatcagtccgaccacaactagctcaccctcaccacttgatagcaccaagctaaattaaatttagtttttacttgtaagacaaccttatgtttcaaataacaagattgtggatcatgccctgatattgtgagtgcattgatgccaaaatgccttaatggaagggtgtttcaggtgtttcatggtcataccggaaagttctcaatttattctctttcatttggttgaatcctatcggtcaaaatgttcccttttcctccctgcgaaactgctttgactatgttgtactccctccaggttgaaaacaattgtgtttatggacaagactgatgtccaactttaaaaactgactatgaataacttctataaaatattttctttagaaacatggaaaccatatgtatagattgatcttaaaatatatttcaataaaatcatatatttgttgatatttctacatatattgtaatagaaagtagtgatcaaagtttgttttttggagaccgtgtccttgcccaaaacgacaattattttcaacctggagggagtaaattggtgtattcatgaattttcttttcaccacagctgtatttgcccccttgtttcatgtgttgtctctaaggattaaaatgcatcaacaccattgctatattgctaacgtggttgtagtttgtttgaccatttatgcagttctctttttaattgattttgcagtttcccgcattttgggtatcaaactgtcaattatgcaaatgctaatatcaggacgctacataattttggttgttttgctgttgaggaattactgatatatttttctctttttctataacgtggttttttacattgcctgttctcatttgcagggaaattctgtgtcgactacaaagtataacgtcctgacttttctacctaaagggctgtttgaacaggtattacaacattgtttctttgtccattacatatgttgccaatagagaaaatttaggtttaatctccttttgtgatgaatctaggtattgttacgagcatcataaccatccttgtcaaatcaataaacgtttaccacagtggatgtttcccatggctagattgctgctttgcagttattgctgtgacatcaactttttgttccataaaaaaaataatatcaacatgtgaaccttgtgtagtttatctgtttattttgctttgacagttcaggcgggtggcaaatctgtactttctcatgatttctatattgtcgaccacaccaattaggtatctctatccgacacacccctgcacgcacctgtgctacttttggaatccactggtttcatattgacatgttgagcacagcacttattcattggttaattcagtcatcgctgttttctttttgcagtccagttcatcctgtcaccaatgttgttccacttagtcttgtgcttttggtttctctgatcaaggaagcttttgaggactgggttagtattccaccattcctcaattctctattttgttatgctttctaaactaagataaccgacagccttacctgtttctttttgctgtttcttatacagaaacgtttccagaatgacatgtcaattaataacgcacatgtcgatgtgttacaaggtcaaaagtgggaaactactccatggaaaagactacaagttggagatattgtgagggtaatgtcttaaatcttccttacaactacttttttacccatctgtttgtttacggaattattgcgcattacttcttattgtgtgcggactttaactctggcctcaaagtaaataagaaaaactaatagtgatggcatttctttagagcagatcaaacaagatggttatttccctgcagacttgctcttcttgtcaagcacaaacccagatggtgtctgctacatagaggttcatacattcgtttttaccttttccgctattctgcacattttcaaagtgtagtaaataagctacagagatatctttctctaaactgaagttctgttgaatatatttttgttcatcttagacagcaaatcttgatggggaaaccaacctgaaaataaggaaggctttggagaaaacctgggattacaaaaatcctgaaaaggcttttgaattcaaaggtttgtgcatttttgttctgtggcaaggtggttgtaacttatagttgttgctttgttggtttggaaacttttcccttcagtttctctggttattcttccttggtgctgttttgtacttgacttccataaaatgggtttacaggtgaaatacagtgtgagcagccaaacaattcactgtatacatttactggaaatcttattgtggacaagcaaaccatgccactctcaccaaatcaagtactactaagagtatgtttattcttgccgtttagttcatttttgtctttttttttgtccattataaaatattttgacctatgttttttgtgtattcctagatttagcatgacatgtttttttcacactccaatgtatataaaaaaagagtgttatcacttatcacgggattcatgagcagatacgtgtaacttactaactttgattaactcttttatatgaatgttggccacacaaaatgatgtcagtatatttaccacagaaacctctgatgattatactctgtccagaagtataaggatacgtagagtttgaaatttgtcaaagaatacaaggacacccacacctacttcgttatctcagccaattataaccatccctcacctcaaccttaatctctccacaaaacacgggagtacaagttttgcaaataggataactgtggtgcaaacactttaaagtactccct

SEQ ID NO: 4770 - DNA, 31601 bp, Oryza sativa
gcaaaaaaaacaaaaaaaataaaaggaagcgaaaggaaaggagaatctcggcgcggcccccgccctcttaaatactacgccgccgcggccgcaaaagctccgagcacatagcacgcgcgcactcgtctcgccgcgtccacacccatcggctccaacaccgacgagtagctcggtcgccggggccgccgccgcgcgcgcgcgccaccgtgtcgcgacttcctccgtgaccgggccgatcgatcgcgaggcgcggcgcggcgaggccggcatggcggcaccgggagatggggaagagaagaaggccgggagcgggaggaacaagcacgggttcccgcgcggcttccgcttcgtgccccgggaccaggagctcctcgacatcctcgacgacaagctccgcggcgccccgctcgaccgcgcgctcgacgccgtcttccacgacacgcggatcctcgacttccaccccgccaagctctacggtagccaccgcctctcgatccctctccccctctctctctctctctccttcttcttcttctccggcgacgggctgggtgggtgctcttggggatttgattttgactcgggtggattggactggtttggggcgacgcagggatgtacgcggaggacgaggagaacggctacatctacttcttcagcacgatagagttcaaggcagccaagcccaagcagaagaagtggccgcggcgcgcggcgcagggcggacggtggaaggccgtcctcggctccagccagatggtggaggttggcggcgtccccgtcggccggaagctctccatggagttctacgtcaagggggtcaggaccaactggggcatgcacgagttcgtcaggatcatcggccccaacatcgaggtaaactccccatgttgtatctccttgtgatgatcgaattcatttggtctgatttggatgcaatttgtgcgatcttgagttcttgactcgtacaattttttctctgaactttcgtttcgccaaggttgcggatcttgccgtgtaccgcctacacaagctatggacgaacggcgaggagaagccgggagacctcgccgcggacgttgccaagagcacgaaccagagtggacaagcgtcggcggcggactactaccagacttaccagaacgcggtctctcaggcgtatgcgtatgcgccgccgtacgtcctccagccaggatggagccaagggtacccctacgatgtcgcggcggcgccaccgaccgcgccctggcctgtctgttgggcgccgccgtccgcgccgggatcctatgactgctgctacgcgtccacgttttcaaggccgccgccgccaccaccaattgctgcgagcacgctggacaaggcgccgataaccagtaccgaccacggcgcatcaacgaacacttcggcggcgacacccgtggcgaacaacaagccgccgccgccaccagttgctgcgacagcgaccacgctgggcaagaagggggagggcaagggcaaggcgccgacgaccaccagtaccgatcacgccggatcaacgaacacctcggcgccacccgccgcgaactaccagccgccgccgacgacgactacgccgccgctgcagggcacgcagcacgtcttcgcacccggcgtcgtcgtcgggcatgaggacgaggagggctacctcatcgtcgacgaggtcaacacgtggcgcaacacgcagcagctcgtgctcgaggatgacgacgacgacgacgacggccgtgccgccggcgccggtgcaggtgagggtggcgcttcagcctcagggcggtgacagtctgacatcagcagattaagagagaccctgaggcgtatcagttaatcatgcgtgtagttactagttaggctccgatttgagcattggaatttccagatttcccgactgcttagcttggttttgatctgcccgacaaatttccgccaaattcgtagtgttcaactgatcaacttcatgctctttctgtccgttggttattactttacttgttctacgtgagattgcaattctgatctgcaactgcttgtaatctggatgatcaatagctgcttccctgctttatgattgtggttttgctggttttgaaatgctcgagttaaattggctctccgtgccacttgatttggggtaaattaatgtttgatagatgaaccatacttttctaacatgggagccatcttttaattttatgatattgatatcaaagtgacatgcatattcatcaaaaagcttttttatgaaaaggtgacagaaataagtttgtggtggtgcgtgcctggttaaatcatgaaattttagctttgggctctaattgattgttcatagtccaaagtactattcagcaaggaaacaagatcactgaaattcgctccagtcaaaactatcttgggtgaactcaacttaggccctctttgtttaggcttataagccaacttataagtcgaaaagtctaagccaaaacaaacaagcagtttttttatttggcttttttgaagccataagccactctaacactattaagccaaaagctaggttggagaagcttttttggcttatatgagatagatgtatgactccaccactaaacttaggacattaaatccactggcttataaatcatataagccaataagctgacttaaaagtctaggccaataagcctaagcctaaacaaagagggccttagactagagagagagagagagagtagctacaacctacaaaatcctagaatttcatgcgattaatttaagtgagcgcatgattttgtcaacatctcgatccatttgtcaatggactggggctgtgttcgggagtgagggttgggaatccactccctagcacgtaaaacgaagcagcgtttagtacatgattaattaagtattagctaaaatatatttaaaaaatagactaatatgattttcaaaagtaaccttcatatagaaaatttttgcaaaaaatacaccgtttagcaatttgaaaagtgtgtgcgtggaaaacgagtaaggtgagttgggaaagtgtcgacgtttgatagtcaccactacggtattaggatggtatggggatcgtcggtaccagagtatatacgagattgaagtaaaagagattgagacaaggatgtttatataggttcgggccccttatttgacaggtaatagccctactcctattggctgaagccggtgttgctcttattcatcataatcacaccagtacaacaattgagataacctatctatatgttgtcgacttggcggcatggataaccaactcgcgatcgacgacaaggtagtcttcctccttgagtatgaacccgtcgagatcagagatggtgctagatcccttttgccggcctccgttggcatcggatggggtatgtctaggctaatctctaatgtcgatatttggtggcatattggcttgtgtgtatgttgtgtcttgttggtcttgtggcttccgtctcccctctcctcctaggggagcttgtatttatacccatagatgtccccttctccaactctaagtagaactagaaagacaagtatggatacgattcgagtagtccttatagtatccatataaaactctatttgtcatttcttatccggaactccctctatatatgaggtatgattccgtataagacttggtatatggtaggccccgccgagcttagtcgattactattgggtatgtggtatccataaatctgacaaaaagtataggagtaccatgtaagagcatacccaggagctcatctatatttgatcctccaaatacccatatggtgtatcatccaaaaaagattcctcatccatatcccttttaatccaacagattatccatattacatcattcatatcccatcatcctatattttagtaatatctttcaactaatcttacatttgtattttaagggatatattttgaatgacttaattttaacggtgttgtttatcgcgataatattttgaaatgagtaaactttaacggatatatttttaatgggtaatttttaattgatatatttaaaatgagtgaagcattttttatgtgttgaacggctacatttccaacggctagctagctcattcaaattgtccaacggctagtacatacatgtaaagtttagctctatatataccactacattgcttgctatctttttgcaccatccacattattgtgcatagttcttactcaatgagcttccttttgagacatgttttattggatgaatcatcgtcatcgacgatgaaatcattgttgcttcaagaagatctagttaaacatctatggcaatttcatggtaggaactagtgtagtatgcaacctcccatttatgtagtaggcaagtctaattatgtatgcaacctcgtttacatatgaaatccatcaattatgtatgcgacctcatttatgtatgccatccatcaattaagtatgcaatcctaatgtatgcaacctgtatgtgctcacaattaatcatagcattcttgcatagtacagcataaaggtcacaaaacattaagttccaacaataaccattacataatacatcaaagcctacacggcatacaacataaaagttcacaacccattagaaaatagtaataaatagtacatatccatacatcatgaaatcaatccatatgagcctttatgatctcctgctgcaaacgcaagtaatatgtttttcttggcccatccatagcactaagatccatattcataattctttcttctctttcatgggtttctatatctaactttcgtttttctactttcaacctctctttctctagtgaaataacttcaaccaaccggtcatttctttcctccctagattgtgcactcatctcctttttctctgaccacatgttatttaatgcaataactacaggactactctcacttgagcatgaagaagtattacctcgcgggcattttgccttttccaccttcttcccaggtggtctcactaaaggatcagaggtattaatgtcggggctgtaatgaaattcactagagtttgtgcttgcagatggtctcactaaaggatcgacatgagccttctgtcttttctggaacaacctatcattccactttggatgatgatgcaaaatctcccaacagtgcattaaagaaaatgtcttcttctctgctgacttgtacaaagtaaaagcctgagttatctgcaataattggcaaagtcgataattggaaaaacaatatttttttaaagcaaggtactagctgaatgagatgcttacataatcttgaacaaccattccactttgaggtccattaagaatctgctcataatatccacaaaacttgttaacttgttcttgaatggtaccccaacagttgttaagtgaattttggttttgatctgaggggaaatttttgttttcatggaagtattgatgaatccttgcccaataagagtcacggtgttgctcaacacctgtgattgcatctaaagttgtattcagccaagctgacaccaacatttgatcttccgcagtgttgaaattttttgatcgcttattgttgggtctagaggaccctccaacttcagcacttggctgttcaccaaccataggactatgttgtggctgctgtcctgttgggggaaaattttgactaggatcccaattttctacatcaatgtttgaacccaacaaattaacatagttgtccatgtattcacatcatagcaacataaataaaatgaacataaaagcacagtacaaatatagcaacatgaatctaatttgtactctattcttattacttttctctactatgtgaatataaaatcaaagtaagtaacattccaatatattttctctccttctctgctattactacttaacattccactgtattttctttccttctcttctacttttcttctctaccttctttgctagtactactttgcagcgggatggccgataggcggcggccgagctggcaacaggcgacggcgggcatgcagccaaggggcggcggcggacgaccggactggcgagaggcaggggggatgcacgcgacggccgcggaggcggacaggcagggaagagccatggatggtcgggaagaaggcagccggcaacgggtgggtgagaggcggaggaggcaagcgacggctgcgcgcttggcaacagcggtaggcagctgccgcgggcagggcgacggcggaagtctgcaggcgtgcgcatggcgacgacggcagacggcagtcgcgcggctccagatctggtacgcctctccctctccactctcactccaccctccctctccaccatccgctgaaaaaacaacccaaaaaggtgcatggaggactcaccttcgctggccggccacgacggcgatggagaggaggtcgcggaagtttggataggggcgggagctcgatccagatgcggttgttacgatttggcgtgaggagagagacacgctatttttggcttttctctctctctgtttagcgcatccgacacttttagcgctttggatggcacatctcctggaccttgttttttcgctcctatacgccaaaatgcggatggagtagcgggtagcgtatgtcctgggatgctctgacagggaggtacctagtgtgcttatcgcctctgcacccgctctgcctctccttcacttggtacgccgtacgtgtatggtaaaaaaaaaaaagagtactagctggcaagctgctgtttgttaatgggcctaccccaatttgcgtgagggccttaatgggctcaactggcgcgcctcggaaagttgggcctcacacaggcccatatcttacggggaaagtaaagctacggcctaaatggaataacgtctttgcgccaccgttttcttccgcagctggccaactcgagccacctcatcaggaaaaaaaaaaagaaagagagaaaaaaaaaatctcgcctccctttcaaatacgccgccgcggccgcaaagctttcgctcggagcacacgcacgcgcggcgcgacggcgcgacctcgcctcgacacgagctctcgtgatctcgtctcgccgcgtctagctcgccggcgccgccgcgcgcgcgcgtcccctcgccgccgtacgtgtagcggagcgactccctctctccctcccgcctcacctccgggaccggtcggtcggtcgatcgatcgacggggcgaggggatggcggcaccggaaggccagaacaagttcgcgggcgtccgcttcttgcccaaggacctggagctcctcgccatcctcgacgccaagctccgcggaagcccgttaggccccgtggaagccatcttccacgacacgcagatcctcgacttccacccgtacaagctctacggtatccaccgcctcgatcgatcgatctccctctctctctctctttgtcgatctccttcttcttctccggcgacgggtgggtgcctggatcagatcatgcagttttggggattttgattcgggatttcgggtggatattactcgactgattttgcagagatgtatgctgaggacgaggaggaggaaggctacatctacttcttcagcacgatgcagttcagatgcaggaagattgtggagcgcgcggcgcagggcggccggtggaaggtgaacaactgcgagactctggaggttggcggcgtcgccgttggccggaagttcaccatgaatttctacgagcatatcggcggcgacaacgacctcatctggaccaactggggcatgcaagagttcgccaggatcatcggcccaaacaaggaggtattccattcggaaatccacttctgaatcttcgttcaatgatcggatacatttgatctcatttgggtgaaatttttctgatcattttggccaaaagctcgcggatcttgccttgtaccgcctatacaagaagaaaataacaagggggacaggcgaggagaagccggaagacatcgccgcggctagcgatggcgataccgagagcagcatgaacaagcgtagacgtgtagaagcgtcggcggcggccatggcgctgccaccgccaccgccatcgccaggcctgcctggaacaatgatgttcatggcggcggaccaggcgaacgtggcctcgacctcgcaggaatggcacggccagttcgccaacggcgctgcggcggcgccgagtcctagcggctgctggccctgggcgccaccgccgacaccgagcgcagtggagcctttcagcttctgggccagcgcgtcggcggcgactcctcctgccgccgcgaactaccacccgtcgccgcagccgcagccgctgccgccgcagggcggcgagtactactccagacacggcgccttctcggtggcgcccgtgcccgcgtccgcctgctcgacgccgtccccggaggcggcgaccagctgcctcttggctacgacgtcacctctgccggcggcaggtactgagggcagtgacagtcagcagcaagaacccccctgcgaattgatggaattttgaaattttggcgaattgcttatagctgattctgatctggccgacaaatttccgtcaaattcgcagtgttcaacttcgtactctttttctgaccgttggctgttacttcactagttctacatatgtgagactgcattgttttttgtactagtattaatcttggtgatctgttgttctgaaatgcttataaattttgcccttgtgccttgaagaatttgctatgtgcgtcacttgctttgatttgggatgaaatgtttgatgaacaatcatttttaattaccacatgcataggagcttcaggaagggcttgaatttgacagttgctatgtgtttagccatgatgcatgtagttttgtgatagtaccaacgcgggatattcataggatttttgtggaggttcctgttaaatcattgaattttaatttggaggctctgaagtgttcatagtccaaaatactgtcaagtaaattcaagtgatgaggtcatgactttaatttttcatagcaaataactagattaatagaccggcatgattttctctaaaacaaaatagttagattctgtttctggcaaggaaacaagatcactgaatttcgttccggtcaaaaccatgtagcttgaactcaacttggactctagagagagaaagagatactatatcatgcaagatatagtagatacaacctacaaaatccaagaatttcatatttttcatacaatgtaagtgagcgcatgattttatcaacatctcgatccatctactgatgaactgaagatatgtagtaccagctaacagggaggtgctcacgctggtcgcctttgttctacagctcgaaataaaaaaaaaaattaatatgtaccaattcttttgaaacgtgtatattttcttaaaaccggtggaaaaaatatttccaaatcttatttgctgcagctctgcctctccttcagttggtacgcgtatggtcgaaaaaaaaaagacagtactagaaacagcggtttttaatgggttgagcccaattttcctgatggacttaatgggctcaactggcgtccctcggaaagttgggcctcagataggcccatatcttgcggagaaagtaagcttctcgccgtgctcgtccacattccgccagctggccagctcgagccacctcatcaggggaaaaaaagggaaaaaaaaatctcgcctctccttccttacaaatacgccgccgcggccgcaacccgcaaagctcggagaacgcacgcacgcacgcgcgcgcgcgacacgcgacgtcgacacgagctctcgtctcgccgcgtccacaccaatcggcgccgccgtgtagcgaagactagctagctccctctcctccgcgagaccggccgatcgatcggggcatcgcgcgcggcgcgcgcgggcggggctagctgggcatggcggcaccggaggatggggaggacaagaatttcgggaagaacaagcacgggctcccgatcggcttctacttcgcgcccacggaccaggagctcctcgccatcctcgaggccaagcgcctcggccgcccgctctcccgcgcgcacgacgccttcttccacgacatccgcatcctcgacttccaccccgccgagctctacggtatccacccttctccgtctctctccttgtccccttcttcttcttctccggcgccggcgaccggcttggtggtggggatttgattcgggtggatttggaatgatttgggggcggcgcagagaagtacgccaaggacgaggagaagggctacttctacttcttcagcaagagggagttcccgacgagcagcaagaagcggccgctgcgggtggcggagggcggcgcgtggaacagctccggcgccgtttacaaggtggtgaagagcagcaagtccggcggcggctacgacgtcggccataagaaaaccctcgtgttccaccagcgtttccccggcgacaaggaggccgtcaaaaccaactgggccattcaggagttcaccaggatcatcgggccccagaacgaggtataaatcaaaaatcaagccacgatttattcccacatttcatcttcttgttgtgaggattgaattgatcgagttcatcttgatctcattcgggtggtgcaaatttgtgccgaattttgactcagagttttcttgaactttaatttgccaaaaggttccggatcttgccgtgtaccgcctgtacaagatgaggaaggaaggcagggagacgcctgcagacctcgccgccgacgaggccgcggccgcggcggccatgaacaaccgtggacaacaagcgtcggctgcggccatggcgctgccaccgccggcgacgggcctgcctgggggaaggatgatgtccatggcggacaaggcgaacatggcctcgacatcaaaggcgtacgggccgtcaaagtcaagctcatcgcaactccagcaggatgcggcggcggcggcggcgccaccgaacgcagcaggggctagcaactgggcgccgaggccttgcaactgccgggagtgcgcgccggcggcgggacactatggctacttcgcggccgcggcggccatgaacaaccgtggcggacaagcgtcggctgcggccaaggcgctgccactgccggcgccgggcctgcctggggtaaggaggatgtccatggcggacaaagcgaacatggcctcgacatcaaaggcgtacgcgacgtcgcagtcaagctcatcgcaactccagcagggtgcggctgcggtggcggcgccgccgaacgcagcagggcctagcaactgggcgccgaggccttgcaactgccgggagtgcgcgccggcggcgggacagtatggttacttcgcgtccatggttccacggccgtcgctggaccggaagggcaagggcaaggcgccgatggactgtgccgagcaggccggcggcggcggcggctgtcacgcggagtcaacgagcactccggcgccgccgaagggcgccgagtactacggatgcagcgtcgccgtcgaggatgatgacgaagaattgctgaagtttctgcaggcgatggtgaggggcgaggaggtggagggtgatggcgaccacgccatggccgacgagcgcggcccgcagcagggctcctccccggtggcggcggcggcggcctccggctccgcgcctgcaggtcatgacggtcgccgtggctcgctgcagggtggccaccatggatcctcctcccccacctcattggcggccgccgccgccaccggcgacgacgtcacatctgccgccagtgcaggtgacgacgtcagtggcagtcagcaggaagaccaccctgcgcgttgaacactgaaatttgaaatttgaatttgaaatctgggacaaattttcgtcgaatttgcagtgttcaacttcttactcttttctgatcatttggtgttgttacttcactagttctatgtgagagctgcaattctttactagtaatcctggtgatctattgttgctttacgatggtgatttgcttgttctagaatgctcgagattatatatttgttttgcctgagatgaattggttctagtgtactgtcactgatttggtatgaatgtttgacagatgaacaatcatatttaccatatctgggagatggatgaagggatttgaattgactgcttttatgctaacctgtagttttatgatatgaaagtgatatgcaaaagccatcctgtagttttatgaaatgtatgaagcagaggtctaagtttgaaatggacaaactgtattctgtatttctgttttaagcttatgtctctgtgtaataatggtgcaattgaacaaatgttgatctgcatagatgcaagtcttgatcactattttctgtgtggtgacacatggagcaattcttgcaccgtactactttaggcttagacgctttctctcaaaatatcatgttaatagttatgcaatattctcaaaatatttggcaatattcatgtgccacccgaatttcatatctaaactcaattcaccagagagaaagaagagacaaatccactaaatgaacaacaatgcttaaatactatattcacaccatggagtagtgtatgctggtgtactactcagtatcagctagtgcaaactcatggtaggagatcactgatcattggttacagagagatatttgatcaactcagaagatattctagctatcaaattctagattttacatgcaagctaaggccagtgcgtctgtgcgtgcatgattttgtccaaacactagatgctgctcctatacatgtaaaacatctagatcggccttcaaatgggccgggcccaatttgcgagagcaaagtaagcccattaacacccaactaaacacgtcttaaatcacggagacgctccattgatgccggccaaatcaatcgctagttttcacaaccgtcttacggcgatggccgccggcggcggcggcggcgacgacgaccaacgtttcgatctccccgacgaccctcctcctgcgcatcctccggctcgtcccatccaaggaggccgcgtcgaccggcgcgctctcgcggcggcggggctcgctctggcggcgccgtcaacctcgccgcgcgcgtctacttcgacggcggggtcagccgcagcgtcagcctcgacgaacgggaggaggccttctcctcccgccgcgacgccttcgtccgcgcctcgccaggcggcgttcgcggcggccgccccgccggaggcaacggcggctgccgcggcgtcaccaggctcaccctcgacgtgcaggcgaactgccctgcaactccttgatctccaagttcctgaacaatggcggcgagacgacggcgaggtggacgtggttgacctcgtggtctcccaccctgcggcgcgccgcgtcgaggatctccgcgtccgcgttgtcccctgcaggtaccgctcctactccgacgacgacgaggagaaagaggcgagatgagacagcggcgtgtacagcctgtcagcctcaccgtcgagtccgcgtgctggacatcaccgggtgcagtgcaccaggctcgctctgccgtccgccgccgccgccgcgttcccgcgccgctgcgtcgtgcggctctggcatctgcagcgcctcatcgacgccgcgccggggctcaccacagtgcacctagagtccgtgtccgtctacttcgacttcggctgttcggcaaccacccctactagtactactacgatgacgacgaacaagactccgactccgatgagtcggaggaagaagagtcgttcgccggagacgacaccggaccgggtggagagtccggcagcgagagcgacacggcggaagaagcgcgcctcctcctccgctgcccggcggccaccacacccgtgctggcactgtgcaattcaagcacctacgacaacgacaacggcggcggctgcatcgcgatcgacgcgccgaagctacgctccttgcacaacctcgagtcctcgtcgccggcaaggcgagacgagagccgagcacctccgcactttccccgacctcgagcgcctcaagctagtaacggaggcgcggctgcccgctgccggcgatgaggacggcggcggcagcgatcgccaacctactcgatccgttgctgcccttctcttcgagacctcagcctcaagctcgacacgttgcctacaccatactcgatgtcatttcatgcacaattaatttcaacaagatttcgacaagtccattggtcccttcacacgccggaaatggatgccggcgacggcggtttcattatcggcacggcagcaatggtgatcgtcatgacgacatccccgcgcgttgagtgaacgatcgttcacctgctttgcacagcagtctgagaagagttagcctcaagtttcagatggattcacccgacaactttggagctcggcttgtcagattcttcgctcaaattacgctatggttctagaagaaatgtgcatcgatagtggtttgtactccctccgtttcaggttataagatgttttgacttttgtcaaagtcaaactactttaaatttgaccaagtttatagaaaaaagtagtaacatttttaacccaagacaaatttattatgaaaatatatgcaattattgatttaatgacattaatttagtattataaatattactatatttgtctataaatttagtcaaatttaaaaaaaaccaaagtcaaaatatcttataacataaaacggaggaagtaataaacagaggtctacaatgaaacaaatgtggcagcagatggctcatccaagatttctctgaaacaaaagaacttcgttgatggttcgtcattggtcttctcaagaactcatatccaggtaggagtgaccaacaagctttatggtgttaccacttgaaatggggaagagtagtatggatgatttaagtttgatctgattctgatgtggaatgtaataaacagaggtctacgatgaaacaaaacaattcttttttttttgtttgtttctaaagcctatgcgcgttgagcgattctttcaatttactatagcaggcctgaggcaaaaaatatactataaacattagagtttaggataaggttcggtccaaaatttaaaacattgatcatcaattttatattagaacaagttcagaaaaaaaaatctaataactttacgatattacgataatacttttcaaggcaattcacatataccattaaacttaagcatctgagaaatcattattggtcaaagttttaaaagtttaactaaattttatcttaaacattaaatatttatgtatggagaaagtatcatgataagtaggagtaatagacacatcaacatagttttgctacaaaaagtactgcaatatttttttctttacttcacgctttttcaccatgtgattaattgctaactctacctactaagtagtaagtatatgttcgtctctctcttatctcttattttttgacttccatttttcattttttaatttatcagtccattttgcaccgttaattttcaaggaatctagtagacaattaattatttatgtcctagttctcactagatatgagtactagaaaaacataggcttagttcggcatcctgagttcccaacccatctccctcgtgttccgcgcgtgcgcttttcaaacaaataaacggcccgttttttacaaaaagtttctatacaaaagttgcttaaaaaatcatattgatccatttttgaaaaaatagcaaataattaattaatcacgcgctaatggaccgctccgttttccgtgcgcggaacatatgtttccaactagcagcagcgaacacagcattagtcatgtgatttgcaattcatagttaaatatataaaattccgtgtaaaataatacaatgttaaatatatgctgaaaaatttgagttttctattttctccttgagatacttcttcttttaatttacctttttttattggaattaatgtttttggactagttatttttgttttgtttttattttggatcatctaaactctgttttgtgagtacattagcatcctcataccgacaatcatcctttttacgtgcaactcatcgtcaagaagagtggttgcatatgcctagataaacgcatttgggtggtccaaagtgcattaaatgaaaaaaaaaagtaccaatccaaagtgaaaaagattcagtacagaatggtttaaagtaaaacagagaagctaatggagtagcgcactgtcttgctcagcttgcaagacggtcgaatcagtagatagtgtggagaggggaagccccaacgtgtgtttctgagcttttggctcatgattgtactcctaatacttgattaataaagctctctgtttgcggaaaaaaaaggggagtaaaacaatcggtaatgtttggctaatagaaatgggaaataattttccacttaccaaaagacatctttaaatcctaaccatttattccccctcttccatttaatcctaaccctttattcattttacaatcccgatcctttccctattttccattatccaaacacacccattgggtaataacaaccggtgcaaaagtgcgattcattccttttcaaaatgggtgtaggcacaagtaggtacagtatgtgactacgagcccacaattacccaatgaagtttgtcctgtttttattgagttgctataacgcctccctactttgaagcatccatgaattatccaatcctagggtattacagtgtacacttaatttcaagtagctagcatgccaagtggcagagtagtcaaatcacctctttgttacctaacctacgtaccatgatatggtactcctaagagtgacatatataacacatgctaatctcaaagagaaaaaaaatcgaaaggattggatagaagctttggccgttgctgggcagtttcggcgatccatccggcacgtatatacccgccaccactctacgcacgatagaattgcaaccaacgacactactaaagtactaaacgttaacttgacccaggtcaacaacgtgactgaattaaaattttataatatagctgaacttggaccccccacgttaacacacggagcagtagcattgcatctatcagcttaaaaatgttagatctgacggtaatggtgtttactttgaaagataagcatggaccagaagagtaatctagtcgtcgatagcaattagcaaagggtcgatcgaagctagaatatatatataatatataaatgacacttgatgaatacaatgataagcatattttccgagcgtcttcgttagctgttactccctcctgcctacaatataatataacgattttgagtttttatttgtaacgtttgaccactcgtcttattcaaattttttttcaaatataaaaaacaaaaagttgtgtttaaagtactataaataataaagtaagtcacaaataaaataaataataattttaaaaaattttgaataaaatgagtggtcaaacgttgcaagcaaaaactcaaaatcccttatattacgggacggagggagtaccactttcgtttttaacgtatgacacaattgattattttaaacgtttaaccatttattctattttaaaaatttatgtaagtatcgtttgctttattctgacttaatttattgtcaaatgttttttaagcccaacttaaattctttatatctatataaaagttttaaataaaatcgaatgataaaatatttataaaaaactcaatgacatcacatattaaataaacggagttggtatgagttgcaactttgaaaggtatgcgtctgacgttgagttgagcttgatcgtcatcgctacttaagtgcctcaccgaggggcagcaaacgtatcgatcgatcatcgcacattttgatcttccattcctcaatcgcctcctctccggcctaattctcctccacctcctgtgatctaatctctccccgtgtgtgtgcttctcttctcccaaattaatggcagcttcgtcgtcgctagccaagaatcgcgacgtgatcagcaccaccacctccgccgccctcgtgatcgccgccgccgcccgtcgtctacttactcctgttccccgccgcggccacgacggcggcggcggcgctgtcacgcgccgcggcggtcgtcgccgcggcggcgatcaccgtcgtgccgcggatgctcgccgccctgcagtcgccgtggttcctccgcgccggcgggggcggcgcgctcacgagggcggcggcggcgtcctacgtccaaatgtgcgccgccgcgagcccacctcgcggcgacgacgacctcctcgccgccggcgcggccatggcggcgctgctagtggctgttctcgcggcgtcctacatgctactagtagctgatcagtggacgtctcgatcggcggcgagtcgaaaatgcaggcagtaaattaataattaaaatcggagtgaggcctcactgtagttaattaactgggtttattttttattttttacttttctgttctgatgacgagtaattatattctgagtgaggggctttgcttcgccgtttgatttatttactgtacgacttccttttggtccgtagtggttcactctgtcgtttgaggactttgtattagggccgaaatcccgaaattttgaaaatttcggaaattttggtccgaaatttccaaaattttgagcaaaatttagttaaatttgaacaaatattacctaaattcatgaaaaaattttggtcgaagtaatatcgtatcgaaggtgactgaaatgaccgaaatttccgaggtccgaaatttccaacctactccgtacttctctcgatcagtcttttgtgcatgcatgaatcagtttatatgacattagaaaatggccgtaggaaacagacctgatcaactgactttatgctttatgctttatgcagtttgcagttgtacctgatatgtaagcgatctctctctatacttaaaaattagtaaaacattagacttgttcactttgatgccaaaaaaaaccttaccaaattttggcatagttgtcaaaatttgccaaaattttgataaaatttcttatatagttaccaaaatttggtagcaaactaaatgtagccactttttttggtaactttaccaaaatttggtaaggttgaaaatggcatcaaagtgaacaagatcattgttatatactccctccattctataatataaaacacaactatttttttaggtgttccataatataaggcatgcatgtttgcatacaattaactaggacatcttctctattaaattattacttttttaaatcctccacccttaagatctctaattgtaacatcttgggtatttagctatagtattaatcacgctaatgacttgatcacactggctgagagcggtattgattgagccacgattctggctaggacctataaatatgttgattgttgttctattatggatcttaaatgatatttcgatcgttttcttgtcatttatttatcaagtcatatccatatgcatcattgatttattgttagttagactaaatctgttgaggagtgggataatttagtttcgatcaaactatacgtagattagttgtcacgaagctaggtatacatgcacagtagaaatcagaactgaaactatagtaaattattcacaaactatttggttataggttgcatacatacatacgtacgtacgtacgtacttacgtacatacatatacagactggcatacatccatgtgtacacatattcattataaatcttatacgtatgcatctcatatattgtgcagatacatggtgcttataaatacaaactgaactcatacgctctgcattcaagtaaaaggagaaattaaatgtattaggaaatgtttatatgattttagaccgcacaatttctatttaggaggttgcatatttaaaactttagttgtagtagcaataaaggaatttttgtgttgtctcaatctacaaattttgcatccaaccaaataggggcacaaaagatgtagggcctgtttactttgatgccattttcaaccttaccaaattttagtaaagttgctaaaaaagtggctacatttagtttgctgtcaaattttggtagctatataaaaaatcctgccaaaattttggcaactatactgaaattttggtaatgctaaaatttggtaaggttttttttggcattaaagtgaacaggcccgtaaaccgagccatctcaagccaaattccaaaattatccatttttgcataaaactccctgaattctagggcaattattaatcggtcccttaactctggagtaacctccaaaattccaaaagcttatagactagaatgcaaaattactaagtattccaatttcaccagatttccattaaattgtaaattagtgaaacctctcaaaattaatccaccgaacatgtcatggtgaggtgtcaatcaaggaagcagccaccaaacaacaagtaagtgagtcactggttaagttccaccaagttaactagttcagtgtgaaaccattcattccaaccaagcaactgtatcgtcgataccaagagactgttcactttaatgctaaaaaaaccttactaaaatttagcatagttaccatactaaaattttgacaggatttcttatatagttattagtaagattgaaaatgacattcagcagtaggcacagcagtagtagtactaccattttctactgcaaagagcagcagcggcagcggcagatcgccatagtggcagcaacattaggggcgagtagcagctatgaagaacaacagtacaagcagtagaatctcaactggagtaaggcagtcttgactagaaatcagtagaggttagggagataaagagatattcaaccagaaattatacacctcaccaacaccacagctcaaccatagtatccacagtaaagcaacttggtagagagaaagagagagatgaaccaaatctgaagaaggagaagtaggggtgttcggttcctgcatgaacagtgatttcagctctaggaggagatggtacttcagctcaagaaacaagatggatcagtaacagcagaagcaggacaagaagaaaggaggagaacaggcaactgttgtaaattggatcaggaggtaaaatcagcaagaacaagaaatcagaaaaatcgttagcaagggtgcaaatcaagtaggaggtacctgagcttcaagaagagaggggtttcagtttctggaggagcaggtggtgcttcagctcaaagaggagaaatcagagttccatcaggagaacccttgaatcagagtccagaagagtagctgcagaaccagagttccctatatcagtcacctaaaatcatggcaggtaatcaggagattgaaatgaaagtacaatcatatcatggcatgattcttgagtgatgcatatactagtatgtgtaggagttgtgagttgcatttgcatccattagaatatgaacaagaaaattaagtaatttgtgaaggataagtctttgtagtccttggtcgtggttcttcctttgcttttgggtagtttcaccttttaaggacagcatctactcctttagcatactttcagttgctaggacagctgcggttagtaggacaacagcagttagcatctcctttatgcctcatttatactttattcagtttggatgccttctaggacagcatcctattcaaatttcgaattttagactagggtgcagcaataggcttacagccagctatggctatatatatgtatccaacctccctcgggtaggtatggctttgagtttatgaataaagaaaaccagaaaattgccccatcctaagtgccatcctcttctcaatgagagtaactattaaaattctaacaatttgagctgtagagtaggaggtgtaactagtaggacataaatatttttttatttaactgataagtaaataggttaatgttagtttataattatttggggttagtaacaagaaacattttagtttttctagaatcattatgtaaatgcatttaggtaaacagctgcgcatgcatttgtttggtgaatcctgaaattataaatagttagaattaatgagtagagttataagtctctatagcagagcatctagggcaaatgattctagattagagcatggcatatattagttctgtaagtattacttcctccattttataatgtaagactttctagcatttcccacatttatgtaaatattaatgaatctaaacacacatatatatctagattcattaacatacatatgaatgtggacaatactataaagtcttacattataaaacggagggagtaatcaatataaatcgtattccactgtgagaaacattagcagccttaaaaatcaaccaatgcattagttcttaatattagtgatactgaatgtataggattactctggatagcaagtgcacaggtatatctttagttcgaataaacctaaacttatgggtctctacagcaagtcatctagagaagagcataatatcagaatctaaactttagtagttgatcagcataaccttgctaagaccaataccataaacaccattatttaactgtgatttcagtagtaagtatactttggcatcaagatgaagatttataatttctaggtcattaaatccctcaagtgatactaccattatgcatcatgtatgaatgaaatcatattaatcctctagattactattcagcatggcaacataaggatctgatcatgttagtttattagtttgtaacaaattttaatatttagatgtgttgctttttctaatacaaggatctaaatcactaatggaaacgatagagagcaagagaatagagtagagcaaagaagctacattttcatatattacataagccgtagacaccatttacataggggtatatgtccttttataggacttttaggtcggtttctacaataagcgacccgctacaatagcatgtttttacagctcatgttacagctcatctaatagcacaaaactagcttgctaccaagacagacgtgctgcttgccaagcacaagcagtaatgaaactacctgatacagtgtacacctttgctagctagtaaaatttgctttgtatacttccatgccaacacaacaaagcatataactcacttgtgtattctacagcccattatcactcatttacaactaaggttagctaatttgtgctagaaacttcaagcagcaacaagcaaccaacttgaccaactagtagtcaaatccaatttgactttgttatctcaagaacacaaattaatttccaacattctcccccttaatttgtattcttgagatcttcactttactccggtcgcttctttatacttgatgagtgctcacacttgatagtcagtaggacacatcttcaacttgactcatgtgtttgcctgagacggtgacgcaacttaacacgcctcgaacaaatactcattcagtcagtcggtcacatcttcgacttgccaaactccctcaacttcaagatgggtagtctgtcgcttctacgacttgccaacttgaacaaaacacacattcacgttgtcctagacacaactcttggcaccaattcagaacggtgaacatatcttcctcaacgtcctggactcaactcttggaaccaatataggactacaaacacaaactagctactactcaccctagacgcaactctcgaatccaattcaagacgaggagcacatctacctcaatatcttggacacaactcttggactcgaatcaggggactcttaactcaggatggcgtcacatcttctcaagatccggagtatcatcttccatcgattctagacagtgactcaacttctcatcttcccagactcatctaccatggtattaactctacaatcccaattcaaaatggtgacacatcttcttgtggacacacattcacaaaaactaacacacaactagctggtatgtatatggaatcaactacatacacataccgagatgacggttcaacaacatgcggtttgcacctcatcatggagccacatgctccgtactaggcacacaccaccgcacaccatctcaacttctcacaagttgttgccatcggcctcactgccacaaccaccatgacgataggtgccactccacagcattgtcatggtgtcatcgggggcgtgctccttacctccaccactttcttgctcctgctatgcccaacttaaaaacaaaggcttgaactctcaaatcttgctctatctatgcctcacctgaactaggctctaataccaattgttgctttttctaatacaaggatctaaatcactcatggaaaagatagagagcaagagaacagagtagagcaaagaagctacattttcatatattacataagccctagacaccatttacataggagtatatgtccttttataggacttttaggtcggtttctacagtaaccgacctgctacagtagcatgtttttacagctcatgttacagctcatctaacaacacaaaactagcttgctaccaagacacacatgctgcttgccaagcacaagcagcaatgaaactacctaatacagtgtacacccttgctagctagtaaaatttgctttgtatccttccatgccaacacaacaaagcatacaactcacttgtgtattctatagcccattatcactcatttacaactaagcttagctaatttgtgctagaaacttcaagcagcaacaagcaaccaacttgaccaactagtagtcaaatccaatttgactttgttatttcaagaacacaaattaatttccaacacgatggtcattgcataagcataattaaggatttaatcatgctagagtgatttctattttagtaatgcaattcatagacctattcatgtcagcattcattcatcatgaacatataggcatcatccatcttagcaacccaatttctctagaaccctagatccagtaaatacaaccctaagtataacatcatcaagtgaatcattaggacaaattcacaagcatcaccagtacatcacaatttacataacaacaccatacaagagaggacaccacactagtatatcacaatagggatcagagacgggaggatggaataggtagctcacctatggagcagagggatgcagccaccggagttgcctgtgtttccaccggccatctccacggtggctgcagtagcaggagaccggcggctggggttagtttaggggcagagaagcgaggatccaagaaaccgattcaggccggcgacggttgcggggcggtggctagaagggtcgccggagtggggtgtggcagcaggcgcaagggagagcgacggcactgcctgggaagcggcggcgctgggtggagagcctggttatgtaatctggatgatattctcaagtttggtattgaacttgtttgttctcaaatggttatatgtgcattatgggtacatgctaccatttttttatctatgtcaagtgctttcttgacttgtgtcaaatgctctacaaattgcaaggtacatgttgccaaaatttagggtacatgctgtcaaaattttgcttacatgctgtcaaaattttgccatcggagcaacagtttatgaatacacatatatacaatacatgcagcaatatatgcagcagttatatgcagcaatatactccctccgtcccataaaatatcgaatcctagaagcccgatgcacttttagtccaagcggtgaaagatcaaaatacccccatcaagtacaaccatgattagcacttttgttttgaaaaaaatctctgtgaacactaaattgttcccagccccttcctcgatacccaggcatcccaccaccggatgttcgccgtcgatgcatcactgagtaatggtgtcacctgcatttgatgacaacgccaaataccaaacgcatcaacaccaaaaaccagcaagcctccacctttgccatctggatcgtgcatgaagccacgaactagcaagtaccaacaacatagaagaaccaagaacatgaactagcaagtaccaagaacatagaagaaccaagagccgagaagaaccaacaacagagaaaaagagatactacaagaactagcaagaaccccgacgcatgaactagcaagaaccctgacgaggccacgtccgctggtcgccgccgccgccgccgatgccgcgtccgctggtcgccgcagccgactaggccgtgtccgctcgttgctgccgccgccgaggaggccgcatccgcctgttgccgctgccgccaccgatgccacgtccgctggtcgctgtcgccgacgaggccgcgtccgtcgtcgcagccgccgctgccgccaatgccgtgtctgcttgccgccgccaccgatgaggccgcgtccgctcgtcgccgcggccgatgccgtgtccgcttgccgccaccgcccccgcagacgaggccgcgtccgcctgtcgccgccgccgcccccgccgtcgaggcggcgtccgccgccacatgatggtggagcgggagaaggctgaggagtagaggagagagagatggggagaaccgctgggtgggagaggataaggattgagcggtgtgaactgaacgcgaggagagagaggccatgggcccatcgatgtgctcgagacgacgtttctcgttttgtgcgcaggagtcagttttttgtgggacaaactccctcccctagaattcgactttttgtgggacgaagggagtatgccactatcctgctcagagaagaggaacagcagggcagcaggcgtcctgcagtcctgctcctgacgccattttgatctctatggcgagagaggcagagcagcagccagcacgcgctctgcctccccttccccccttcccgatcccgatccccttctctctgtatccctttccctgacaagtggggccaggggtaaaagagtccgaaaagagaaggaaacaacagaaaacgaaaaagaaaaagagaaaatgatggaaaagagagaaagtgatatgaaatcaaaaaattagcactcctagtagtgtattagagaaggcatgcggattgggtggtaagtttgcaaaggcgcacatatttagtggcttattgtcaaaaatctcgtggagagggtgagggagaggaagaagaacgagagaaagagagaataggaagaaggtggtctagatgggcttttctgttaggctttgacatgtgggctgtatatatgtgtactattgaatttaatgactattgaatataaatctctctcaagtaaagtaaaacttctttcaattaaaataattactcttttaaaaataaaaagtgcaatgatgtttgttttaacactaaatattttagtccaaaactaaattatgttatataaatcatagatctttaccaaatcaaaacatacaaatatatttaaccatattcaacttaaaaatacatatgggtcatctagttgagtcttgaggtgagagtggataacctatagtgttgtagattagctatgatattaaggttaggcatatcatgtgcatcgcattcatataaacattctcgtatttagttgtgttttattgtttctttcagtttggcgtttatcttggatttcttgggattcttcattaatttattcgtcttcgatttcaggtatcttaggcaagtccaacacctttgaccaactcttgttctattttcgtaattgcaatctatatgtatcacattgcattaaattatactttctatgattaaaataaatatgctgatggattggattgactggtggagcagtcggtcatattataggtgtgttctgaacttgccatggtggtgggggttcagttacatatatttatcatcataaggttaaacaacaactgttatatggcattcaagcgccgtagcgatcgtggcaaccacatgacctggaatggaacaggctagcttagtagttctttcttaatggctttatcctgcgggcttaaggacttccgcgaatcccatgagcgtggcctagcgatgagggttgccgttgttgcagaatccgattagatgatgtggatcgctgttgttgcgggatcacatgattcgccgttgttgcgggaatcacctgcagagataattgacagatgggattgatgaaaagcttgtgaccttagccttgccagcatacaccatgaagtgtgcttcaagcgccgacaggcgtgggcattaaaaggtttaaggcgtctgtgggtacagcgacacacctctgcagagtatatgaattatgatatgtcactccgacactccctgtttcgggtagaaactgcgaacgcggcaggaaaggaacctatcggaggttctaatacctgtggtgccttatatgcaatagattttataattacttaatatgagtttttactacactgttttatgaacttgcataaaactacttgttcgattatgggatttggagatatatatattatgcaggtgaattataggcatgtatttgttggattgctatagttgtacttgttgagtaccattcgtactcatcccttatatatattattccttgtagtgttgagctaacaattaggtgaagaaatgttctacatgattgatcaagatcaaagcaaagactcgttccatatctctacatcaactgagagttgaaggtcacgaagatatagaatagcaaggtattgttagtgattattttagcaaaagctaatttctttagtttttatttaatggttttcgctacagttgtttctgttatgctactctggtgtactcatttcttggtaagttggttcttactaaggaatgagccgtagaccggtattctaccccggaagtagaatacgagggtcactacactaattctattggatgcatgcattatatttattagggtaatctaaactaggggatgataataattgtttcttgatctttgggctaagagtggttgtgccttatattttagaatggaggaagtactactaatgtaaaagtaattataatcaagcggtttaccatatttgttgggacaaggactactccctccaaagactttaccagatcttatcccaaaaagtcaaatacttataactggagggagagggaccgagcgagtataagaaaatgacagagtacatggtaatttcacatagaattttttctatcacaaatcggactcgctcttccgaagtttggccgcttggcaatttcggatgtagatagtcatatatctggcacacacccaacgtacacgtaaagataatttgaccgaggtaaatagagtagaccgtgtgtacgccgtcgacttaattagatattcatctgccagtgcctcacaaagttcgtaatcaaaattgttaaatattaccacgtttgcagatgaaacattacatcaaacacaaaaaagagcttgatgttctttttaaaagctataatcacatatactaggtacatcgaagtgcgtacgcgcacgacacaccgatatttgtgcatgtattgtaaataatactccctccgtttcagtttacaagacattttaactctaatcgaagtcaatctgttttaagtttgactaagtttataaaaaaaatagtaacattttcaaccaaagacaaatttgtcgacgtttgatgtcgcgattccggtatttgcatagtatgaggattgttggtactaggatatatgcgagactgaggtaaaagatggcgacgaggatttttatacaggttcggacccctgaattgtcaggtaataaccctactcctgttagccgaagccggtctttgctcttattcatcataatcacaccagtacaatatttggggtagcctatctatctattgtcgacttggcggctataaaaccatcccgtagtcgacaacagagtagtcttcctcctcgaatccgtgtccggcgagatcagagacagcgctagatccctcctgacggtagtcgtaggaaccgtatagggactaactatgcttatcaccgatgtcgatatccggcagcttgtcttggcgcatgttggcttgtatgttgatcttgtgtcttgatctattgttccgtatcccctctcctcctagggggccttgtatttatacccataggtgtccccttgtccaagtagaattaggaaaaccaatatagatacaatccgagtagtccttatcgtttccatgtagaactctattcatcctttcttatgcggatctcctcctatatccgaaggttgtttccgtataagacatggtatgtggtggatcctgccgagatttagtcaactattattagatatatagtatccataaccttgacaaaatttattatgaaaatatattcagttattactatatttatctagaaacttagtcaaacttaaaacaatttgactttgatcaaagtcaaaatgtcttataacataaaacggagagagtataaaaggaatatagaaaatatgatacaaatacaataaattgggatgacatctttttagtgatagaagaaatcctacctatatatatccatatgaatatatttagagttagagtaatatgtagactctagaactaatgactgagaaacaataacatacaaaatgagaagacggaaacactaagtttcgtatattttttcgacttactccaaacttgctcctttattattatgcattaataaccaaaacgttacttgtttatttattagaaactttgatgtcgaaatcatcctactaaagatcaatcttctacaagaaatacttttttaaaaaaaacaaacgagactttttttaaaaaaaaaataattgtaatgacgtaggccttgtttagatatcaaattttttttacaaaaacgtcatatcaaatgtggacacatgcatgatgcattaaatgcggggaaaaaatcaattacacagtttgcatgtaaattatgatacgaatcttttgagcctaattacgccatgatttaacaatatgttgctacagtaaacatttgctaatgacagattaattaggcttaataaattcgtctcgcagtttacaggcggaatctgtaatttgttttattattagtctacgtttaatacttcaaatgtgcgtgtatatacttcaaaaactttacacgcaaggaactaaacacacctgtaaataacatgcgtctaagtaaattggcaaaatttgctacatgacactcaaaaaagtgtaattagctaggagacaccgtaaaaacgtgatacggctgatggacactaaaaaattgtgtaattggctataggacaccagaggcaatattttataactactgggtcaaaagaggcgagaaatttttcaaaatagcgaaattgcccctaacacggagcgccgccgcagccgcctcacgcgcggtcacctgctggtcgcgctccacgccatcgacgtggccaccgactgccccccgcgcggccgcctcctgctcgcactcctcgccactgctgccggtctcgcgcacggctgcctcctattcgtgctccatgccaccgccgtgaccaccgacgactaggaggacgat

SEQ ID NO: 4771 - DNA, 28834 bp, Oryza sativa
tcaaatattggttgaaaaatcaacggcgtcatacattcaaatacggagggagtagtagcgttattatattatttgaagacggagagagcatagcaaattaagaaaataccgtcgctagcttctcggcgtgaagtacggtgtctctgggtgacggggttttaattgctgcggcagcgaaggctcaaacaaagaacaaaaactacttgaagttgtagtggtagaacgaggctgaagttgccacgtaggagtacagaaagtcaggagtggggcccaccggaataatctgtctcgtcactagaatgttgtttggagaaaaataactgaggaagatagcactagtatttacttagcttatcttaaatatgttaaatgttacttccctaactctaattataagacctgtatttttttacacggtcttcaataacgaccactattttattttattctataatcctaacaaatatgaaattagcatcacatgaaaatactttaaaatataaatataatgatataacatgcataacacttagtatatatatatagttagtatgattattagtcaaaaaatatcgagtttgatttttcttaaaaatagggcgccctataatttaggacgtactaagtattaccagtagtattattacttctgtttgattatgtcgttgatctcttttcacatgtttgacaattcatcatatttaaaaacttttttataattataatttattttcttataagttattttataatttaaagtattttaagaataaaacaaattgtcaaacatgtgtttaaaagtcaacggcatcatctattaaaaacggatggttatatatatatgttaatgattggaggtcgtatttggtttggtatatgattccttagaataaatacacacggaagtcatggctacctaataatctggtacgagctgagtaatagtacaaagttatatatcatatggtagtttaggttatccggtagttatacaaactaacatgatactaaatttaatgaaattaagaatgtgttggtttccaattttttttagcgtgtgtaaggagcaggtgtatgtgtatggtattatatatatacagtggtgtatgtatgttttttttaatgaatcagcgagccgttaattttatttaatatagaaggagtaaactgtaaaaataaaaagctgtatatacacaggaccttaggtccagcctagctaaaaattaaaaattaagccaatcgctgagactcagtgtatgtatgtttaatgtacggctagtaagaaatagaaaagctggtacatatttatacatactatagtgtcagtatggaatgaaccatttgagatgtcaaatcgtctcatatggttatacggaattttagaaaaacaccgtttaacgcacaagcatccgtccagctcggtcctgttccggcggtccggcaggattcaaccgattcttttgccaaaagagagtatataatctgtaacttgtattgtatttggatcacaatctgcattcataatatcgttgtaattagtctctaatttgtgttgtgaacattttctcgattgttgctgggtgaacccattttttccgaaggaagatcgccggctgattttattaacgaaaaacaaatggatagcactccactgctccaattttaggtggagctaaaattgtttgactgggctcgagctgcaaccgtgcaaaacataccctacaacaactatagcaactactttctgtcttaaataagtttatttttttacctattccacacatattaataaaaaatagaaaaatagaatacatccactttatccaataccaatatagttattcctcagtttatatattgctaatacatttactcctattttcataaactcagatatataattattgaaaattgaatttaatttgagataaatgggaggaaaaaaatgaatttattttaaacggaaggagtaaaaatgaaaatatgggataccaaaaaagaaatacaaggagtaacttagtatttatgatagtataaataattttaaactaattaaagatgcacgaattatactcgtggatatcataatttgaaaactagtgatgaagccgtgtatctactgctccacaccgcacattgatggtgcttcctcgtaaacttcgacacgaatattagggaatgacgtaatatcaaataattagaaagagtgaggctttaaacccaggtcatctagtccaccacattgtgaagctagctggaaaatccctaggagtttctcagttcctcgtaaacttagtactgaataccgaagttaataagaaagaactgattatgtttctttctagaactagaatgttaaagctgaagcgaaatgagcgtagttcaactggttagattttatacggtggaacaaatccatctagatttaagttctagatttgatacgggtgttcacatttatagttaattattctttcagtgatatgcagtatacctatcgacagcgagatgtccgtgtgagcgtgtcaagggagcaacgcgaatcgagcaccatgatggttgttcttgccatctgtgtttatctttgttatgggttagcaattagaactactcacttcgttccaaaatataaaaacctaggaccgagtgtgacatttcctagtgctgtacagattcgtagtactaggaaatatcacatccggtcgtaggttcttatattttggaatggctgtccagattcatagaattaggaaatgtcacatccggtcctatgttcttatattttggaacaaagtgagtatttgtttgggatgcttagggtcatgatccatgagttggacaattagggcttgtttggcacagctccagatccacctcttctggaactggagctcagcctaacaattttagcttcacctaaaatgggagcagagctgggtagagctctctcacaaaatgaactagagaggtagagctgggtttaggcaactccacaactccattccagacccaactcctggagctaaatttaggagttgggactctaccaaacaggccctaaatatacccattcatcaatttaaccaatacaccagatatatttcatgtctggtgttttggttaaattgatcactttggctactcatcaatcgacaaccccttctccgatgaggtgcggaataaagtagagttaagagtgggagtacaagaaggaaaaggaaacttatcaagccaagccttggagggaggccttgaaagcagatccaatacgcttcatgtgcaacttctgacaaaaagagaaaacactctaatacaacaaatgcaataagatattgattataaaaataatcatcaaacttcaacaggagactacccttcaccttcttcctctactacattggctgaattcgccttcttcctatattccagttgccaaatatgggctccccataatataggctcacagcgagacagtgtgagagcccaaatttatagaaatcgagcttgcactagagagaaagggcctcacgatatcagctcatatggaggtggcacgtaatagatcaagttcttcatagtccgaggctccgatgtgtatggctataaccattgtggtccgctccatatcccttgttctccattgttcctcacaggatcaggggtggagagtgaagagagagcagaacgagtattatttctcgtcgcatcggatcacaatggttaatctaattcctgcaaaaagaaaaagatttactattttttatgctaaattcttctgaaattcatacctctgcattcaaaagagccttcaacggacgaacgtgagttccctcaatcagaatcagcggctgagatctctgccagccgtccactccatgttccaccacctccgccgccgcctcctctgcaccgcggcggcgccgccgatccgcgtggcgctgacggagtcctccggccgaggggtcttcgccacccgccccatctccgccggcgaggtcctccactccgcgcagcccctcgtctcccacccttcccctcccctcatccacgaggtgagttgctccgctttactcgcctctttgccgccggccaccgcggctggaaactctaccttctccttttacggacggagcgaaatggttcggattgggctcctcaggtgtgctacagctgcctcaggaggaagtccgggagcggcggcggctcgagcgggagctgctacttctgcagcgacgcgtgcagggagcacgccaaggtgaggccttaacaccattgatttatgtactagtagtataatgacttgtgatgctacaaaattttcaagattcagtggatgttagtgtactgttcttttgtcatttgctcatttccaagttattacgatgctgtatcaagatccagtaggtgttttgcaacaaaatgtgaatggtagccttccatggtcagagcacatgaatggccaaaggcttgcaatctttcacaataatgttccttgaggaaattacatgtttatttgtcctcccttcgacaagaagatatatctgcagagggcaaccgaggatggtgttgtctaacaaggtgtgtgattttttggccaatttagggattccatggcgttgaaaagaaagcggattggtctttgtttgatgaccactgcaggtatgtctctgtccccttgtgtagatgtgtgcatcctgacctccgcattgcatctatgctcatgctcttgggttttatttttacttgttaatgccatggcgatgctattttgttaagcacgcaattgtcttggtggcttttgacttgaatttatactttgcttttcttcctgaagttcacgcggtctaaagtacccgtacatggcaaagcgactagcttgcatggttatctcaggagctgttagtgcagactgtcttgacatactccagccagcccgtttgcaccaggggacacttacagaggtagctgctttatttcagaactattgttaatttcagaacataatcttttcaactaattcatgtcctgtaatgttatttgtctggtgcttacttgaacaatgtaataatatagatggaggaagagtttgcgttgttggattccacttttaggaaggcagggtttcaggaagaaatcacaacttgtatccttcatttttctcacttgtgttatttatggccaagcagtgttgaacactaatactgataaagatacgtaatagaatggatcgaatgcatatttcaatctcgcccaacttatcttttcttatctatttttctttgacaaattagttttgaccaaagagtggtacatcaatgtgctggcaaggatacgcataaatgcattccgcattgaactggttgcaagttcatatgagaaccttctatcctcagcagtagcctcagtatcttgtgatgcggcagttggcaatgctgtctatatgcttccctctttctataaccatgactgtggtatgtcttttgaccttgcgctgttgaactaaagcaatatttaacttccttttgcctacggaatatttaaacagtgtgtcttgccatgagatacaagaatttgttattgcctttttgttgtgatgcagtaaatggtgactgttatttctaaattcttcattagcatatgtttatatctagtattgactgattggtttaccgaaattattctcgtcgacttaatatcatcgagttttgtggaaccttttggttattaatcactttagataattagaaaacaaaagtcgtttcattccgagtaatttttttttacttggatcaatattatcgcgcttatttttctttgaaatttgagacccaatcactcaccatctcccattattaactttcagatccaaatactcacatagtttggttggccagcgcagacgcgagattaaaggccctccgcaacatcgaagaaggtacgtaaatctgcggtgcgctggcccagttattctatcaccagccattgagcgcagttgaacagaaagacaaacacaccgatggctgccaaaattgttgatactgtggatgttgcatctgctatatactacaggtgaagagctgcgcatctgctacattgacgcgagcatggacgtcgatgcccgtcagaggattctcgccgaaggatttggcttcgaatgccgctgccaacggtgcttgtctggagattaaaacaccatccctttttcgttgtattttccatccttttggcatgcacattgaagccaaccgaggttaattaccattgtaaacttttcaaagatcagttgaagccaggagtcaccaatgtaactgccaggtgctcctgtttggaagatttgtaacgtgttggtgtgtgtgtgtcgacaagagtacgaatactgaatgttgttgattattaccccgatgtttaagcattagacttttggacattattagacatttgtttgacatgttactgccatgccaataacattggtgtttacagaatgtcttgttgtatgctgcaactttaatttatggataagagggtatttgttctattttcttgatgcaatctccctagtgttgcagttcatctgtaccactgtacaacgcgtcatgcatagacatccagtcctatctataacattgaagattactgatgtgcaacatttcatgccaaaataaatagcagatctggcactctagcgcatccacaagaaagcatgatgttgtgtccatatgattgttcatgttattaccacttagcactatctgtcaaattagaacccaaaatactgcccacaatctgttttgtcaggttttgcataagcggaagaaatagcttatatcaaagacactctaaccttatagtatttgcaaccgagagatcagcttgtctgtcattaatgatagaaggtccaagcacatcagttacaaaaccagccaatacataactcaagcagcttataccaaaatggaattttgatatctgtcaacacaatgccacctaaacatggcttgggaagggtgggtaagagactgaatcgtatgcaatgcgttgcatcctggatgacagcaccattctcacaatgatcaatgaggggcataagtttcacattttttttgggcatcggcattctcatgctatcgctggccagtttagttaccaaagggatccaacaaaattttactgaccagcactcactattgcggtcttagagaaacaaaagaaacaaaacaatacaaattacaacagataatttaaaggaaataatcaggtgttctccgtgtcacatctggttcacctctcctaggagctggttcaaactgcaagaataatccaagttgaatcccagggaattatttttacaacttttacagttacagcacagcaaaagagaattgatccaacaacattactaatctgtttttaaatcagttggtatttacaatttaccatacctgtataatgtgtaagctacatgtagttggctaataatatcataagtaaaacaaaacttggcataataggaaaaggggatcagaaagaataaattggtatgcacctgaataaatgtgtgattcctgcagtcatcaacctccaggatggatgccatgttgccacagcgataacaataattaggtgcactgaatatggtcacgaccttttgttcctgtgcgtggtgaagaataaataagacaatgctagttcggtagcaaaatcaacaacaaaattaaatctagaaaaatgagaaaattccctatgtacccacgaaagttcacctaatcccttatatgcccctgaattttgctcattcccttatgtacccctgaattttagtttggatcccttctacgcccggtcaactagcggaaagggcatggaagagatcaaaactaaaattcatgggtatgcaagggaatgagcaaaattcaagggcgtagaagggattaggtgaaatttcaggggtacacaagaaattctctcttaaatctatgctaagcaacttacgtgcgcccagttatatccttccataactaattgatgagcccgggctacaagtttgagattattggtatggttaaactgctccgatatgtcctgaaaaattgaatgtgtacggttgagaacagaacagatagtctattaatagatgaaagaaaattaatggaaaatagagtatttagtacctggccaaaagtgtagccagcaccacgaggagatatgccccaaccgcatcgatcatccgggtcagaccatagaagatcacacattggtccctcatgagggacctcttgaacacgatctaagctgcgaacactatcaagattgtcgattgatggcgataaaccaccatggaggcagaaaatctctgattcaaccttcaaccaagacaataatttaacatcaataaaattttctgaacaaataaaaaatgatttctaaacttctgagcgagaacagaaacatcaactggttattaagaggaaacaccaagttaaaattctacaggccaatcaacaggtaaaaaatgatagatcaaataaagaatttcaactggtcttgcacatatattatcaactccaggaaacaaaaggaacaggaaagaaccaacaattatggctgcataaacacttggttgcctacagttgttacagcaattttggttttcaggaagaggaaaagcttaatcagtaattaaggcagtgacacaagggatgccagcattattgacccccttggagacaaaactcattcaagaaacaatccaaaaattatctacaagcaccagaaactaatcagtccaaagaggacacacgtttagactactgaggccagattttattttagagagtagtggttgccaaaagttgataaagtagcacatgcatagatgataataagtgggtttcatctgagactaacttaatctggtattggcttcagattttcgtatagaacattgagcaatgttcatacagaatgtcaattttaaaagaacaatagaaaaaaaaatcatagaaggaagaggactacaagttgagcacgcaccaatgctgtcaatggaaaatagtcaaaaagatcggtgaagatcttccagacatttgcacttccatacctaatcaaaaagcagaacaagatcaatcaataaaaaaaatcaagcttgtccactttgtattcacaagtcaatactacaaaaatcaacttagatagactagagttttccaaactattaactttggcatagatacagaataagtagactttcaagcacctaaactgactcactttcgtaggcattcgtcgtagaatccatacacctgtgtgatctgcaattattgaagatttcaagacagtttaaacaaagatggaatgaagagcaaacatcatctagatgagtccaaatgaagaaatggtttaagaagaaaggttgcattttagaatgagaaggtttctgttttaaatttatttgagggcgggaaaagaaaacaaacaatagaatcatctcatgggcatgatgaaatctacatacctgccgactctcatggtttccacgaaggattgtaatccgctgtgggtagcgcaccttcagtgcaaccaaaagctgggcaatggtaccacatcatgtcaacaagtaatacaaaagaaattaggcttcaataccattaacttaaacacaaatattgccgatacatctgctaggtttgaaacaaagagctgccaaaccatgatgcacatggtaaaacatggtagggccaaacgtcgtaaacaaacaaaccataagcatgacattgttgaacttcaattaaaatttcagcaaacaaaatcaaaactcaggagacttactgtaacagtctcaacagaatagtagccacgatctacataatctcccataaacaaataatttgtatctggacactggtaaacagtacaaaacaaatgtcagcttttaaagcatgaaacaaagaccaaagagagcagaaagaaacaaaactaatgccaatggattgagtaccttcccaccaatccgaaagagctctactagatcatggaattgcccatggatatcaccacaaattgtgactgggctcttaactggctgtatgtaaagtaaacaaatggttatagtcatatcttatattttcctagaccttataacataaaggcatacctaatatgttgacattgggtaaaatatttgtgccccctcaacatgcatagttacaagtacagaacatcaccatgcttgtcttagtcgcatatacataaaagattgttctttgtggtgcaatcaatgattaattagttgtgctgacaaaaaataaggaataccagacataagtcacccttttggttgtagctatacacatttaaattgctagagatgaaaacaaaatgtgagcggctatgctatgtccagactgaagctataaggttctctgtaattttaataagaaaattatcttattatgtaggtttccattgaagctcgaagaaataaaaaaggtgagcaagtacagaaggaaaacatcgcagttttgggtatatgagcgtgctggctggaggggtgaaacatatccttgttgtaaacaccctagagttgtgatgggcttgaaagtcactcaccctaatttcagatcttcccccacatttttcactagatatcttcccaatacccaccagcatacagaatgtgctgacggtaacaatataatccgcagatggaagataccttcataccaatcccactcagatacttcctccgtttcatattataagactttctagcattgcccacattcatatagatgttaataaatctaggcacacatatatatctagattcattaacatctatatgaatgtgggcaatgctagaaaatcttataacctgaaacggaggtagtaataaataaaaaaaatatcaacttcttgcatgggaaaagcatgataccgcaaaaaaccattatttttcatgtccatatcgagctagatcctctcacaataaaaactgaaatgagcatgccaactacaaacagcacagtcaccatatcgctggtgttactcgggctgattagagccacacacacagtcaccatttttatcagaagcaaccggcaatcaatactttcagcccagcacgcataccatcatcatactgcagggcatggcataatcgcaggagagctccaccgtacctgaacgttgctttcttccatcaatatctccttcgccttctcgcacaacgtcttgacctgaaagcgggccttggttagttagtaccagaggcaaaagactcacggattccagtacatttccattggtcaacccaaggcatgacgcatgtcaccgaatttttttttaaaaaagaaagaaaacagaagcatcgcatatatccaaaaacaaaggaaaaaagcaagcggatttaagcgacacaggcgcatatgtctcccgcccgagagagattcgattcggcatctgatgcaaaagctcacatcgacgtatcccaaatccccccgatccggccattactcctccatttattccttctcctcctccccccgcaataattcctagattccgcctgagatctaccgaacccgaaccgcaaaaccgagataaccctagcagccgcctccgcggagaagctgaaacccatagggcggatccggcaccagagaggaagccgtggcgtggcggcgctcacctcgggctcggagagcgggcggcactccatgagctgctcgatctgggcgtccaggccgccgccgccgccgccgcgcgagcccacggactcctccatccttcctcccacctcctacgccgcagacaagaggggcacctggtctaaccctagccgggggagagctcgtcgccggcgagggggaggcgagctggagagagagagagaggagagagattgagatgcggttggggggcgcgagggggagggagatggtgcaagggcagggcaggcagccaaatgcggggggaagcgatcgagccgggggggtcgggggtggggcccgcgtgtcagtgtcgcggggggggggcagaggaatgcggttggattggaactggagaagtggaagagagagcggaaaaatttttatgtggggcccacttgtcagtcagagggaggaacttttatgtgggacccacttgtcagtcggagggagggaattttgtgtgggccctacttttcagtcggggagagagaggaggagatgagggcgttcaggcgtgggcctggtgtgtgcccggcaatgaatactgcccccagtgcgcactccattttatattacaagttgtttggattttttcttaatcagtttattgagagatatactaataattgtaatataaaataaacatattattaaaatatattcaatgttaaatttaataaaactaaatgttatatatgttgctaatttttttatataaactttgttaaacctaaagaactttaactaagaaaaaaaatcaaacaatttataatatgaaacaaatttagtacttaaaaaaaatgaagattggtggtggtgattttaaccttgacagacaaacttaattctaccctatacgatcgcaagatccaacggccaaatcgttaccttcgcactacttttcataagctcattcagaatgcacctaggtgacatttagtctcatcgaggagatttcactccacgtaggcaactggcgtaagctcccaagaagaacctcatctccctacgagagagaggaagaaggagccagtgaaagtgccacggacaacgagattgtcgccactgagctccatatccatcgttgccgagctccaagtttgtcgccaccgagctccatgtctactaccgccaccttgatatgcacctgctccgaaagggtggctcaatctgccctatccaagcaacgaggagggggacgacggccgtactggagagtggggaggcttccttgcttcggagagcccgaagaggcaataggcggtggcagccggagttggaggcgagttgggggagggagaggcgttgacgagaggaaggaggggtgaggtggcgccggcgaaaggtggaagggagagacgatgctggcaccgccactggtgaggaggcgaggggagagggatcgggtgggaattggctgaggagcgaggagggcatgacgcatgagtggggatagggtgagattttatattatttctagattttagggtgtttagtgcaaaatgttggatcactacataaattaataatagaaggtgctgaaatgcaaaatatatgtggggtgctctaatggacactcggtcaacggggtcaaggcctcagtggatactcggtaattctatttagggcttgtttcgaattaacaaagggaataaacgagtaatttcaatttaggaaaaagtcctataagaccctttaagaataaaggattggatctgtaaaattgctatgaaattccgatggaatggcaatgttttatgcgaattttgtagaattcttagcataagcattgacctcttgaaattttccttttgtgtttatcactcttttccaaatcatatgggttgcatgtgctgcatctaaacagttccttatgtagtttttccagtgtttttcatttcttggattcaaggtgacatgacattttaatcatacatcttttctattcacatgttttaaaaattgtgagttccaaagtcctctaacttaatttctaaagaagtgaacccgcgaattattgaacacgcactacactataacatagatatagaagcactcggtctagcgggataaacaactattagtctgttgggaaagacctttaccgacactaattctgccacgagtgtctaccaggggtttagcagttgacaaaagtttttacatatatttttcaccggtagaagagtgccaacaattcttttgtttttgtgccgacagaccatgtattaatggcaaacaaactattcctagtagattgtctaccagcttagggcatcaacaatgttgttcaaaaccagtccatagtcaataaaataatctattcagctacctaaccacattgtggaagtagtcaataggagggaaatagcaaaagctgcccatagcactatggctaggcaagaagaccataaaaaaacatagttgtacagtggtactgttcataaaatattaaacaaaacaagttgtaaccgttggcttctggccgttggcttcctgaattgtgcctacaaaaactgaaacagcatacatacacccctgaacattgtgcctacaaaaactgaagcaacatacaccatctccattcatcaatttgctagaacacaactagttccaatggatccctcccatagaagcatctcaagtttcacaaatcaagactccccaagccaatactctgagagtagtgaccatatctcacctcctacaccccaatctcagtttctctttgcatcaccaaattatctgcaaaacttcaacccttttggtcctccaataaatcagccaccctttggtcactctcctccaagatttcaaggcgttcaacaccaagggagctggctgccacatactccatcaagctatcaatgatttcatttacaagagagttttggttccttaccaactatgcagtttggagctgcagccaacaggccaccatatgtgctgcaatttagctctgcagttggtgctgcagccaatacttcttcccatggatccgagtctagttctccatgccctgcaagacaaaaagagaaacaacatgtcacaattgaagagtcaagcagcagtagtgaagaagaaccaaagaggctgttggcgatatggcatgaggcccttcgaccaaaatctgccgaaagctatgcgaagagtggggattcaagcccgagacgtcaaagttagtcggggcgaagtccccctatggcgaagactacggaacaaggacggcgagaagcaagggatcacgcgggtactttgccaagccagaggcctcttgggcgaaggatgcagggcgaagagtatatgccgaagggggacggactttgccaaagcaagctcgcccccgcaagggccgaagaagcctttccggtccatcaagcctaggggctattgggccgacgatcgcccgacgacccatcaggggcccatgaacctcaattatactatgtacccatgtaaatgtccctttcataggggtaaccatgtaaattcccctgtataaccaaaaccctagtagtaagaacctgtaatacgggctataaatagtctcatagggccatgtaatagggggatcccaagaaaaattctcaaattaatacgctttacttcttttccaaccactgttgagtaaccacgactttcgacgtatgcggttgtcgtttcgacaacagctggcgccgaccgtggggacctccgagcgaaaccactgagggcgaatgccaccaaagaaggttgtgaaggagaaggttacaaggcgaaaggaaagcgacgccggggcggatatagccgccgaagagggagcagagccttcggcgtccattgccgaagatggaggagcgccatctggttctgcacctgcgccatctctaccgccttcggcccctgccacctctgtgcaggtgccgaacgcggctgacatggcgaaggcggcggcggcggcggcggcaagggcactccagaccagggcggagatcctttcgacaagccaactgctggtgccccaagccgctccgtcgcagccggcagcggccccaactgcgctcactcctgtgcaagcccaagtcaaccctaaccctgaaacacaaaccgaagccgacatggaagccatgcaacaaaacatgacgggactccaagacatgcttcgccaaatgtaagaacaacagtaagcatacgaggcggcaagacagtccaaggtcgcttcggctccaatcctccagtattcagcaggctatatcccacaagtctatccacaagtgccgacccagccccttccgcacaagtcgcgcaagcaccaatgtacttcgccgggcaaccatcgaccgcagcagcgcatccggcctctcacatgcaactgcaagctcaaccggtcgctgcccaagtacaccctcaaccgcctggccaagcaccacaaacaatggcagaaggggcttcggctctgtaggcgcagctccaggctttccttcagcagcttagccaaccccacaacatttcaggtacagccccttcggctcacctggaggggaatacaagtcaaggtgcgcctagttggttgccgtcgaatcggccaggtcaaggggcttcgccgtggagtcaaggaccgcagttcgacttcatcaatgctgctcaggcaccaaccattcggccgcaagcaccaatgtcaggcttcggagcaaaccaggcaccaaaccaggtcgccatgacatggtcacagccaactttcgacccctccatggtggctcagcaagcattaccaatcggagcggggcagccgaatgccatggcccaacctcacgcgcaagccgtgatttagccctttgccacgccgtactcgcagcaaggtgccgtgaacagggcggggggcgaaaaggggctaccgctgagtgggggaatcaagaaccgtccaatcccactccagttcaagttcccacccgtcccacgctactcaagcgaaactgacccaaaggaattcctctccatttatgagtctgcgatcgaagcggctcatggcgacgaaaataccaaggcaaaggtaatacatctcgctctagacggcatcgcccgttcttggtatttcaatctgccagccaatagcatttactcatgggagcaattgcgcgatgtctttgtccttaactttctaggtacctatgaggagccgaagacgcagcagcatctactcggcatttgccagaggccgggggagtcgataagggagtacatgcgtcgcttctcacaagcccagtgccaagttcaagacataaccgaggcgtctgtcataaacgccgcttcggctggtctactcgagggcgaactcacaagaaaaatcgccaacaaggagccacagacacttgagcacctacttcgcatcattgacgggttcgcaaggggcgaggaggattccaagcgatggcaagctatacaagctgagtatgataaggcttccgtcgccgctgctcaagcccaagcacaagttcaagttgccgaaccaccttctctcactgttcgccatccccagccagcgatccaaggacaaccgccaaagcaaggtcaagcccccatgacctggaggaagttcagaaccgactgtgcgggcaagactgtgatggctgtcgaagaagtgcaagccctccacaaggaattcgatgcccagcaagcaagcaaccatcagtagcctgtccgcaagaaggtccgaaaatacctctactgcgccttccacagacgctcttcgcacaccacggagcaatgccaaaacattcggcaacgtggcaacgcgcaagatccaaggccgcagcagggagcagcagtcgaagcacctcgcgaagtagctcaagaataggcaccccctgccgaacagcgccaagatgcacagcgcagagtaatccaagtgattacaagggctgacccgccaatccaactatcgaagtgacaaaagaagatgcagctacgaacgatccacaatatcacttcggcaggcgaaggggctccacagtatctgaaccagcaaatctcttttgggccagaagatgccgaaggagtaatgttcccgcatcaagatcctctggtgatctcagccgagatagctggtttcgaggtccggcgaatcctagtcgatggagggagttcggctgatgtcatttttgcagaagcatatgccaagatggggttgcccaccctagcccttaccccagcgccagcctcgctccgtggtttcggcggaaaagcagttcaagttcttggccaagcacagttgttggtagctttcggcacaggtgaaaacaggcgcgaagaacaagtattgttcgacgttgtcgacatcccttacaactacaacgccatcttcggccgtgcaaccttgaacaagttcgaagctatttcccaccacaattatctcaagctcaagatgcccagcccgacgggagtgatagtggtcaaggggcttcagccttcagccgcttctaaaggcgatcttgccataatcaacagaacagtacataatgttgaggctgaactgcatgaccgggtgaaacacgcgccaaagcctgcccctcacggcaagataatcaagatgcagattgatgacgccgaccccgcaaagctcgtatcgctggggggcgacatggacgaagaagtggcggcaagcatcctagaagtactcaagaaaaacagtgatatctttgcctggggccccgatcaggtgggaggtgtttcgacagatcccatcatgcatcacttggcagttaagccggatgccaagccaaggaaacagaagctgcacaagatgtctgctgatcgccaagaagcagcaaaagccaaagtccaaaaattgctcaaggctagggtcatccaagagatcgaccatcctgagtgactggcgaatccagtgctggtccggaagtcaaacggcaaatggcgcatatgtgttgatttcacagacctaaacaaagcatgtccgaaggacgatttccccttaccacggatcgaccatctcgtggattcaacagctggctgcgagctcatgagcttcctagatgcatattccggctatcaccagatccacatgaacccgaccgacatccccaagacagcctttatcacaccatttggcaccttttgccacctcaggatgcctttcggcctgaggaatgccggagcaaccttcgccaggctggtgtacaaggtcctgtacaagcagttggagcgaaacgtggaggcttatgtcgacgacatcgtcataaaaagccacaaggcttttgaccacgcgtccgacctgcaggagaccttcgacaacttgcgcgcagcgggtatgaaacttaatcctgagaagtgcgttttcggcgttcgcgcaggcaagttgttgggcttccttgtttctgaaagaggcatcgagttgaatccggagaaaatcgatgccattcagcaaatgaagccttcgtcgagcgtacgtgaagtacaaaagctcgcgggccgaattgcggcactcactcgattcctctcaaaggcagccgaaagaggtttgctcttcttcatgaccctccggggcgcgggaaaattcaactagacacccgaatgccaagcagcgttcaacgagctaaagcaatacctgcaaagcccgccagctttgatcagcccagcaccaggaagcgaactgctactatacctagcagcttcgctagtggcagtcagtgctgccctcgtccaagaaacagattcaggccagaagccggtctatttcgtctccgaagcattgcaaggagcgaagacaagatatattgaaatggaaaagctcgcttacgccctagtgatggcttcgcgcaagctcaagcattacttctaggcatacaaagtcatggtgccatcgaaatacccttttggcgaaatactccgaggcaaggaagttactggccagctcagcaagtgggcagcagagctatcccctttcgacttgcattttgtcgcccgcactactgtcaagtctcaagtgctagctgacttcgtagccgaatggacaccagcattcgcccttgagcccgagcctgtcgaacagccctgggtgatgtacgctgacggttcgtggtcgcacaggtgggcaggcattgcggcagtgctcacttcgccgaatggtgtgccgattcagtatgctgcaaggctgcagttcgacacaaccaataacgcagcagaatacgaagccattcttcttggcctaagaaaggcgaaagcattaggggttcggcgcttgctaatccgaaccgactccaagctagtggcagggcatgttgacaaatccttcgaggcaaaagaagaaggaatgaagtggtatttggaggccgttcggtccacggaaaagtgcttcaccggcataacggtcgaacatttacctagaggccagaacgaggaagcagacgccctagcgaaatctgctgcctgtggaggcccacattcgccaggcatcttttttgaaatcctatacgcaccaagtgtgcctgtggaaagcctggaggtcatgacaattgaccaggcgaaactgggcgaagatccatgtgactggcgaacatcgtttgtgaaataccttgaaactggctagcttccggaagatgaagcagaagcaaagcgcttgtaactcagagccacaaggtataagatggtctcaggtcagctatatcgctccggggtacttcaacccttgctccgatgcatctcttccgccgaaggcaaggaaatggcgaaggagttacaccaggggctttgtggtgtgcaccaagccgcaataacagttgcctccaaagtgtttagacaaggagtttattggcccactgtgttgaaaatctgtgttgaacaaatcaagaagtgcgaaagttgccagcgtcatggccgaagccaagccgcgccccagtatgagttgcagcccatcgcaccaatctggcccttcgccagatggggactggacatcattgggccgttcccggtggcgtgaaacgggtacaagttcgcaattgtggccgttgaatacttctctcgatggattgaggccgaacccctcggagcgatcacttcggcagcagtacagaagtttgtatggaaaaacattgtttgccgtttcggagtaccaaaagagtttatcactgacaatggcaagcagttcgactctaacaagttcagagaaatgtgcgaagggcttaacctggaaatcaggttcgcgtcggtcgcgcacccacagtcaaatggggcggccaaacgtacaaatggtaagatcctaaaagcactaaagaaaaggcttgagggggcagcgaagggcaaatggccagaggaaatgttatctgttctttgggcccttcggatgacccccacaagaccaaccaagttcagcccgttcatgcttctttatggcgatgaggcaatgaccccaacagagctaggggctaactcaccaagggtgacgttctctaggggcgaagaggggcgcgaggtgtcgctcgaactcttggagggggtaagagtcgaagcactcgagcacatgcgcaagtatgccacaggcacttcggcaacttacaacaaaaaagttcgaccgacggagctgttgcctggtcatcctgtcttaaggaaaaaggcgaacccgatagccgttggcaagcttgaatcgaagtgggaaggaccatacctcatcaagcacaagtccaggacggggtcctttcgactggcgacacttaaaggcgaagagttcgaccattcatggaacgctgcctctctcaaacgtttttatgtctagaacgggtggcacccaaatcgccaacttgtaaaaatgtatatatcgttatgtaagcccttcggcactatgtaagcttttcggaaagaaaaaaaaagaggaaaatgaaaaaagacaaaaaactggatgtagggctattatccaccacggaggctcgaaccagtataaaatctctgtcctctgccctctttttatttgtttgtgcgattgataatttgcggaaaaaccccaaggcaaacgcctgatcagcgaaaaaggccaggggggcgaaacgaatcggccgaagcatcgctcgccgaacgattgaaaccgcaacagcttgtttcggagaactagtcgaacactgttacactcgatcaaaaggaaagtacgagtgcttcctacaacgtagaacaaagcggatcgaaaatgaaagccgaatgctgaaaactcaaaacctatttcgctaatatatgcaaaggggccgacacgttccgacccaacgaaaagcacgcgaagtgacaatgcaaagatagcgaaaaggaaataaaacgcacctttattgattttaaataaaaatgtatcgaagaatacaaacccatcacaatgatacaagtgaaaggaaaagagcaatggcgttacaacccagcttgcagataaattacatcttcgcccccgcgatcactctctctctctgtaaggaataatcaggcgaactaggttcgtcattactactaatatcatacacaaccctaagaggagaagggggcgaaacacagactagactgtaacgacgctgggagatcgcctcctgccgatcagtcttctgatggtttcgccaaaagcgagccatatcctccaaacgtcttgaatggacaagatcgtagtcttctaaggttcgcctggggtgcgcccgaagccacccgacaaccttaaaaaccttatagctacggccgtttatcaccatttcatgataaacaggccgaaataggcatcgcaccttcggcaaatccttaaatgccacaaatttctcgttttgatttcgccaactctcagaaggaggccggatgcacaactttcgacgaacacactggtagacagtgcaaaaagggcaaaagacgaattgcatagtgagaataggccaaaaaagagaaaatattgcataatgcgaaatgggtataatcataaatacgccaaagacttcgaccacaaaaaaagtggctaagagaatcatatattcaaaatatccaaggggccatttttcggctacaataaggagggttagcggcatcctgccgaatatacatcgttcgccattcccgacaaacacaaaaagaagaagggaaactacaaaaatctaaggaaggggcggagggcctcacacctctgggtgatcctgggcatcgcctccacccccttcggctgtcgcatcctcttcttcgcaccggtttgccgcctttgccttcgcgagttgctccaaaaggcgcgtcttggcggtggaccggccgtctttctgccagaactgttttcgccatgcacgaagcgcgggcgaaatgttctgcgcactgatctcccagtcccccttcgcatagttagggaactcggcgacgtgctcgcagccgaactgttgcagaaggcccatagtaaaggccaccgatacgcgcgcacagcaatcgccgtacgcagtggtgaagtccgaaaccgaaccaccggcctgctgagtccactcggagaagtcgaaggccgaggcatcttcggcagggacccctcgcacctttgcacccatgtcagtaagggcgaggcgaagcgtttggcacgtcgttctcgcggattcggtagttttcgccatctcccgcgaaaactgctgtgactccgccgcagcgttcgcgtcggccttgctgacctccaggcgaagagcctccatctttggctcagtaagattataataatccgtcagcacggcggaatgggctttttctttcttcaatttggcctggaggcgatcaacctcagctatggcctctcttcctttctccagttcggccttgaggcgatcgacctcggccctagcttcctttcctttctctaactcggattggagccgcttgttttcggctttcgcctctttcagggtgttggcgagggcctccacctgcaagttcttgcggcctatttcgtcatccttggcccgaagacggttcttgaatccgtcaagacgggcccgcacggttcactctgtcgaatagtgagctacaagaatctggatgcaaggtaggaatgggcaaagagaacaaatgttaattatgtgacatgtaaaaaagaagaggaaaatcaggaagagagaaaaaacatacccgaactgccaagcttttaatagcagaacacccctcatcgaactcattcaattcggtgaataagctcagggtgctggcaggtaagacaagattgcttactccctccacaaagggaataaggtctgcccgggtctcgaaatcgccaggggcgaaatggggcgccgcaagggaatactccgaggcagatgtttcgacggccgaacccttccccttcgctttgactagtggtgaaacaaccggttgacgcagagggctaccgaagatcctcgccgcagctgccacgattcgttccgcggaggctgaagccccggcggcggcgctaccgcctgccccaccagcgccgatggaaagaatgggggcggtcgaaaggtccaggctgcggccagtgggcgaagtcggagtctcttcaaaagactcgtcgtcgctgaagacgcgagcgacatcgacgagtcctttctttttggagatctttttgaccggacctcccttcgccgcccggcctgccgaaaacgcaattagcgccttcgccccatccaaatcctttcggcgaaggggggagctgttcgactccaccccggtctcgttgtgacctggacttggagtaggagtgtagccaggggtgtcgacgcggttttcgactgccccgtccgcggccttttcggccacgacctccgcctcctcatcttcctctccttcctcctcgtcgtcacgctcttcgacgtcctcctcatcatcggcgtcggaatcggacgaagcaggaacccttcgcttcctaggggcaagcttcacttgcccacgcgttcgctttcgcgaaggtcctacatcgtcgtccgccttgtgggggttcacccgtggaggcaattcgccgttgtaaacccggttcgcctggccagctgcttgtcgcgtcagcagctggctatactcgacgactgacacgtcgccgatcatcctacgggcttcggcgtcagcctggtcgagggtcaacactacaaaaataataggtgtagccacatcaagcgtcgaacaaagcaaaataacaaaagcaggagtgcgtagcgaaagagcactcttaccgttcgttccctcggggagaaccaacttcggcaaaccatcaacctcttcgccttgatctactgcgacttgccatgattgagagaggggaaagatgcgaagcatgcagaattcctccaccaagtcgcggcaactaaggcggaagcaaaccttacgcagcagagcgaatcacgcctccatagcgccgtccacagcgatcttgggttttcggttcggcgcaatcgccctacgccggcaccggagggccttcgctgagtcagaaccagcctcgaaggggatggtgtggtaaaaccacctcgccatccaatggcggtcccacttcgacatggcggcattcactggccagagatcggaccgctcggggcgaacattaaagtttacgctcccgaacactgatttcttcgtcccagccggggtaatcaccgtcttcgaattcacggtggcgaaaaatatggcgccaaaaagttcggcgctaggctcaaaactggaagtccggcacgcccagtcgaagatagcgatccggaccagcgtcgatgggcttaactgtgggagctctacctggaaaaggcgaagaatctccggcaacaacgtgttgcacggaaaccggagccccgcctcgaaaaacacggcgaacaccaccgtccagttgtcgacgggcttcggtacaacggctttccccggggcgaaagcctgtccctcgactaacgccccagagctgaccaacttcgccagctcactgtcatctatgagagaaatccctaagtaggcggtggtgtcgtcgtcaatccggccggggtcaagccctttcgccgaagaggggttaggcttgcggggagccatgacgaaggatgtatgcagtgacgaagggtgtgtgcagtggtgaacaaaggaaacgaacgaaaggtctaaagggccaaagggtgccgtgagagcaagaacggaggaagagagcgcgagcggtgaaagtgacaagtctggtggtgaaaagaggacgggggagaatatatagcccacccaagcaacggttcacctacccaccagtaataaagcaccacgtgtcgcgagggtaggcgaaacggtaaattcctatcgaccgagctacatagtaaaaagcccacaaagagaaggcccattactgttcctttcggcccgggaaagataaaaataatatacaaccgcctgcaggaggcgaagagcggcaaaacaataccagccgcaaagacaataaactttatttgtaggaacaatgaaggttttggaaggagcatcggtcgaaagggggcgccacataccataccacatggtttgcacggtctcggccgaagctccaatctcacccttgcccgtgaggggcttgttggcggtatggcatgaggccgttcgaccaaaatctgccgaaagctatgcgaagagtggggattcaagcccgagacgtcaaagttagtcggggcgaagtccccacatggtgaagactacggaacaaggacgacgagaggcaagggatcacgcgggtactctgccaagctagaggcctcttgggcgaaggatgcagggcgaagagtatatgctgaagggggacgacttcgccaaagcaaagctcgggccgaagaagcctttccggcccatcaagcctaggggctgttgggccgacgatcgcctgacgacccatcaagggcccttgaacctcattacactatgtactcatgtaaatgtccctttcataggggtaaccatgtaaatttccctgtataaccaaaaccctagtagtaagaacctgtaataggggctataaatagtctcatagggccatgtaataaggggatcccaagaaaaattctctaattaatacactttacttcttttccaaccattgttgagtaaccacgtctttcgacgtatgcggttgtcgtttcgacaacagaggcgtacacgcataaattggactgaagaagagaatctacaccttcttagctattggatacattactcaactgatcctgtaaaaggcatcgacaggaaatcagaattttactggaaagctgtagctgatgtgttcaacaccagcgcgccaacaaatggacacaagaggtcagtcaagcaactgaagacacattggggtgatgtgaagagagatataacaaagttctgtggagtatatggtagacttaaagctacctggaagagtgggcaatctgatgacatggtcatgaactcagcccatgcgatattcgaaaaagaaaacaaggacaaacctttcaccttggagtacatgtggagagaggtcaaggatttgcctaaatggtgtagaatagtccaagaggatagtggaaataagaggaccaaggtttcatcatcagaagcatacacttcttcatctaaccaagacacaggaggaaaccattagcaaagagaagcgccctgatggacagaagaaagcaaaggccgggctaaaaggaaaaggaaaagatgctgcaccatctcctttgggcaaccaaccaagtcagaatatgattctatatcatgaagctatgtcacttaaagcaacagcaatgataaaatcagcaaaagagaagaagtaccagacttacttaaaactgttggagaaagatacttcaaacttcagtgaagcacaccacaagaggcatgaaggagtcctggaccaattagcaaaagaacttgctggggagtaaataatcagcaagtgatgcttgtactaccattacctattgtgcttgtcatatttagaggtgttgaaagtgtaattttcatatttagaagtgttgtaagtctatttgtaacccttaagttagctattgtaacaggtcgatgctctatattgtatggccatgttgttagtgtatgtgtaagccaaattaatcatattgaacagtagagaaatcacctttgtttatccttagttttgatccatgtcaaggtccatgacagttgtggaacagggcataaagcaaaataatatcagttgtaaaataatatcagtacattataactgttgtggaacagggcataaagcaaaatatagctgttgagaaaaagacaaacaaagtacagttgttgagaaaaagacaaacaaaatatagctgttgagaaaggtggcaaacaaaatatagctgttgagataaagcaatagatagctattggtatttagcagctataaatatgagatgcagtctaggacaccactccctcattcatacaacacacactccctcattccaaaaaagaagatgtccagtgactctcaagatcaatctagtcattcagatgagtctacagaggctcagcttgaagctgagcttgaggtagagcttgaagctgagctgggggctgaattggaagcagaatcagctggtacctctattcggcgtgggggctacacacggaggtacatcaatagagatcatcaagatgatcacaacagattgtttgctaaatactattctgccaatcccttgtacaccgataatcaattccgtaggagatttcgcatgagaaagcatctatttttgcacatagttgaagctctaggtgtctggtctccatatttttgtctacggcgagatgcatttggaaaggtgggtctatcaccactgcaaaaatgtacagctgccatcagaatgttagcatatggttcaccagctgatcttatggatgaaacatttggggtcgctgaaagcacaacactagagtgtttgatttattttgctaagggtgtaagagttatatttggctaacaatatctacgaaagcctactaatgaagatattcaacgtttacttcaagtagcacatgggcatggattccctgggatgttgggttgtcttgactgcatgcattgggagtggtagaattgctcagtagcatggaagaggcaatttacacgtggtgattataaggtacatactataatgctagaagcggtagcatcttatgacatatgg

SEQ ID NO: 4772 - DNA, 24028 bp, Oryza sativa
tttttgttcgcatatattttctgaaggaaaaagtctagttctgttcgctcgactcctcacgtggtttgatttttgtccgtcaacttcaatcccatgccataactatcatagctacctaaataatgaccctaggccagttttgcaatcagtatttagtgaggtggactgccatatcatccttcttttgccatgcctaccacatcatctccctaaccctaatttcctaaaaatgattagaaaaaaaaggtgaaaatgatatttataaatggataatctagtgggtcccactattttttttaattcttttgttcacttattcgccatgtaggctgtctaataggatgctacttacctctacttaagtcttatactagtcactgcaaaactttaaatatattcgttgttagtagtcgaaatacaatattcgtagttattagtagttgaaaacttgaaatagaatacttaattcttatactactcaccgcaaaactttaaatatattcattgttagtagtcgaaatggaatattcgttgttagtagttgaaatagaatatttaattcttatactactcaccgcaaaactttaaatatattgattttcctataaaaaatggtttcttgcatcccctatacaacaaagaataacagatgcacggttgatatacctacaattgctttcagtgaattaatttaaatatctagttatctgtacaaacttaccgtctgtttttttttgtcaacagtggtgtgtttattaatgagaaatatttctatcttggcttgcgtggaaaagtggaggaccagtttaatcctaagaacaaatttgtggtacatactatttctgatatatatactatagcttgtttgctgcatgtggccttatatcctatttctgttgcaggtcaccattttaaccatgtttactctaataactctatattcaacaatcatccctatttctctttacgtgtccattgaggtattttgtccaacttctcatttaatgcaacctacatttggacttttggagctcatgctagctttggatgcagatgatcaaattcattcagtgcacacagttcattaacaatgatctgcatatgtaccatgctgagagcaacaccccagctttggcccgaacttctaatctgaacgaggaacttgggcaggtaacttgtaacattattatctgttggtttgaagagaacccaggtttttggtcactggaatgctactgtcttatactacacaaattgatctggctaatggaatggcacaacctcattgtagtaaatcactccgaaaattgggattgcttggggaatgtggttatttgacaatattgagtgagctgatcccacttaataaacatgtagaattgcttcatctattcaacatagatgcatccagtctagcatggttatgggagaccacttgaataaaactgctcataaatgcatatagtactggactaattctcatgggggcattctgatatatttcaacaattaaagataaatcaaacatttctgagttctgaaatatttcctcttaccctgaatttctgtcattaacacaatggctcaggttgaatatatattttctgacaaaactggaacacttacaagaaacttgatggaattctttaaatgttcgattgctggagagatatatggaactggcatcacagagatcgaaaaaggtggagctgagcgagctggaatcaagattgacggtgatgaggtattcaacatttttcttgtcctttaatagattatttgtgttactattcttattttcgctttattcacctcatcagggtaaaagatcaggtgctgcagtacacgagaaaggattcaactttgatgatgccagaatcatgtgtggtgcatggagaaatgaacctaatcctgaagcttgtaaggtagttattatagactagttcagctcttgccttgctccagtgtcattaccccccacccacccctcagttatctttgttacccttttcacagttttgtaatgtgctagacagccaatatctgtatgctcctgtttatctctaggaattcttcagatgccttgcactctgccatacggttcttcctgagggtgaggagacaccagaaaagatcagttatcaagctgcttctcctgatgaggctgcacttgtggctgcttcaaagaactttggcttcttcttttataggtatttccgaactttaacttattttcagtaactcttgcacagttttattcttttatgtatttatccaatcagaatgtctcgaatacattagttatggtgacatttttgtgcttcttttatagacgtacaccaactacagtcattgttcgtgaatcacatgttgagaggatggggagcatacaagacgttgcatatgaaattctgaatgttctagaattcaacaggtgtggtttgtttgtttccattttaaattctgtgagatgaaattatagttctgtccttgacactactcaactaacagtacaagaaagcgtcaatcagtggtctgccgtttcccaaatggaaggcttgttctctattgcaaggtaatacgcggagaggggttggttcaacttcattctgtacatggttaacttgtttcactaacctgcatttttttttctaatagggcgctgacaatgtcgtttatgaaagattagctgatggcaataatgacattaaaaagatcagcagagaacatctagaacaatttggctctgctggcttgcgcacactttgcctcgcttatcgagatctcagcagggagcaatatgaaagctggaatgagaagtttattcaagctaaatcttctttacgtgatcgtgataagaagcttgatgaggcatgcatcttttggttattttatttgtatactgtggaaatgcccttttttattttctgagctcgtataatttgccacaatctggcctgttatcgttgcagtatgttttttcttatcaacactgtagaattactaataaactattgaggcctatccttttccttttaaattgcaaagtagcatgagccacaacctataatgtcaagtgtccgtctgcaatttagcaagttcttttcccttctttaatctaatttgttaacacttgctgctttgaacaagataatactactacttccaatatcttagctttgtttctttttatctaagagaactagaattttgaagttgtttattcttctattcctgggcaatattgtgatgcacttttttttttcatccctgtaggtggctgagttgattgaaaaagaccttgtattggtagggtgtactgctattgaggacaaactgcaagaaggggttcctgcctgcattcaaactctttctgcagctggcataaaaatttgggttttaacaggagataagatggaaacagcaattaatatagcatatggtgatatttttattcttaattatattgctcatgtcgtttcttcgattttttttcttgagattcttttcatattttcctgtctcatcttatatctaaatatatagaggatttgagttgattctctgctctgcagcctgcagcctggtgaacaatgatatgaaacaattcatcatcagctcggagacagatgtaattagagaggctgaagacagggtaagatgaacatatatcattgcactgtgaaattgcaagggcatgaaacattgtttttgagttggtttattttatctttattatgcttaagcgaccataagtggagactttaatggttgggtccagcctgaataactacatgatttttgatatgtcactggttatgagattgatatgtggtctcatgggtctaggacccacacgtgtgaggcatcagtttcatagaacatccaaagttatctatcggtacttaaggctttgtcttccaaagtacttaagaagtaggttatacaagttcacttgatgcctgggtttggtatatacgacattaggactttctttgggggagatatagcattgacccccttcctatatttcagaataaagagaatgatgtgatattctttaatagagttctgtggatcgcgttgctttagtgctttaatgtctccattgtattaacgtatgtcttgtgtacatctgtttttttttataattttgtttttacttggataaaaaaataattagctacattgcagcatctgattttgtattctaacttttgattctttttgctgaacctaactgtgccatttataataccggtcattttcagggagacccagtggaaattgcacgtgttataaaagaatcagtaaaacagagccttaaaagttaccatgaggaagcccgcggttctctaattagcacaccgggacaaaaattggcgctcattattgatgggagatgcttgatgtatgctctagacccaactctgcgtgtagatcttcttggtttgagtttaatttgccactcagttgtatgttgccgggtttctccattgcagaaagcacaggtaaatatcgtttcttgctgttattgttgttaattatgaatgccttccttcttcccagggaacagaacatgtcattttttatgttccgggttatctgtagttcttacctagatgctttccagagtgcttaagcaataaactgaagatatcggtataaggaaataatcattttttttctgacaaagtgtacttgaaaagatttgttatgttgttaatcatagtgcataagatgcttttattagtgccaactcaaatctcattcttatgtcctatttttagttgcacacattttatttcgttattaaccatcagcagtcttatctggtttgttatatttatttcttgcataacttatttggttagtacaatgctgaactgtaaacagctgacacttgctcatgttgtgtaggttgctagcttagttaagaaaggtgcccataagataactctcagtattggtgatggtgctaatgatgtgagtatgattcaagctgctcatgtggggattggcatcagtggacaagaaggaatgcaagctgttatggctagcgattttgccattgctcagtttcgatatcttaccgacttgctccttgtacatggaagatggtcatatttgagattgtgcaaggtatagtttagttctttgcagtgtagatttgtgtatagttcaagaaactgatgactgatgctttctgttgcaggttatcacatattttttctacaagaatctgacatttacgctaactcagttctggttcactttccaaactggtttttccggtcagcgattttatgatgactggttccagtccctttataatgtcattttcacggccctacctgtaattatggttggattgtttgataaggtatgtaacttgtattcatttctacttatggagtatactattctctgtgcattacacttaactgatccctttcaggatgtgagtgcgtctctgtcaaaaaaatatccgaagctttaccaggaaggaatcaggaatacattcttcaagtggagggtgatagcagtgtgggctttctttgccttctatcagtcgatagtgttctattacttcactgcagctgcaagtcggtatggtcatggttcatccggcaagattcttggtctttgggatgttagtacaatggctttcacctgtgttgtggtgactgtgaatctccgacttctaatgtcatgcaactctataacaagatggcactatatcagtgtagctggcagtataacagcctggtttatgttcatcttcatctactctgcaataatgacatcattcgacagacaggtgggatagttcatagattactgaaaaatccagtgctctggtatgactattttattcctataactgcattaacttcgtgctgttttctttctgcaggaaaatgtatattttgtgatttatgttttgatgagcacgtttttcttctacctcacactattgcttgttccaatcatcgctctctttggcgacttcttatatttatcgtaagataccctatctttgttatcacgttgccccttttgtttctcaatacttttctagctgtgagcctgtgactgacttattactagctcttccttgattcctccaattaaattgtgttggtttgagccttttgattttaaagcattccatggtataaacaaaacaactgaatataaaccatcctgatgtgcattatttgtctcagaattcaaaggtggttcttcccctatgactaccaagtaatccaggagatgcacagggatgaaccccacgagtacagcaggatacaacttccagagacaagccatctaagcccagaagaagcaaggagctatgcgatctccatgcttccccgagagagctcgaagcacaccgggttcgccttcgactccccgggatacgagtcgttctttgcatcgcagcaaggtgtcggtgtgccgcacaagccgtgggacgtagcgcggagagctagcatgaagcagcggcagaaaacgggaggatcataaccctagtagcgcccctaccttcctggccccccccattttgtgtaaagtttttgtacatcacatgcttttgctggcagaccacaggagagtgtgtataagcttgtagctttgtagccatttttcgtgttttgtcaccgatatgttgtgttggcgatgttagcagaggccattgatccagttggctgcagaattacttaggacacgccctttagttaaaaacaaagttggaaactgggaatgcagttagtagtgaaattctttctgacgctattgcaatgtttagtccttttctgcttacctctattgtggtatttctactatatttgataattggtgccgatgccattttgctacttctatgatttttgataattggcgttgtcgttgcgataaatcataaggctcattcggtttatatataggattttcaaaggattactttaggaattaaataaaacattgatttttttaaacccaaattccttagaattgtactcttgcaatcttatgccataggattaggattcttagcatgaggtaagagctcttggaaaaacttcttaggattagagtgtatgtgacatcctaatcctatatttttctattcccatgatttgaaaatccttttcaccgaataagccctaaataatttatactccctttgttcccttttactaataattaatattgttggctaatgtgattttagattttatcattgatgagcaaatcttttaaattaggggaaattttacaaaattacatgtacttggcgagccataggatttgttaagaactgtaacacaaaactacagagttaacatcgtattttgcacaagactacatattgaagtgtcgtatcagaaaaactacagatttaacattagttttatcataaaaatacaacttttgtaacctcaatattctatggatataaactttaaagtttgtagttatgtgataacttcatcactaaatatatagttttgtgatacgatgctttaaatctatagttctgtaaaaaatttaatgctaaatctatagttttataatacatgcctttaaatacgtagttttgtgataacttgatcggaagtatatgtagttttgtgaaatttactttttaaatcacaatgttttgatgaatacatgtactagtacagttatatttggcgtggtcgtagaagcttttgcttggagcaatagaaatagaatgaaatatatcaatggaatgagtacggttctctcttactccgtttatttcatgtacatttaactctatgagcaaacacacgtattacacctctatgagcatccaccaaaaatacacatgcacaccttacacccctgtgagtttctatattatataccggcatatctgttacacggttcctttttctctttccgttatctgaatgaagagagagagagagagactatttttttcttacaaaaactacctattcgatctattcgatcctatgcttcacttttctgcaggtgggagaaaaaaatcaaaccaatcgttgatcaaaatttagggtttaaaacttacaccatccgttcaatagaaaactcaatcctaaatttagggtttaaaacttacaccatccgttcaatagaaaactcaatcctaactacgaatctggacatatacgtatagaggttagtagttaggattagactttttataagatatagtaattaggattagactttttataggatccaatactagcgacggatttggacacattcatattaagatttatggttaggattgaagggagtagacattcataatccaagaaattggtttgatttttaatctattgatcaaaatttagggtttgaaacttacctcctctgtcccaataaaaaaaagtcaacaatgcttgttcaggttcgtagctagtatttacttcttctacatgacccaatcaactttttcataactcaagaagtaattgtaccaatttttgagaaatccaattcagttaagacaagagaaattaaagagggcaacttttcagccttatgagttgccattctacaggtgattcggatattgcataagctaggtttgattccgacccgggagattcggcaaatgtaggagcctggtttgccttcatcaatcctgaatattgacaatattctacaacgcaatgtatcgaattatcctagcctggcaaactcaattatcacaagttctaacactagcacttgaacataagttgtacaaaacactcgcactgaatagtggaggaagaattacgagtacttcataagatcgtcctgtgtctatcaaatgtagaatagttataaagatcaaacacgcccagatcaaagaattaaactcataaacgtacaaatacaatgtgaagcaacattaccgaagcacaacgattcccactacaaatagaagatcaaggaaattgttaactacctatgataattctaaaacaaattgtgaactacgggtgcgtttggatccaaggctagcaggggcctagcctggcctggcaaggacagtcgtttggaatcagaaaaaaatcctagcccatgggggcgagctagcccataagagtgagaaaatgatagctccaactcctgtttagggcctgtttgggtagagccccaactcctaaatttagctccaggagttgggtctggaatggagttgtggagttgcctaaacccagctctacctctctagttcattttgtgagagagctctacccagctctgctcccattttaggtgaagctaaaactgttaggctgagctccagttccagaagaggtggatctggagctgtgccaaacaagccctaattgtccaactcatggatcatgaccctaagcatcccaaacaaatactcactctgttccaaaatataagaacataggaccggatgtgacatttcctaattctatgaatctggacagccattccaaaatataagaacctacgaccggatgtgatatttcctagtactacgaatctgtacagcactaggaaatgtcacactcggtcctagggttttatattttgggacgaagtgagtagttctaattgctaacccataacaaagataaacacagatggcaagaacaaccatcatggtgctcgattcgcgttgctcccttgacacgctcacacggacatctcgctgtcgataggtatactgcatatcactgaaagaataattaactataaatgtgaacacccgtatcaaatctagaacttaaacctagatgaatttgttccaccatataaaatctaaccagttgaactacgctcatttcgcttcagctttaacattctagttctagaaagaaacataatcagttctttcttattaacttcggtattcagtactaagtttacgaggaaccgagaaactcctagggattttccagctagcttcacaatgtggtggactagatgacctgggtttaaagccccactctttctaattatttgatattacgtcattccctaatattcgtgtcgaagtttacgaggaagcaccatcaatgtgcggtgtggagcagtagatacacggcttcatcactagttttcaaattatgatatccacgagtataattcgtgcatctttaattagtttaaaattatttatactatcataaatactaagttactccttgtatttcttttttggtatcccatattttcatttttactccttccgtttaaaataaattcatttttttcctcccatttatctcaaattaaattcaattttcaataattatatatctgagtttatgaaaataggagtaaatgtattagcaatatataaactgaggaataactatattggtattggataaagtggatgtattctatttttctattttttattaatatgtgtggaataggtaaaaaaataaacttatttaagacagaaagtagttgctatagttgttgtagggtatgttttgcatggttgcagctcgagcccagtcaaacaattttagctccacctaaaattgaagcagtggagtgctatccatttgtttttcgttaataaaatcagccggcgatcttccttcggaaaaaatgggttcacccagcaacaatcgagaaaatgttcacaacacaaattagagactaattacaacgatattatgaatgcagattgtgatccaaatacaatacaagttacagattatatactctcttttggcaaaagaatcggttgaatcctgccggaccgccggaacaggaccgagctggacggatgcttgtgcgttaaacggtgtttttctaaaattccgtataaccatatgagacgatttgacatctcaaatggttcattccatactgacactatagtatgtataaatatgtaccagcttttctatttcttactagccgtacattaaacatacatacactgagtctcagcgattggcttaatttttaatttttagctaggctggacctaaggtcctgtgtatatacagctttttatttttacagtttactccttctatattaaataaaattaacggctcgctgattcattaaaaaaaacatacatacaccactgtatatatataataccatacacatacacctgctccttacacacgctaaaaaaaattggaaaccaacacattcttaatttcattaaatttagtatcatgttagtttgtataactaccggataacctaaactaccatatgatatataactttgtactattactcagctcgtaccagattattaggtagccatgacttccgtgtgtatttattctaaggaatcatataccaaaccaaatacgacctccaatcattaacatatatatataaccatccgtttttaatagatgatgccgttgacttttaaacacatgtttgacaatttgttttattcttaaaatactttaaattataaaataacttataagaaaataaattataattataaaaaagtttttaaatatgatgaattgtcaaacatgtgaaaagagatcaacgacataatcaaacagaagtaataatactactggtaatacttagtacgtcctaaattatagggcgccctatttttaagaaaaatcaaactcgatattttttgactaataatcatactaactatatatatatactaagtgttatgcatgttatatcattatatttatattttaaagtattttcatgtgatgctaatttcatatttgttaggattatagaataaaataaaatagtggtcgttattgaagaccgtgtaaaaaaatacaggtcttataattagagttagggaagtaacatttaacatatttaagataagctaagtaaatactagtgctatcttcctcagttatttttctccaaacaacattctagtgacgagacagattattccggtgggccccactcctgactttctgtactcctacgtggcaacttcagcctcgttctaccactacaacttcaagtagtttttgttctttgtttgagccttcgctgccgcagcaattaaaaccccgtcacccagagacaccgtacttcacgccgagaagctagcgacggtattttcttaatttgctatgctctctccgtcttcaaataatataataacgctactactccctccgtatttgaatgtatgacgccgttgatttttcaaccaatatttgaccattcgttttattcaaaatttttgtgcaaatataaaaatatttatgtcatgcttaaagaacatttgataacgaatcaagtcataataaaataaataataattacataactttttaaataagacgaatggtcaaatgttagacaaaaagttaatggcgtcatacattgaaatatggaggtagtagtttttaaacatatctattgcatttttataattatcttgtttcaaaatttgacgtaaatattatttacttttgtcacgacttgattgttttatcacttgaaaaatgacttattatctacactaaatttttaataggacacaagttatcaaacatatatgcataaatataatgtctgtaataagttaagtaaatcgcgctaggctatgtatgttttgctcaatgtatcctaaaactactaattttcgatatatttacatcttttatcaaaaactacagctttctaacattgaaaaaaatatgattcactgtctccctttcattaaaatgggatgaatattttcttgaagcttttaatgtagttgtttgataaccgcatgactaattttgtggtatatacttttatgataaatttgatattaattgtgtagtttcatgacacaatcttaaattcgtagctagattagtgtatgggtacttttgtcacaatatactctaaggcatgatcctagagtatgattaattaagctttagctaaaataaacttaaaaaatagattaatatgatatttataaacaactttcttttttttttgaaaaaacacatcatttagcattttggaaagtgtaccatgaaaaatagagagtagaagttgggaagaggtgacaaagaacacaccctaataagtttatagaaaatgtaaaatcaaataagtgcattttaaaatataccgagtattctatgataaatttaataaaattaatttcatgctatagatgctgttatgtctttatataaattaattatggacaggcttctgttcggcatgagtggacaattatggaccgagtattctaaaataatttcatgctatagatgcttgttctccgctcatatgtacgttttttgaagtgctaaacaataaaaaaaaactctaaaagaaagttgcttaaaaattcatattaatctattttctaaaatttaaaaaaatagtacttaattaatcatgttgtaatgactcaccttattttagtatcttttcatatcttttaagatctttttattttccccttctctcaaacataccataatattatacgattccccatggcgcccctggcttatcaaataaatcatggatttcgtctaaggaaaaaaaatgcagaagatcaagaaaaatagagaacaaaagtgttatatgataattctagaagcatgtagtaccttaacagttttttaaataaaaagtagtaacttaacgatacaacatctagaacagttcgattagatgtgatcaaaaggatgtactcccacatatgctgatccacttaaaatttgcatatagaggtatttacttatagaccctaagctgtttttatttggaagagtgatccaactgtagaaaccacttaggatttgttgccactttataacatatatattgttgagaattatacatttccatattattttttcaaataggaatatcacaaatattccatttcatatatcttttagaattaatcaataaaaataaaactattttttagataaccccgtacatttgatctccctagctcttaagtatatgaatttcacgtacattggtctatccatgtgaccaattgacttatcttacactactccctctaacttgactttctaacttgactttgtggaatatgtctaactatccatgtgggtactatcaatatgtgttctcgaggtgaatttttttcattctaatattttcttttttattggtctctttgcttccgtttgtacagagtcttcgaatctccaaaaataaaaaataaaaatgatcatatgtatctcgactaggaccaacaataccaccacaggctttattaatcggcgtgtcaactggcacgcctattttctagttgaacttattatcggatggagcaaatttcatagtattacgaatctagctatgccgatcatatgttcttataatttaggacaggtagtatatcatatagcgtgtgagtaattgtgtgttggggcacagcacctaaattatgagaacgtagtcctggataggacatatcctaatacttcaaatatctccgtccaaattaacagtactacatcacacataacataggttcttatattttgatacgcgagagagtagataattgacagtaggttcctgagctagccgatcgatggctttatatataccaagcgccggccgtcagcgaactcgcgccggttagttcgtcgatgtttctttctgcgtgcgagctaccatctgactacctcctcctgcagctctcttgcctttcttttttcattttcttttttgttgttcatcggatcatcctgtgagtcctctctctctctctttctttgcatgcacgattagttcttaggagcagggaacacattgctacctccggtctaaatgacgttttagacaatggatgaatcaattccttgggattacgacggtatcaaatgtgcatcgtgcatgcaaggtgtttgtggaaaagccgacttgatctgcttctcttgcagggctcactgtcagttccccgtttgcattgtgaaagcagttctttattattattattattattttccgaagcaaacctccgaaagggtagtggtagtgagttcttgtttttcattgagaagagagaaaccgagcataaataccttacagttacacggctaattgaaggaaaaccggccgaacccacacaggatacccaagcaacttgtgtttaatttggtgtatggggttttgaggatttttcttgttatctctaagggttccttttatgtaatcaggaatggaaggatcaactagtaaacatgattccctggtgcaaaaacatgtggattttggtatactggagaacaacatacaagatccaactgcgacgccaatgtatctgccaatggaattcttgaaaaccattacatgtgacttctcaaaggaacaagagcttggcaggggtgggtatggagtggtttacaaggtatgctccccttttttcccctctggttatcaagggtgcgtttggatccaaggctagcaggggcctagcctggcctggcaaggacagtcgtttggaatcagaaaaaaatcctagcccatgggggcgagctagcccataggagcgagaaaaggatagctcacaagggagagccgaatcggctcgcctccgacggcaagctcctcgcgtgaaaaaagttgttgataaggatgaagcgatttttctcaaaagttgttaccttcttcaacaaccagccccccaatttcgtcctactcctccactcttcgccaaagaatcgggcttgcagatctcgtcgctctcttcccccactcttggctgaactatagggctcacagatccggtcaatttgcaatcaccctcctccccttgccgaactttcaagcatcctcgattcatctgcagtaatcccgtgcccatatataaatgcagtagagcctccggcctccacgcagtaaatcggagagcaaggccaactcgatttgaggagagcatgttcttgcagaagattgctactggacacaagattgctcgtggtgagaactgagaagctcccagatttgatttcttccgccgatggcgcctcgtctatctagatttgcaggtacgaggactttttttctttatattaaagctctccatcttcctgccatggatggatgtatacgagctgtctatgttgcttcatgtactatttccacatccagtaatcttgctttgggcctttggtgctggattctgattttgcattaatggggattgtcgatggtatgggcagtagtagctaggaactttctggccgtcggcaccaagcatgatggaagacaacttgtatttaaagaagtccatcatgaggaatgtgcaaagcaaattaatggcaagtatcacacaaacttcacaagtcgacaagtttatcacaagttgaaggctcagtggaaggtgattatggaggcaaagaatttgagcggggccaactttgatgatgttgagaaaaaaaatcctatatgatgagattgaagttgttcgaatgactaatgtgagtgttctaactattctttccttgcaaataactatcgtgtttacatataatatggatgtctatttttctgacatttttcttgtcatgtgtaggccaaagataaaagggctaaattcattaacgtccccatacgttggtatgatgaaatggagtttatttttcaagacaagcatgcaacaggggaatttaatgttctgcaaacaccatatgaccatccaatgactgaagatgatgattttattggtgataaaaatggcagtcctggtgatgttgacccttcatcaaattatgactcagattgtcttccagatcaagagaacaatactggaagtagctcatcttctaggcgtgcaaaaggtagaaaatctgataaaggtaaaagagttagaactgatgataatgtggtttatgagataacaggggctacagataatatgtctgaaaccatgtgtttcacacatataacacatccaaatgaatccctattcaagataattgatgagatgacggaataccctgtcatggttcgacttgagctgcagacttatctcgcgacccatgagaatatagctgccatgttgaagggtaagccactggattctattaaggaatatgtgacccaatggataatacaaaactatccagctgctatgtaatttctttgctgagatgtttgaataattactatgcattcaagctaaatagtttaagaatgaaacatgcactttagatattatttaaataattgatatgctttagttcgaacttgtaataaagtagttcaaaaagatgtttgattgtttcaaggaattcttttagcatatagctttgccctttttactacttctatccgtattattcttgtggccaagttaactgtggaagaatctatagtgttcttgtgacaaagccataagttaaaaaaatttgatctgtgtgcaatattattttgctcaatatgaaaagaagcggcacaaaatactctaaagagaaagatgattcgttgaagcaaccaaacggctagccactaattcttgccatagaaagcacaccaaccaaacaaagggtatatggcaagcctggcaagctggcaacgagttggcttgcccttacccagctaggctagctgggcaatggaaccaaacagaccctaccataccaaagaccagcaattcagaacaaaaatgctcttagaattctacagattttggcacgagaattcaacagatatgacagtttagttcctccaaagaaggaaaatataagtatgataggtgcaaactaaggagacctagctactccaaatccaaaagcattttagatcaggaaaatcaagaacatcagagtatagaatttcgcaaggcaattgcagtcatagatggatagcactgtaccaactcaaatgatcaaagaatcacaacctgcataattgttcaccaatttctaccctattctagagacaacaatgaaaccaattctcctatattaaggttcattgagttaatagaattctaccctattccacagacaataaaaccaactctaagctctcccatatgttacactcaatgaaacgaaatcctatgttaaggttcattgggttatatagtctatagtaacactaattatcaacaactttaacaaaccaatcaaacattttctacgcgatatacagagcaaggtatataactcataccaagacatcaatttgaagaacacatgaacaagcaattacaacacaaggagcatatgggaatttcatggtaatatatcgaatcactcaagatttcaccagtgcgatagaaaaagataatcatgtccaccaaaacacatggtaacttaaagcatcatcatcacggctaagttcaaaatcttgaaagcaaccatagatctaaagacaaaacatagaactcagtagtacgcagagctaggcgagccatggcgacgacggcggcgaagaggcgacgacgatctagacgcggtcgcggcgggggccaccgtacggcgggcgggagtaggtcggcgcggagacctcttgctggcgctcgacgccggggaggtcggccatgccgagcgcggcgagcatctccatggtctccttgtcgacgcggatctcctccacctcgagcgccgacttctccgggacgaagtccatgcggcgctcgcgctcctcctcctgcagcttcagcgagatgccccgcacgggcccgcgctggatgcggcgcatcaggtgggtggtgaacccggccaccttgttgcgcagccgcttcgacggcaggatggacacctcctcgagcaccttcttgttggtgtggaagtcgagcgtcatccgcgagtagtacttctcgatcacctgcctcgaggtcttcttcaccgtcttggtccgcacgcgacccatggctgctcctctccttctccggcgacggcggcggcggcggcgcgggtggctacttgcggcggcggcggcggcgagggtggattagggcagaggttttgggggaggagggagagaggagctatttataagggaggcggcggagtgggggctagggtttgggtgggatctcagccgtcggatctgaatcgacggtcgagttcgttcgatggagattcggcttccgcggatgggccttttgggccggaagggtttgggctggcaaggcccagtatatggccccgtgggagttttttttttttttggctcgtcgagtggagaggaagaggaagcgggagctcaccggcgcggcggcgatggcggcggaggcggaggcggcggcgctgccgcagctgcagctgcagcttctctcgctcgtctccgagcaccggctcctccgcgtgagctttgcttgccgatcatccaatgccttgtcggatcttcctcttcctctcgtagtgctgattcctcttccattttacggtttcgcaggagcgggagcgtgcggcgcgcgaggagctccacgccgccagccaagtctctctctctcttactctacggactgtgattggattctctgtttgctggggattagggttttgggtcgaatttgctgatgcgtggtgggggttttggtgtggaatttgagcagagatggaaggaggcggaggaggggcaccgtcgggagacgcgggagctgcgtgcggaggtggcggcgagggacgacgcgctccgtcggctcgagtccagggttcgttctgcttagccccttcacaactctcaatttcgccaagtagcttgtgttctcgtctcatggatttgggtagagctcatgtgttggattatgttacagtttaatgcctaactaaattacagtccctaacttaaacacattgtgatcatgctggtgtttgccatgttgtgtttcgtggcgattataccaacatttggggctgtttgggccagttgtctatcatagtgtagatttgtacttttactaccgaatcgtaacaatgactagtcctggtgcttggttgattaggtagaagcagcacttgatttttgatatgcatgttatgtcacatcacaccgtggatgcttcattcttcccctagtgcttggtttgtacctattcaacagaggttcattgcaatacctttttttacagataaaatgccttgaaaatgaaaatgagcagctggagaaaaacgaaaaggagttaaaagataacatggagggactgcttcaatcaaaggaggctttcataaaacattacgaggcaggtgtttacctttattttcccccttccttctgtagtagtttatatggagctgaactcattttttatgttttctctccatgctaaacttttggtctttgtaataattgcatatttatgtgaggctacttgccattaatatcatagtttttccttaacaattgctatgcatttgtaagactagagtgtatctggagtctgctttattgtacattgtctaatctgtcatataattctgccctgttcttgcttctgacatttgcattaattatgaattacctgtatgtggaatcaaactgattatcggctcatgataccatgtttgataggcaggactctgcttgttctctgcaatggactatccagatgaaggataaacagattgctgtgatttcagaaaagctgaatgctcatctggctttatttagttcagtaggaaaggaagtcgctgcggtgaaacaagtactcggtaatgtgaaatgtctagttggcgacaaggaaaatgtaggtatgcaaatggctgaaacatcttattctactattgttttaccaaatgattgtctttttattttttattgcactaatgtgcattctttagatacttatctgtgttatgttgcaatttcagtttctgacttgaagggtaaagtagagaagatttctgtgcttgagaaagattttgttggtatgttgcttcttgtagtcagattgcaatttccatatgttgataatgatgaccatatataagttgatatcctttttaagatctgctgttctaaatgtgatttttcattaaaatctgctgttctaaatgtgatttttcattaaaatctgctgttctaaatgtgatttttcacttatgcagaaaaacttaggtttttcgaagaaaaaattaatgattaccagcttgaactccggaatagggcgaggttgatatatgaattgagggaacgccttgaggctgagaaactcaacaccaaatttcagcccaaactagaagaaatatccatttctactgagttaaaagtcattgcagtcaatcttagtttctattgatctcatttggttggttgcgtctccttaacgatgttaccttaggaaatctttattggtgaaggatgagattattgagagactgacttcagagaagcaggttattcagttatagcataacgcctttccaatttctctgaaactccaaaaatctaagttgatatttactgtttttctttatttaggcaatgcttatggagcttcacaacatggagattgctttacataaatttcaagacatatttgacagtattgggcatgaggtgagaccatatgagatgcaaatattgaaagcttcaattgcatatttgcattatctcctgtgtgcatttcttggtacaagtcctgcttgcaggattgttcttcctaatatataatttgtttggcttcttttatttaaaaccaagtatctctctaaactatctgtataccaggtaataaaaagaagctcacctgtttctaatagtcaggatgtaacagaagatgtgaatagagaaaaactagaaaggtgatgctccattcaatactttcaattctcatcaagaaagttatatgaattacagtcttaatgctattaatttatcatgtgcaaacagcattccaggtagtcagtgtgaaccagctaatgagcataccgtgatacctgtttttgatgaagcaggtactatcatttcttagagagctttttaatatttcttacaagttccttggtggctccattgtcgtaagaatataagatattaataacctgttctggcatgtctgttaattttatatttccttccagaatttctgaactctgttccttcaatgtttactattttttttttcaattacatagttagttactcgattactttgtgcattatccttggagataacaataacatggttatttctttagtcaaatatataccactgtaccattgtcacatcttccattaacctctcatttttgaggtttctgtttgtgaacataaatcttctcgatcactgagtttgtatatcatcaacagcaactactccgaacatagaaggtcagtcggaaattgacccaggcagaaaacaagtacaaagccagtcatcccttatggcaagtatacatatgattatatcgattttctggcaatgctactattctcccattttcatagtcttaagtgatttctccacatgaatgcagcattctgctttgccgtctccagagccagcaaatgcaaatgccgaaacagctgactgcctacatggatccgaagatattgacatggtaaaaacacaaaacacactccttcgttgtctactgctatgccctgaagttggtccttatgtgtgttcacttcacttgttatttacaggataattcatctccaggacggtgaattgattatgtgaatccgaaccttgagtcacaaaaacagccctgaattacaactgggcttccctctggtggcatggcgctgagtctgcaaatctccaatgcccagcatcgcagctcatgacctcctctgctcacagccgattgatttcttgtctgtatagcatgttaagtccagttagcccctaaaggtcagaaggaagattgggtgctgcattttggtttttgttttttcaacttcaaatttgtgatatctagctagtgatgggtagttgggacatgcaagaactcactgcgctgtgtattccattgtgtcagatctcttcaacaatatgacactaatgatgaatactacggatgatttcagactagcagacttgtatattgtgtgacatgctcgcttcaaggaagctaagagttggggtttagaatttaaatctgcaacaccaatatattaataattagcgtgggttaacatggttgaagcctctttagcatcgacgattttactatcaaatccaatagaatttttttttaagaaaaatgaaatgtttaccgttgatttagaccatcaaaagcttggagttgaaactgagtcggaatcaggacagaggattaaccctaaaacattttcgactgcaaacccaaactaacctatctaaacccatccaaacagtgatcatgctaaatcgagaagttatcaaatagaaatgtggtgttcatccaatgctaaccagaattcagacatttagactgcaggttttccatcacttaatgattttttcaaacggttttgctatttcacttgtgatagatttttggttcccgtctttcgatttttcgtcagtaagatcttgcatccagattcatgctcatgtatatccaatttatagttaccctcgattacagagcacttatacttggctatagagaatttgtacttagttacaatttactaaaattagattttacaagtgtttttttttatctctagatatacggtttttttttacatttttgtcatttttcattcaaaatgggttatatccattgattaaaagttctgtaagatttgaagctccaatttatccaaagatcaataggtactcccctttttcaaaggttttgctattttacttgtgacagattttatttttactttgtaggatcttgcatcaagattcatgttgctgtatatccaacttacactttcgctacttcttgttgggatcaaatccctcttgcacggaaaatggagcgatccattagagcatgattaattaaagagtaaattgcattgctggtacacaaacttgttagaatggtacaatttagtatataaacttgtaaaatgcccgttttagtatacgaacttgcctagttcgtgcgaacgaggaccaaaatatcat

SEQ ID NO: 4773 - DNA, 38662 bp, Oryza sativa
atgtcgttaccaggttgcttggggccttgaataataatcggcatcattatgtacttcctcttcatgcatagccagggggggaggttgtagatacacatcgtaacgggccaagtgctatggccgctgctcatctctccaaaaggattcatgccatccgtactcaaaccaaaccgtatgtttcgtgcgtcctttccaaattctttaaattttctgtcgatgtttcgccactgcgaaccatcggcggggtgtctcagcatcccgtcctgttgacgctcttcagcgtgccatcgcaacattctagcattccccttgttcctgaacaaacgccttagccgtggtattataggaaaataccacatcaccttagcaggaattctcttctttgttagctgcccgtcaacttctcctggatcgtcccgtctaatcttgtatcgtagtgctttgcaaacagggcatgcttctaggttctcatactcctcaccgcgatataggatacaatcgttcggacatgcgtgaatcttatgaacttccagtcctaacgggcagactatcttcttagcctcgtacgttgtctcgggcaatttgtttccccccggaagaatgttcttgacgagtttcaataaatcgccaaatgccttgtcactaaccccattttttgccttccattgcaacaactccagagtggtatccaactttttgtgcccctgctcgcaacctgggtacaacgaagttctgtggtcctccaacatcttgtccaatttatgggcctccttttcactttcgcagtcttccctggcgtcctgcaacatctgaccaagatcatccgcaacgtcgttaccatcagcagctatttcctcctcgcccgtttgatttccttcaaatccaacatactgagcaaagtccggaatattgtcgtcttccacttcatcttcttccatttcaacaccttgctctccgtgggatgtccaacaattatagcttggcatgaaccccgactcaaacaagtggaaatgaatagtcctggatgcagaatactccttctgattcttacacttattgcatggacaacaaataaaacccctttgcctgttagcttcggccactctcaaaaaatagtgcacgccgtcaataaactctttggaccgccgatcagcgtacatccattgccgatccatctacatgagtcaaaaaaaccgcacacaaataattattcttacaataatgacagtcatacaataattataagatatctttattcatacaaaaatcataaaatattacaccaaataattcttaaaaactatttgtaaagttttaaactaattttaatgtgttttacttcttttaatttttattttagtttgttttctattatttaatattaactttcactagagttttccttctcaactattttataaaaccttgtttagcaaatgaactaaatttctatatattctttcttccccacacacattttctctctcatcaacttacaactaaattttggagacaaaaaaagtgtgcaaaacataggtgcaaatgtagtatgacaaaaaaaacattggaggatgaagttgcaaaccttttaggcacctccgatttgtatgtaaacaccaaaataaattcaatagaaattttggcatgacctcccctcttttttgaagaaattttgaagcttgctcgggcagctggaggaggaagaagacatatatataggggtgggactttagtcccggttggtagcaccaaccggggctaaagatcaccgggatcattagtcccggttggtattaccaaccgggactaaagttaagatctttagtctcggttggtagcaccaaccggggctaaagatcaccgggggggcctgacaggtcctgacagcattcgaaccgggactaaagatgatctttagtcccggttggtaacacaaaccgggactaaagatcaaatatgcccgttacccttttgaaccgggactaaagatcatctttagccccggtttttattgcatccgggactattgtggaaatcggccgaccgacgaaagatggtttctctaccatcattagtcccggttggtattaccaaccgggactaaagttaagatctttagtctcggtgcggcacgtacggcgcggcggcgcgcacgcacgtggtcgggggctggaggcggtggcgaggacggcggcgtggccgagacgcgcacgggagtgaggacggtggcacgcacgcggacgggggccggaggtggcggcgaggacggcggtgtggccgagacacgcacggcggcacgcatggcgcggcggcacacacgcatgcggacaggcccggaggcagcggcgcagcgctctgaggatctcctccctgtactccaaagctcgtgccgtcgtggtcaccggtggcttcaggttgggcatcatggcctcccaatatgcatcgcgctgcccaacaacatgaaaaaacgatcatgcaagcagtcaggccacctcactgagacattacatcgaacactaggcgtgcgtcaccagtaaaacgagccagcgatgccgagccgagcagaccaatctgcggggagcacggctgagaggacatcgccttcccagaggtggagttgtcagtcgtcgggccatgtgatggtgagctcctgcggcgacagcaccgatccaatggaggggaaggtgaaaggaaggaagggaaagcacagcccggagatcgaggtagccagggaggtcgacggagcgcgcggggcggagggaggtcgatggagcgcgcggggcaaaccaccgtcctcgctgccgcctccggcccccggccgcgtgcgtgcgcgccgccgcgccgtgcgtgctgccgtcctcgccgctatgcgcgtgagagagaggaagagtgagagagaagacagagagtgagagagagaagagagtgggtcctacatttttttaatcaataaaatgctgactgaactgccacgcgtatgccacgtaaaccaaaaccaccgcggattgagtcaagggggtaattcgtccggtttacatagttgggagtcaggaatgtccggatttgtggtttagggggtaattcggtcgaccgcgatagttcgggtggggggtaatccgtactttttccttataaaaatgatagatttatatgtttaaataatgtaaaaacgatgtgaacataatgatttgacattgcttgcatactgagtttaaaagatacaacaaaattataaaatgatatgtcatatttacatgatatttaaaatactctagataataattgctagtgcatgatgatgtggcgcacatgcatattaaactttagtagtcagtacacgtcaactttataataaaataggatatgttacaaaataggatatgatacatggtggctccagcgcttaccatagagtttgcaccatcgcggcaagaagcacttaatggcctttcttgagcgcattagttttatgtttgatttgcaattttctgtgagaaaagagctgaagtgatctgagaaagaaatgtttctcatcttgttgatcttgtttatttgttctgagaggaacgtgaaaattaaatcacacaatagacttaacgtacaaatgtacaatgggtttgatcactaggaaattgggctaatggaaacatataggtgtattatctttggaaaaaatacgaattacccccctcccgaactatcgtggtcaaccaaattaccccctaacccgaaaaccaaacatcgttcaccttcaactttcaatatcggacaaattacctccctcgactcaatccagagtggttttgtcctacgtggcgtacacgtggcaatccagtcagcattttatttattaaaaaaatgtgggatccacatgtcatactcctcttcctcttttcctctctcttgcatacggcagcaatgggtgtggcgtgcggcgggcgtgacgggggcgcagcggccggcggcgatggcgggggcacagggggcgacggccggaaggccactacgggcggtgagcatggcggatctccaccggcgcctcttctcttgccgctcgccagcggatctctggtcgacgcgagatggcgcgccgcgcgcatgccggcgtggggacgggggagggcggtcagcgtggacggcggtcctcttctccatcctgctccgagtcggagtcaccgagtagggacggaccaggcggaggtggcggaagcggagctcgcccgggcggtcggctgaggcagagctcgcggagacggagacggaccgaaaggtcggcgatggaggcggaggccgtcgcgtggctgcctcctcgcggaccttcgcctctccgccagcgccacaatggcgagcgccgccgcccgcctctccaccatggccgccgctgtgtgcgccgactgccggcctactccctgcatttcctccacctccccatccacctccactcacccccattccctctacctcccttcgctgacacttccggctgttgcccgcctctccgccatggccgtcgtgcgcaccgacctctccctccccgcgtgccgccgtgcacttcgaccgccggctcgcccccgcgcgccggtgcccaccgctcgtccccgtgccatgccatgcgtgccggcgtgcgcgccgctgccagtgactgactgagagagagatagatagaggaagagagaaagagggggtatgacatgtgggtcccaccattttttaaaaaataaaatgctgaccggattgccacgtaggacaaaaccgctctgggttgggtcgagggggtaattcggtcgaacgtgatagttcggagggttgggggggtaattcgtacattttcccttatctttatccttagtaccaacgtgtccatgcgtggcaatgtgatttagagcaatacgaacgacttgtctatcaaatcttctcgtcggaataatggttctttttatagtttaggttggttttgaaacagtttgatttttgtgtggggaagtacgattgggagaggaggacgacaatttatattttgagtgatgtacacggtattctttaaacttgtgcgagtgtatcatccaggttcttgaactcccaaaatacatatttaggtctccgaatttgttttaggtgtcatgccatgtcagcacatggagcgagttggagcccgtttagacctatatgccatgttggcatgccacgtgggcaaaagtaacgaatagttaaggaaccaccacttaagagggaaaaaagtatgtacaaatataagaagggcattttgataattgccaaatctaatagtggcaaatagttaaatttcccagtctcttatacccattcgctcatcttcattcactagtggagaaaccatcattgtccggtcgaccaaaaaccacaatagtctcggatgcagtaaaaaccgggactaaagatggtttttagtcccggtttataagtagaacgagactacgtgatctttagtccaggttggtgttaccgatgatctttagtcccggttcacatgctgtcaggtgttgtcaggcccctccaggatctttagtcgcggttggagttacgaaccgggagtaaagatcaaaatacactatataatccctattacttatcctcttttttcgtccactcttttctcatccacacccactcctctctccctccatctctaatcttatctcttcccttcctccttatctctttttcttcttatccttcccaactccccttcccaactcgatccagtgtgcgcagcaggagggggtgggcggcccggccggcggagggcagcgcggcggcggccggcgcggagggccgcgtggcggcggcggcagccggggaggaggggaggcggcggccggctcagccggccggcggctttgcttcgtttttttttcttttttttttcaaagaatttgtgatccatgtgtagattgagatgaagaatctgtggttcattgtatggattgagatgtataatttttttttggaatctcattgtatggatctgagatgtacatgatttgtgtatgatttgtatatttgggatgtttctttgatttggggtttgatttcggatgtataatctgtagtgtatatgattgatttgtgtatttgggatggtacgcatcccacctaatttgggagaaaataaattagagattaaatagtaagtaaatgaaaaaaaaactattgcccactcccatctttagtaccgggactaaagatcgatctttagtcctgggtatttgaaccgggactaaagatagggatctttagtcccgggcctatctttagtcccggattcatagtcccggtttgaaaaccgggactataggggggttacgaaccgggactaaaaacgatttctccactagtgattgtttggattttctaattgactcgttcctcttcttgattacaagaactaatcaactgattgtaagttttgatcttatttggaaagttcttgtggctttctgtgtggatttctctgtgtgcgccttcgaagcctcaatgaatcgagaacagtactaggggaaagaaaaaagtttgattttcctttcttgttcttgttgctgccgtttcttgttgttgctggtcgtggctttgttgaacgcgtcgctgccatcgcagctgtcgggcgccacccttgcagaccaccgagaagccgctagtgaagcggactagggcgtgcggcgacggcggcagccaagaagcgcagatttggccactgacaccactgtcgcgttggccgtcgccagccaccgacgccctcctcctctcccgcctcgccccgccagcctcctccccacccgccgcacagagaagtgagagagggaggaggaagggagagaagtggggaaaagagataatgacgttgcaggtctcacgttgacttagccactacgtcggataaaaccgaggtcaaaaccactaaaggacctaaagcgtacgaccttgtaagttgagggacgtcaaatatctggttttacggttggagaacaattttgtaactcgatgacaagttgagggaccttcggcgtactttttccttatcttggtcccaaagctccgtgtgattccggcccaattagttgtggagtcattttttcttttcattttggggatatctctactacttaaaagttccgtagtggtggcggtgactccaaacacgcgaaatatagaacgtgggatagcctaatcgaacggctcagatcgcctttctcttcctacgcatccagcgcacgcgtctccctcgaatctcgatcgctctctcctctcccctaccctcaaccccccgatccacgccgccgcaaccccctcaaccgcccgcatccccgatccgttctctccctctttcctccttcctcaccgtcgctgccgtcctccccggcactcccatccctttctcctccatgccgcacccctccccatcgtcgcagccgccccgtcgcccctgctcgcctgcatccaccacaccgcctccctccccagtcgagacggcgttgcctcctcgccccctccgcagccagattgacaccgcgccgttcaatccaccgcctcaagcaccatgcatcgtcgtcgttgcaggcgtcggcacgggcgcgggcgctgccgatcccgagtcgagacgacgtcgtccgctgctgcttctccaccactgacggttgccctgcgtatatcctccctattatcgcggtccccatctgctcctgaatcctgatccacaaaaacagcggagcgccgtcggcctctctgcctccctgcgaccaccagtggcatctgccccgccgtcggctcttcctcacccgcgactcgccgacgatggtgctccacaaaccattcaggccgtcactggtctccggagcgcccgaggccgacgtgtctcgcactccctataatcttgctttgctgcatcagtaacaacatcataacatatcgtggttcatacaatggatcaggctggtaattcgattccaattcttgctcctgaacttttttattggtgattccctctaatgttcagcagattgggtttggtggtggcagtgccgcaccactgatttgtgttagacattggtccttatccaaccctctaatctcttgattatgctcacttacgatgacttcagctcaggtggttgcaagaaacactcctagactgctatttagttttacgttacagggatttggctacagatagttgcaagctgcaatgttctgatatttgttatgttttagagcaagatctgccttatatataatgttataattaggcttcgaatttcttgcttatgttctttaaaaattccaagtaaccttttcagttctttctgtcaggttaattgacagatcgagttgcacttacacatatcttgttttaggaaatgctccaatggcccttgaatccagcaaagtaagtattttttttatgcttgatctgtgactgatctcaaacagataaattgaaatgagtaacttgtacacagataaaaaagtgacatgggacttgattagagttacggtatttttatcttacgaggcggcaacattatttgagttttatgagtcaaatattcttccattttttcctgtcatttggttgtgtcaagtcattatttgagttttattgggtaaattgtgtcctgactggccctgagttggatgcagtgcttaattggtgcaaaaactgggcttaagttgcagtcaatttccagtcatgtgtttgaaaccattgttttctgattactttaattaaataatccatgatcacaatataaaccatatgtgcaaatatccagtcatgtgtcgtgtgcatgatcagatgactgctattggctataatgcagtgattctgaaattgctatttgccgaggtttcctatttttgctgaactgctgcagcagaatagtgccaccaaatgaaagtgaacacgtaagcatattgtttgggagaagatcacagttcggaatttcagattataaccaagataaagaatcactcaactttatgatcgacttgctattcatgtttattactccctcctttcctaaatgtttgacgccgttgacttttttaaacatgtttgaccgttcgtcttattcaaaaacttttatgaaatgtgtaaaactatatgtatacataaaagtatatttaacaataaatcaaatgataggaaaagaattaataattctaaaattttttaataagacgaacggtcaaacatttttaaaaaagtcaacggcgtcaaatattttgggatggagggagtataaaatagttcctactgaacattgtcggctacttgttgattctttttaggtggtgtttgttcctctgcacaaataggtctgcacatgcacatgcgatttctcttacagttattttggtgctttaaaatgctttacgtattggtaatattagagcctagaggtcaaaaactattttgtatagagaaaattatcccacatagccatctgttgtttattcaagaaatattatatgtatcttcaggggaaccatatgtgatacacaaattcaattttatgtccattgttagagaatccatttgcttgaatcaaaattagagaatcatatatctgatggaaaattgtctttttaccaatatgtttgccttgcagattggtagttcctctcgtcctccaggcaccagctatagacaatatctatacctcaaggaagcctcttcatgttcccctcaatatttctttctgggtgcatgcactctatgcttgctatgcaaaacccaatgtatgtgaatgtgatccttatgctgcaaaggtgctactataaacacttcgttcttttatctatttatttaaacattctttgttggtgtcggtgcattgcctctgaattttagatcttttttagtgcaaaatgcatatgaatgtgtggcattgatattcccttggagatgaaacaaggtattcagtgtttgcaaattaacatttacgagtaggatttacctagctagcatggcctctttcatagccacttttgcatgtatgaatctttgtaaattgtggtcctataggcaaatagaaaggtaaaattacgtgatcaactcgagctctttttcatatttgtgccactcatatttgtcctaagttttaactgtattttaatttaatcttaaattcaggccaactactcttgcggatgttatttaataaatttggatgtgattgtactgcaagttaatctagaaattcatttccctgttttcataacaacaaaacttttaaagatgatatccctttattgtcattcaagtcagcattaagcttgctggttgaaaatttgaagtttttttaattcattctgaagtatgaagtagtatagaactttctgattttctattggtgtttagctcttaattgttgttttatctgagaattcactgctgactgctagcttaaccatctcaataaagctgatgaagacaaggtgctcgatattcagacgatattggtcaagtataacatatttcatattgaccagtgagaagcatccggaagaagtaaacgaatgagcattgagttccagaaaatggtgtatagtatagatggaattatgaaaagcaatcaacctcatgttttatgtatagtttttattattttgtgaaaggatggtagtgtcaatacgtagagtttttattaatttgtgaaaggatggtagtgtcaatatttagttccagaaaatggtgtattgtatagttggagttagcaagagtaatcgtctagctcatggttttgggaaaggattttggtgttaactattttttcgatcagattatcaaattcaaaactacaagtattttcacccgaatgttgttcgtgaacccgtgaactttattagcttcaaatgtttttattttctgatacaactcacatgctattttattcaccaactttcgttgtttgtagatttgtattactaccatatgaaaactataaacatgtgatataattattattcgtgctatattaaaatttttattataaaggaattacacttaataattatttaacattatcttactgtgtgcttttaaattggtttataacttttacccgttgcaacgcacgggcatctaactagtcaatataaaagttgatgtagacaatatttatataagttccataagaaatctatcaaatccagtgttttaattcgttatagtaattacttaattaattgcatggtaatgtaccaagcttttttttccctttattttttctatggtataggtgaggatataataggcattttaattctactatgcatgcgactatgaaatgccatgtgtacgtacgtgatattctttttacagagaactactgaactttaacaacttattacattcgtcctaaaatatgagcattttagctatgtatctatagataattatttatttagattttgtagctaaaaatatttatattttaaaactgaggaagcacttaattaaccctataacgaaagtgttcgcccgataatgaatgtaaatacgtaatagtacacgtataaatacatactccgtatatagtacatactactcctacttagatacacgcatgccggagtgttactcgtctactcgatacgtctcacatcatatccgtcaagcctgggccacacgatctgcccccgcgccccatctggacggacagaatgtgagcacgtacacctccgcgtagcacctcgccgccgccgtgtcgtacgggtagctgacgtacgccgggcacgcgtcccggaacacccgcgagtacgcgctgccgcggcacgtctccgccgtgccgtgcgcgccgcggcagcagaacgcgtccgtcccgaacgccacgcacgcgctcttgcacgccaccaccgccgccgccgccgtcacctgcagctccggcgggcacaccgcgttgacgttcttggcgcagccggggatgacgcacttgcgatcggcggcggcggcgccgggggtggggggcttcgtccacacggccaccggcaggttgtagccgtcgacgaggctgacgtcgtaggagctccccttgctctggtcctcgtggaggtccacctcgacgagggtggccggaggggcgccggcggtgccgttgcacgcgaggcggccgccgcagtcgccggtgaggcaggacgcggcggcgttgccgtggtggttggtggcggtggaggtgaagttgcagccggtgcggccccagaagcggccgttccaggtgggcggcgcgctgacgcgcctggactggcccggcgggaggaggaagccgccgccggcgagcaccgggtggccggcgttgggcgccgccgccggccacaccgggaacgggcacttgttcaccacgcggaaggtgacgccgcgcacgagcgccaccggtcctgatcatcatccacagcagcacaacaaaattcatggaaattaccaatgctgaaaagtaaattttgccaaaagaaaaagaacgtaggtgggtgtgatttacggtatccatttcatattaaaagaacgtaggttttattctctctctttaacagagtttataaaaatagctagcaatttcagtttcaaataaatcagacatattttattgtagattttaatggaactaatttaatatacaaaagccatggatgtgatctacttcctccgttttacaataagttcaattttcctattctccacatatcaattaaaacctaaaagactaaaatatcttcactttatcaaatcctgatacaattattttttgctttatctactcttaatgtatccatctcctaattttacaaactccaatataataatgactaaaaataaatttatttatgataaatcggagggttgaaaagtaaacttattctagaacgaaggagtacctaagagagtaatgagcaggagtagtggtaggggatgaacgccggagagcaaggataagcacgccatctgtgtctaaatctatatagcaaaccagagaaactaactaagctgtcatggagatggtgcagtcgcagagagtaaacaagggtttttataccctgcaagagtctgcaaatacaatgatgccatggctaaggagatagctaagatcaatgagcaatgtgccatgtgtgtgtgtgtgtgtgtgacttgcattgcaatggaagcaaaggaagacatgatttggggtagcaggccagcagccacacctggtgcaggcctgagggcaaaaaggttgagtggtgaggtaggtaaaaaaaaaggatttaaaatggatgtgccacaccacaacttgaaaactgaatttaaaatactgctagttcattgaatttcatcagcccattttggtcatttgggcatgcatcttcccttgaaaacattataggagtactttctattttagactttgagcacagatacacaattatgtctaagcagaatttatcggcccagttgactggcagggttgctgggccttctagcctcgcccaatcacttgacagcttgagctaggatggcttatcctggccggccgacggtcgatacagagagcttctacttcaaaattcttattccagtaaggcagtgtttggcaaatgtctaaggcaaatgatttcctacccatcttaaatcctaaccattcattctctctcacccatttaatcctaacattttatttatttcccaatctcaatcccacccctcatttcacattatccaaacacaccaaagttgaaattgcacctcttgtaactgcgttcggcagcaggtgaaagagaagatttctctctcgtttgtcacgtgcacacttcctgaactattaaatggtatgttttttaaaactttttaataggaaagttgctttaaaaatcatattaatctatttttgcaatttaaaatagttaatactcaattaaccatgcactaatggctcatctcgttttgcgtatattctcaatcttatcttttcctctcctctcaaacatataaaacggaaaatgcactttgaggatcagctatataccaaccctggaattgagctatctttgatagtaataggtcttaaccgtacctttctcttttttacgtgtacgcttcccaaattactaaacggtatgtattctataaaaaatttgctttaaaaaccacattaatttactttttaagtaatacttaattaattatgtgctaatatgtcaccctattttctacatgtataatataaagaagtataaagaagcatgtcagcctgtcaggtgctgtgctatgttgctgaccacattcctctcgaacagagcaagcacagcgaacagaggaggtgaatcccacaactctgaacaatcccgtcgtcttccaacagcgtctcgtccatctgttccaaccgccttttcttttttcaaatggtttttaattggaaaatggatttgccacatgattcacgatcagtaaacgctttcagccttttcatcttacaattgagtactccatcaatttaaaaaccatttgaaatgtcgtaggagataatataccgtcgtacagtatataccgtcgtgctccatcaattccatctccacgtgttattgtctagtatcaatacagcataatgtcgtaggcgataattaatcagagtatcatgcacataagtaaaatacaaatacatgttcctttcgttttatattataattcgttttgacttttttcttagtaaaacttttatgtttgatcaagtttatgaaaaatgtaatggtattcctaacacgaaataaatatattattaaaatatattcaatgttagattaaataaagtttcaaatgttgccaaaattttctaataaacccaatcaaaatttaaaaaattgacaaaaaaaatcaaaatgacttataatatgaaacagaggcagtacaccaaatgcccgttgtgatcctaccccgaagtagcctacaggctacagtctcagagacagggttcaccaaactgttctcaagccaaaacagggttaaaccttttctttttctcgcaaaaatcgtcaactgtttgactcggcaaaaatccagttatatttttctgaagttataaaatttagtttggttaaaggtaaaattgtataaacgatcctaattataaaccttgttttaagattatacttattatattttattttcagcaaaaatcctacccgccgaacgctacctggataaaattggtcttcccccttcccgtgcggatgagtcattgattgggctaatctatatctatactaatataaaaaggatgagttacctccctccaatcctacatgttgatagatgtaatccctaccgtccatctgtagatcgctgatccataccgtcctccgcgatttaaccatctccatctccaccgcagaaatttctccctctacgcgcaaagaccgtgcgaagactacgcctcaccctctatatgcgcgactccaccgctaccgccgccagagccaagttcttctccatccgcctccggagtcgtgctcctcgctcctcctcctcgcgtgtactgctgctgtgctggagccgtggtcttccccatacgacgtcatctccagtcgccgtcggagccgaggtcgtccccttccgtctccgccactatcgcacagcaccgctgccccccccccccacccccctggagacgagttcttctccagctaccgctggagccgtgctccacgctcctcctcgcgtgtattgctgccgccgccggagccctggtcttccccagtccgtcgccggagccgaggccccccccccctcttcccctgccctcgaagctgaggtcttcccatccggcgacgccactgcagtccaccgctgcgctcaacggagccgaggtcatcctcatttcacatattaatttgtagtagtacatagctaatgtggcaagcagttgtggcaggctgcagcgttgtggcgcagcgccgtagtgacgagcagacgcggcaaccgggcgacgaggagcgagcagcaggaggtgagggcgaggagctagcagatcaggccatccctccatgaagggcatcagacgacgaggggcaagcagcagcagctagcagagcaagcggtgagtcctagcccggtgccggtgttcatactcttcgtctctgtttcagtaatgcatctagatgatgtgatttataagaattgagcttcgcgattcatagttttgatttattcgtagattttcgatggagaagaaaacaatgttgttaaattattatgcaagcaattcaagtagtaccaatcaaactgatgagaacagaatggaatttttgctgattgtgcacaaaataagaataacaataggtaagttttgtcacgaaatgagagatgaaataaggatggtatatttgttggtaaggttataagatcatttcaaaagaattggttagataaatttaattggttagaatatagtgtcaaaaaagactctgcatgttgtttctattgttttctttttaagatataaatacaaacccataaattaacttggttcttttaggtcgaacctaccctctatttctatcctgtatttgccactgacgcccttggaacaccactgccctgatttcatccactcttggctccatttggaatctggccatcgtcctgcaccctgcttcccattttcaaatcaacttcagcacccacattctcctggaaggtatgactttttttttcctattagcactagaagtgaaagcattgaggtaaagactaatttgaatgtccaatgaaaatttcttctacccgtgaaatgtatgtcaatctgtggaccggtgattgagtggtttcatgttaggctcaacagaattatatgaaggccattgagagtaatttattaaatcctttttgaggaaatatgaacatgggcaacaagacctatataggacactaaatttcttacttctgaccttacatgttaactgatttgcatgaacttgctaggaagggggggggggggggtttcaactgacacacaggtcatatcatttgtttataatgcataactaaaaaaaattcctcttgtcagcagaagtgtatagttctttgaagttgaaaaattcaatcccatttttgaatggttttcacatgcatactctgctaagctacttttctgtaagaaactaagtataactttgtaaacatgcgtaacggagtataaagttcatactttgttgaaaatgccctttgtgccactgtgtcaattgaaaaacatgaaaatgtgcaggtttttgtcctgctcaggaagggggtgtcgccaaagtgaattcaagacagctagcattcaatactttacacaagatccaggagccaccagcaatgcaagtggttgtcttactggtactgtacattttcttcaatagaatatagttgaaatgtagtattggggttctggtattaatgttctgtgatcagtatttgcaatgtattggagttgaaagatgcaccttctgttgtagcaggagtaaaaaaatgctggaatgtaagtgaatgttacatgtacatatgtgcaaacaatcatgaccattactaacttatttgttctttctgcaggtatgttgtgatgatcccagagtccaaggttggatgcttcatatcataaaggagttgtccatgtatttaggtaccatttgttaatatcatgacggccatggtaaagttcataatatgtcaatgtatatagttcattccctatcgttattttacttttcctttgagctgaaatattgcccatggggttagctcatttgtgtggcattggtggtatattctgattgaaatttataattggttgatgtactaaagagccaaaaagctaccctagacctttaactgttaaccttgtatagatttggaaatatattggcaaggactcatgtgacttcactatatcatgctatttatgttgctgattaaaattaaattgaggtgtatcactgtggcaattaagctaagagtaatcagattcctaatgttttgagtttacaacctttttcctttcatcgtgaaggctgcaatttatttcagtaagatacaatgtttctgctttgaggatcaaacccttcttccaatgcaaagaagaaaaagggaaattcagccaatgtgcaggtatagcaggaacaaatgtgtaaatattagatgccttgcccatacaatctctttgagatgtagctgttggtactttcttatgttccatggtgccagtggtatgttctgcaacttgagcaaacacgattttcctttttttttcttctcttctttcacagttgctaatagtcattttctgcacaaagttttaattgcaggctactcaagaacctaagaagttctgtcatgaagctgttgtttttctggagtcccttttggtaacatctattagaggacacttgggacctcacctataaaaaacaagtaaattttgaccattgcttcatattaagtgaatatcctctttatatataccaatgatcaattttggagctcaggaaaatggaaccatggcttcatttccttaaaaagtgcatcggttgaatccacagtgtatattctgcaagttataagcaaggattttgatgctccttatttcttccctgaaaatttcaagtaaagatgtgttttttggaattttgaatatttgcattgtgctgatgacttctaattactaacgatgtaattcataaattttatctatcagcatatgcttgcttagccggtttgttattctttttatttggatatacgtagtttgcttgaaaaatttgatggggctaaaagattatttggtttctcaggaagatgcttgatgctaatgtcttctcgagctttcagattgtaaggtacttttcatgtttttttaaaccagtactgctatccatgttttaaatccttttcatcatcattgtggatatattatttatttgtagcttcacaagaaaaagagtgtggctgtggactccaggattacattgaatcttgaaaaggtatgcactattccaatttcagatgatgcatttccctgatttgagatgtttccttttttccaatctaacaaaggaaacctttccttgagggaattccatgaaatatattggtttccagatttcaagattgttaggtcatttcgtggctgccacttcaactgtaggtgtgtgcatagtttagcaatatgacctctttagattaatattgtggtgaaggaaaatatataggcgttttgacaactgttagtgtttctgaaatgttcacacttgctatctactttttacttcaattaaggcaactatgaacaatatttttttttggaattatgtgatgaccatttcctgcaagtgaaatggatgtaaatttgtgttttgtagaccacatgaacttatgtggacacacggtaggacctgtaggacctatatacatctcattggtgatcatgtaaatgctatttttaattgctggccatgaggggtatatttgaagtattgttggagaaaacataaagtccttttttactccctccgctccattttaagtgtaaccatgagtttccgtgcccaacttggatcgtatgtcttatttgaaatttttttataattagtatttttattattatgagatgataaaacatgaaattatgtgtgacttatgtttttattttttttcaaaaaattctcaaataatacgaacgattaaagttgggcacgaaaaatcatggttgcacttaaaatgagacagagggagtattagatattgtatgctgtgggtactggggtttaattcaatagcactaagaaaaatatcttgctttgagcttttcaagtttttatcaagctatggcaaattatggttggtattgttagctgctttgcattttttttagtgtttaaaggagtatgttaagttactataataacttttagtatgtttgtatattttgtgtgacatatattacatgaaaagtgcaaaaaaatttaagtgttttatattatcactatagctaatgtgggaaacgtgcattgcgattactagtttcttctaatgtcgatccacgagggccatatcaggcaggtcaagcttgtccagcgtggttatgtgatgagtccaactagaacttgtcatcacctaagaatgatgttgcttacaactcatagcaagcaagtccttcacctaatatcgagtcaaaaaaaatagcctaagagctctctcgagtcgggctcaccttataggcacactggacgggcctaacctaggtgatatgacccgctgcgaatctacgtcaaaagaaatgggacaaattaacttcttttttgaacgactcgcacgagacggtgcgaagttctattgatagagcaggaaaaaattacaagattacaaccctggaggatcataaccagcaaaaagaaaaaaaataccaccgcccacacaccgacagcgccaacacacacacacacccgggagaaggctagcaccgaaccggccgccgctaagcgtgaccgaccgccgctagaccaacaaaggaacatagacgagatcgccccctagaggatgccaaaatgatgtcttcaggaagagaagcgacggaagaaccgccgccgccatccgtcagggctcaaagaagtcaagactgggcttttgccagacaaccgcccttgaggggtgagacagcacgacaacgccctcaggagggggaatgaaccatcattgtcggttcagctacagccgagctgggttttcacctgccgctcaccacctgcgaatccacggctgacgcaccgatgctccaccatcactcaagctctgccgacatgtgggacccctgcaccggcgtccctcgccggtcagccttggtgcgtcgaagaccgcaccacacccaccggcagctcctcctcacaccgaggtcacctcccccaccgtcggctacgcctctcgcgccaagccggcctcctccaccggatgcacctctcgcgccaatccggcctccctccatcggccgcgcctctcgcgccaagccgtcctccgtcgccgtcggcagcgcctctcgcgccgtgccggcctcctccaccggacgcgcctctcgcgccaatccggtctcctgtcatcggctgcgactctctgtgccaagctgacccccgaccctcctccgatcgctgctgcgccgtccaggtgcgctcgtcttccacgcccctggctagccgtcgaagaccgccatgcctcccaccgtcacgcctccacttgctgccgccgtcgatcatctatacgacgccgccagacgttgtcgcatccgccaatgtccccggccgccagacgctgcctccacagccgcggcagctacgagccagccgccgtctccaactgtccgtagccagccgttgtcgccgcaagccgccgcctcgtcgccaaccgccacagcagttcaacggaggggatccggtctcccgccgcagcaggccgacaccgcgtgcagccgccacgacaggtgcggctgcttgagccgctgccgcatggtccctgccgcggctgcctcgaccgtcgctgtcttcgccaaccaccgcagcagctgcctcagccgtcaccgtcgccaccagccagcgcagtcgtcgccgtcgccaaccgccgtagcagctgcctcagctgtcgccgtcgtcaccagccaccgcagacgccgccggcaccgcagccgccgccgccaccgcagccacctccagcgccagccgaccgatcagatctggccacggccaccgcctgccactgcagacatggccatgccgctgcctcctccgccacgccgccactccagccaccgacactgccacctccgcgccgcccactcgccgtccccggcagtccgccgcccggagcaacaaatccagccatggggggggggggtcggatccatgcatcccagcgccggatctggacgccgccgtcggtttctcctcggcgccggcgccttgccctgagctccgtcttgccggcgccctaaccagcttgactgcgagcgagggaagagagccccgccgccgccgtccttgcagccgcctggctttgccggcggtggctcgggcagcggcgaggtgggggaggggaggagggggtcgggagcggcgcggcctgtttcgctgcccgcgtcgcccccgaaggcggagcgaccgagcgttaaagtgggccgacaaattaacttctcatatgcgcaaaggaaacaatttcgactggataacgttgggtgggtgagttcttgcaataaaataggttataaggtgaaatctcaaaactaagatgataattagaatggtcatgcaattttgccataattgatgactggtttgtgttctcgaaccggtctaaaaagttcagttctcgttcagttctagttggatgagccgctggcagttgtcatcatcgtcgtcgtcctcttcctcctcctcctcgaagtagccattaacaacaacagtctacctatccatagcgttgggtggactactgccatgacccttttttttttccctttcgacattcagattagctagcagcagccactacacagctacactgtagtactgtaccactgttcctccttctactgcatgtggggccactgcacttcgcagctgaagaagaagaagaagcagcagcagaagatgaagccacatccgccaacaacccaaaagctccaggagttaatggcagatcgaccagtgcttttttcttcctcgtgttttcttttcccgtttcttataattaatcgtgcgatcgtaagattttttttccgattttttcttaaaaattgtaccaagtttttttccttttaaatgaaaacgaatacttgttattctcttttgaggtgtaccaaaagaaatattaatggcagatcgatcagatcggctggtggtagtggcggagtcaccgtctggctagtccggacagccgctcgggctcatcgacgaaagctccgttaaattttaatgttaatgattaaattgatggtttgaaatttctatagcaaatagcactactagttatatcgaaatttatctggacataaaaatctttttggctccacaactaaccggtggtgacacacatccataccataagtatcagatactacctctgtcctatataaattgtaattctaggttgtttagtaatatattaaggtttaagaagaaatactatgatgtcccttattaaatggcttatagctgagagtggaagggtggttgagggtaaaatgggaaaaaaaattgaattacaagtgattaatggaacaattagtactctattgtgataattattttaggatttgaaatacaattattatgggacagacgtaatagaagaggagagagaggaataataagaggatcagaatggaagggaatggagtggtgcagaagtggggatggaagacaaaggctaagcttgtgtggccgcatccagcgattccccagcgattccgacaaccaccagcaacagcatggctgattgcccgtacggtcgatcgcctcgcggatgctcggcctaaacagttgtgatcaccaacatcactgttgatttctgaccccaatcagtccatctctcctaatgatttttttactgtttcctaatgatgtcgaaatgtacatcaacttttaagacattcgacgtggttgattttcgacataacatttgatgctccgttttattaaaaaaaaataagtgtcattataacttgttttatagcagacgtactttaagcgtggtttatacttttttatatttgcactaaaattttaaataagacgaatgattgaacactaaaatcgatatcgtttatttttaaatggatggagtaatttaatttaaatgtatttgactgctggcatttcaaaatgtcacttactttttttacttatttataacaataatattgactatttcaaatttattttttgaaaacagaatggctacttttgttaccttaaacatagtttcaatgtactataactttcttgcatctttttttataggtttcatactagtaattagaaataaaaaggtgtcctcgtgactgtgccgttatctaaaacaccatttatttgtgattagagggagtcggaagaaagagaagtcgatctaattatactccataaataccaaaatgatcagcttggcttatttggaaacgaaaacagtcccaaactatttcacttgagcaattaatctcctaaataattttttggctcattttatacctcaaactattggaatggttcaacttaacacacgcacgcaaaccctatccctatgagcatcttcgaagattgggccagcaaatccatcctggagattgacgaagtcaccacaggcgcctcactgtcgacggttacgtcgcctaccactgaaagcacaaagccgttaaatcctggaaaattcactcccattgggagtcgaacccaggacctatggtgctactgaggctcttataaccactaggttacaggctctttcgttactcttaatggtatttctctcttctctctatataagtcatattttgtattaaaatttggtagaattgaagatgcgttatagtttacctctcaatattctttagaaaaaaattatcattgtttacgtaggttgaaaacactgtgactaatttaaacatgaaagttttaaatttcaagcaaatactcatgaaaacattttagaactttgataatgatatcatttatagcttaaaaagtttcagcttaaaatacaagagtgaaccatttctaatagtttagggataaaatgaagaaaaaaatagtttaagtattaagtgctttaggggagtaaaatgattttcttttctttggaaaaaatgccaccttgcataggaaaaatgatttagcaaggaaaggaatattggttgaggctaatatgtacttcggaaaaaaaaagtaacggaggagagaaacatcgatagtaagatattatcatcgatagtaagatattatcgactcttagcaaaacaacaaaaaaggaattttgttccttaaggacagggaaattaatgaatgataaggaaaggttttttctcttggtgaaatgaaggctaaagtatttatcagagtgaattacactttaggctaccttttattgctatagtttcaccttaatcacctataatccaatcattttttactttggactagctaaatttatatttgtttgctttggatcacccaaaaccacttctttagcacatcaacaacatcgaggacgttggctatggcacgctggcaaaatcatccacctatgaacatgccatacctttgtcggagtataggatggacatggctagtgaagagagtcgaagtagtccaaaagtacaacaaacgtaaagttagctactttaaagtgaaaagatcagagtaggggtgttcaaagtgaaactacaaattcaattcactctatttattatctcaattgttccaagaaaataataaacagcatgtattgcttataaaactgtatgaagtataactgctgtactcgttctactcatgctctataacttggtacaagacattccaaaataaatccacctatgagtataccattaactttgctagagtataggataaacgtgactagtgaagagagtcgagtgaagagagtcgagataatccaaagtacaataaaccttaaaaagattagagtaaaggtgtccaaagtaaaactaaaaaataaaatatgacccaaaatataattcactctatttattatctgaactgttccaagaaaataatctctaaacaacatatattgcttataaaactgtatgaaacacaaccgttgtactcgctctaactcccaccctataacttagtactggaatggaggacacacttgtaatggggttattattggacaagacattccaaaataaatccacctcccgtataaatgcccgaacatttttcttgggggaaaacagatcatatacatgcccaaactttattgatccagcctgtttttacgagtctcctccatttcttagagcaaggataataatagagctcactttctactattagctaattttaaagccaacacatataataaattagctataaggttggctacaattttttctcctctctctatctctcacttatacattaattgtatttgtcttgaagcttgcatgagagccaacacccttaattttttttgttacatctctcctccacataagcttatagtaggcttatagatcattattatacttgctcttagggcacccgctatggttatctataggctctctacaagagatccatgtcagcatattttcctacttggaagatattaaataaagagagagagcaaaactatctaataacctggagatagtctatagagaaaaacgatgcaatgcattagagagctatagatacccatgtaggcgtactattgaggtggtttactattaatctagtctattgctgagttgtacatgttttatagagaacaccttctcttactgccgtggtagtacttgtcagatgaacagagagacatttaatttcgatcaccgtcaattatgacttatctccaccacaattaacgccaaatttctcaattaatcagtgtgcgacgacgtagtagcttctaaactgttgctgtgacacgcgtcgcactgttgccatgacggcgttaattaggcgcccataatcccaatgattgagaaacgaatgaatgatatgattcggcaatataattaatcgctgatgggcacggtcggacatatggccccgtttgagggattatctagtagcttctccgagaaccccaaaattctcacaaacattatatttcatattattacccagattatgataatataattttcttccgtttcatattataagtcgttttgatttttttcaaacatctttacgtttatcaaagtttgtagaaaaatttagcaacatctataacactgaattaattttactataaatttaatcaaaattaaaaaagtttgattaagaaagaagtcaaaacagaaggagcatataactataatatctcaaaaaaatgaaatctaaattacaaaccagtctgaaacctgtcttttttagatttttaaaaactagctatgaactaattgtttctcataataaaaaacaagtaaatattagaaaatgatttaatattaaataattagaaaggatgaggttttaaatccagattatctaacactagctgaaagaccctgaacgtttctcactgtttctcctaatcatatgattcatatgtagtatcgcgtctatatttcgaacagttcagaaaaaaaaaatagaacagtgccggggctctggtattttcggctcctaccagtcgcggccaataattcgtcgtgcaacggctatcaccatcacacacacacacacatacaggggtatctaatatatcgtgttcggagtgatttgtcgtcggttcttttccgtttaattaagcatggtgtcgatcgaaatcatcaaagagttggtgccattaattttggacccccaaactatatcggcaagtaccttcttctgctaggtactgatgattgtttgtatatatctccacattggaattgaacgaaaataatttttttttggaccagtaccatcgatctgatatattattgcatataaaatttacaaacagtcatgttctatggttcaagtcatataaaactctagaactgggagattttagaaaaaaacttattattacctatcattaggaatgattgagcaaattaatttcagaaaatcccgctgtggttgaagttgaagaatctgtttttttttacatattccaatatgtttttccccatatttatgtatgttttgaagttcgagagcgtacatgttctataatatctatacatttaagaataaagtgcataattagattgcttacaactaaggaaaactatgaatatatacatgcaccaatcgatagagccttttcaaaacttttttaaccaaacacatgcatataattttactcccaaaaatcaggagagcaggcctccggaacccctccttgatcttgcaccgagaggaggagacaaatcagattttgggggagcacatcgcgtaactacaactacgtcgactgctttcccttcatcgtggctggtggcgagaatagggatgtcaacaataagagtgggaatgggaatggcaacggcaacggttctctttccactaccatcgcaaccactattgtaggaccctatgttattctcctcttctatttctttctgttgattctgcttttatgcaaaaataagttatatatatatatatatatatatatatatatatatatatatatatatatatatatatatatatatatatatatatatgtttgtttccatggtttacacctatagcatgtcttttttttatccttattgttgagaataatccgtttatggctaacgctatcatggtttatgtttacatcgttatgatttgttttattattttctagatcaaatactatggtaaattgcttatattgtcaacagacgatgcccgggagaggccaaggtgattctggagcatgggcaagagagctactgcttacatgcatacacgtgtacgatctagatgccgcctaggcccatgcccgtccctgggcatgtgcgagctgcgagatcgcacaggccccccaaaaaatagggtctttaatttaaaccaatatgttccgatatacttaggacatccacaatgtgaccataagagtgagccttaagactttttttcagctatatacattgtggatagggacataaggcattaaatgctaaaaaacagctctaagcttatagttgaacttaagagattaaaaaatgatatctaatggagcctatcagcatatggttgcgaattggtggtatgtttcttctttaatgggatccagtgggacccggcttgttttttatccaaggccataaccattgtagagatagatatagctaaagctatctgcacataggctcacccctatcgctcattcagcaacccaacattgaggttgcccttagggtctttcggatggaacgagttattttcttcacagctccgacaagtattcgatggtaaacataactacatccaagaactatattttgtgacgacgctatcaacgtgcattctagacaataaggattcttttttttttatttagtaagaaaaaccgaattgttacgatgattcttcttttacttagccagaacactaatatctatgtgggtgagtttgttgacatcactccagttattattggtcacaaacttgtttgataaataaaggactactaaactaatggtaccttttcctgatatagttataaagaaggtaaaacagatcaaacaaaaatcggtgatattagaaatccgttccaacatatttcacacagaagccctatagctgagtttgggaggacatagaaaacaaaacaaataattagcacggaattaattaagtactagataaaaaaatcttaataaataaattaatatgattttttaaaacaacttttatatagaaatttttgtaaaaaaatatatacagccttattagtttgaaaagtatatacgcaaaagaaaaatgaagaaggtaggttgggaaagaagcgagaattgttaggaacagttcgtgccgaggccactggaacatgggttgtcagcaaaatggtgcccgtacgtcctgatagatggatggaaccggcgatgaaaagctcgagctaccaaagcgcgtaagtactgaaatttaactcccggcgctgccgcagctgcttgacgattaagccgggcgctttccctcattgattacgtactccggctgtgtttaagtttccttcaaactttcaaaaattccatcacatggaatatttgtacacatgcattgagtattaaatatggacaaaaaaacaaccaattacacggtttacatgtaaattccgagacgaatcttttaaatctaattacatcatgatttgacaatatggtgctacagtaaacatttgctaatgacggattaattaggtttaataaattcgtctcgcagtttacaggtaaaatctgtaatttgtttttgttattagactacttttaatacttaaaatacgtgttcatatacaataaaaaaaatttagagaaggaactaaacacggcctccgtcgcctaactgtagcgccatttatcgatcactcaatcagcaatgcatatgaaatgtgcaatgcaagcatatgcacgaaactcgtattaatttttccccatactgacacaaaaaggaaatgtacgaacacgtaagtccagggcccacaaaccagcagcaggtggatccatcctggtgctccttaatttggttgggcccacatttttaacttttttttagatggaatgaactagaagaaatgttttcatgcaaaagttaagcaagttcaatggattcatgtgtgtaagctgtaggtggtcatcagaattaatttgtttataatgatgtgtggaatgatgcattaatcgactgctcaaacacgtacgtcgtcaggatgtggtgttccgccctgtgcacttacagacatgtcaccggctgctcgttgacttgtaagctggaattcttattatttttaaaccttttaaattttaaaacaaatcctcccaagacttaacttttattttaaactttttggccacgtcacctgggttagcgcaacaaaacaacacagcctcgccacccacagtgaacgtgtcgatgttatcttgtcatgtcacaggaggttagcatggaagtgttgtttggccacgtatcagtacggttaaaaggttcacatttagaaataagtttatgttagtttatttttaaaataaaaaaaatcaaaaaaatagattttataaattttagagtttgatttaggtttttttttcaggcctaattcttttcttcaacaaaagctggatgaaaattttgatattcgtggtatgtttttaaagtgctaaatggtgtgtttcgtgtgaaaactttctatatgaaagttgctctaaaatattggataaatctattttttcatgtttgtaataactaaaacttaattaattgtatcttaataccacctcgtttttacgtaaaacacttaatcttcatcttcatctacataagattcaaacacccctagaatataagtatgaaaaaaatacccttaaattgtttttgttgcttcatttattttcctgggtttataagacgagatattgttaattaacgctgcggttggaatgtattacaagagaatcgtttttcaccataataccagaaaaacgtcaccatgttaggggcgaggaaatagttgtggaattccttaaggattctacgtttcattcactattgctatatattttcaagaatttcaactattagcttaaaatcttatcgtaattaattaaattggcatatagtgagaaactcttaggggtcttccagctagctccacaagctagtgggctagccggcctgggttcaaagcttcaccccttctatttatttgatattaggtcattccctaatatttgtgtttttaaaattggcatatactagcaaatatatgtttttcaacaggaactttgtaggattgggttctcgtgaggttttttttggcacttctttaaagtactaagaacatggttatgaatatttatatataactcaatcaattatcctttattcaaactgacttaatttttcaaacttcataatgcctttgaattcccgagagcactcttatccacctttgtgcaaatcactcattttaaagcatagaagcaagtcccagattggtaaaggattccatcattttccacaatatctggaaagatttcaaccactagctcaaaaaatcatgttaaatgttctcttaagggcatgtacaaaggtaaagtttaatatgagctctctgtattaattaatatcactagagactatcctcctacaataatagagacaataatatttctaaaccattaatacactaaataatttttttgttatacttctttccttttctacacccttatgccacaaactttccattaataaatgctaatagtcgactctgagccgttgtcatgcgtagcaacgatgtttctcattccttctctctctttcttccacgttaccaaatttacttgcatgacaacgaagagagcccgttaactattgtacatgccctaacaagtcaacagcacaaaagtcccttcccccttttgtgtctcaagacacatcccttcaaatttaccaacattaattttatttttctcaaatgtacctaaccatctctctttgggaagtattctaccacctatggtatgctagtcctctttttacctaatactacaccttcattaattacattgccaacacacttaaaattatactacctttggttaatttaaaattgaactaaccaatgccatctaaataaaaatagagggagtaccatttatgtaccatacattttaagacaaacagacttcgtgtaccaatcagttcatacagaagccatgttcgaatcaataacgaaatatgaatgttcacctacacatcattagagatcactgtcctctcctcctccctgtcaaactcttttcctttgaaaaccaaggagaccaccatttcctttttgtgcagtactttgtacgagtactgatgggattaaccggataatatagacatatcacaataattaattctagtgtaaatgtgtaatgctgaatgcttgaaatttaataaacttttcttggaaggtttttggtaccgccacagctgaaataatttctcaagtatgttcaacattgtggttggaaagcagtactatagcgctatcttggagaaaaaaaaattcagcaacagttttggacgcatatatacatagcatgtcagagttaattaattaagtttctggtagtggtgaggaaatatatagttatgataattcctagggattctaccgttttctcagcaactttcgagatggactttgtaggattcgatttattcttgtaagcatttcctgtatgcatgttacattttgataagtactgaagaaatggttatgaatattccagtacaactcaatcaatttctctcatttattcaaaggattatttaaccttttcaaacaacatcgtgcccttcaaaggacccttgattatcaaaattccttgaccaattcatccatatatcacttatatttttcactattcatagacaatcacccattgtgaagttaagaacctcccaaatagcttcaggatgccatcattttagctcttttaattttggaaagatttcaaccattagcttaaaaatcatgtgaagtattctcttaaggaaaaagtacgaattacccccgaactatcgcggtcgaccgaattaccccttgaacctaaaaaccagactttgcttaccccgaacttttaataccggacgaattaccctcctcgacccaatccaaagctgttttgtcctacgtggcgtacatgtagcaatctagtcaacattttctttaaataaaatggtgggacccacatgccattactcctcctcccctctactctctctctcgctctctctctctctctcaggcgtgcgtggactagcagtgggcggtggcggcggcgcgtggggaacggacgtgcggtcagcggcggaagagcgtgtggatggcgcgatgggcggcgggcagcgccgaggagggtgttggaggaggcaggcagggccgaggatgagctccgcgtcaacggcgatgaggcgacgaaagcggtggcactgctgctgctcccttccctggagatgatggtgaggtacccctctcgagctccgtgccaacgacggcgggtgacgagtccgatcctccttggggagggcgcggcgggtgccgcgtgcggcgcacgcagtagggagggcgagacgagcggcgggcggcaccgaggacattggaccggcaccggaggcagccgtcgtgctcatcccccatcttcgcctcatgcatccacggaggctcgccgacgtcgccgagcagcaggagccgcattggacgaatctagtcgttgtggaagaactcggcgtctcgtcgccactgatcagcatggcgatttgggcaccctatgattcgtcttttggcaacgccttgccaaggaatctattttctgttatggtctctgcagactctgcttctgccgctggccaccgtctattttctgttgtgctctctattttctgagccgctcccacgatactggaggggatgccgacgaggctgaggaggactatgaggaggagctccgtgcgtcgatccgcctctaccgccggccaccatctcctccttctctagccatagacgcaaagcaagagagagagggtgagagaagggaagcagggggaatgggattagggagggattggtgtgaggaaagagatgacatgtgggcctagatatttttttatgttttattttgctgactagatgccatgttggtggccaagtatgcagattgaagtcaaaaccgtccaaaacagtgttcgggggattatttccggtataaatagttcaaggtaaacgatgtctggtcttttagtttaggagggtaattcggttgattgctatagttagtggggaattcgtacttttaattaccttctcttagcaagttcaaacactatcacaggaatacctatcactgtcgactcattgttgtgggttccattagaaccgacagtgataaatggattcggggtaaaaagaaatcgatttgtaacagtcgagcaacactgtcgattacttattgtcggatcaactataggtctttcatctggcagtgttggaggtttatgtgatagtgaaagcacacgaatttctttctcttcccccttttgttatgctttaggacacatcccttgaaaactttcctcaatttctcaaatggagcatataagcatatctttttgggagcattcctcaatacctacaacatactactctaatgctctcacctaatactccgtcttcatctgctacatcgccaacagacttttaattataccatttctgaatattttttccacttactctacgtgttatatatgacaaacagtcttcgtgtacccatcagttcacccaagagagcctcatatccatgacgaaacatgaatgattcacctacacttcataagagaccgctgttcaccactgtcctctccctatgcctctctcaagtcctttttctttgagaaccaaagagaccattactaaaatgtgggttaattggatccatgccattgcaactttaccaaatttataaaatgacactactatttgtcatatcggctatatgccactggaagtttctaaaattggaaccatgccactccagccaccttttccgtcctcctctctcacgccgtctctgttcccgtcctcatccccctatggtgcatgcatgcagtttttgttactgcattcatcaattttgttaccgaagtaaatgtactacgaaagagtttttacttctattggtctcgatgcactcatgttatgtgtgatcaactggaacaaagccacagaggaagtatgacaataatgtttaacaaaaattataacattgtaggagtacttacaaagaaaaagcaacacatctggttttaatgttttcaaatcaaatatgttgagaactattcagggtcagtttttgaaagtttgatccaaaaaaccatcggacttgctaaaaatatgatgccacagtttttactaaattttagtcactgttttccacagaggaaataggaaagatactggcatatttaaatacagagagtagttagtttttatacatccattagttattaaaaacacatatccatccatgacaaggtgtctcttgtaacttcactgatcccaaaatatattgtcatggtctctcttagagatgctcgtaaagacaaggtgtatatttatatgaacaagtatacccgtatgtatataaacgcttacgtttgtatcatattttcttaaaaaaaaaataacgaaacatgaatgattcacctacacttaattaggagaccactgtcctcctcccctctctcaactccttgcctttgaaaaccaaggtgaccaccattttcttttttttttctttttgcagtactttgtaccagtaattaatcaactaactaatcatgggattaaccaaaactaattcttgtgtaaatgtagtgtgcaatgcccagctgccccttacctctcaccaaccaaccatatgtttcgcccactcacacacactgacactgccacctcactctccactccactatatataccctcgctcgcgcgcgcgcactccactcgcgcactcgcgctcgctcgcacgaacgcacgcacgcacgcacgcacgacgcgcggcgcggcgcggcgaggcgaggctagctcaattggcggcgatggaggcggtggcggaggcggtggcggcggcggtggcggccggggtggagccgttcccggcggtggacaagtgcgacgcgtcggggcgggaggcgcacgcggtggcggccgacctggaggggacgctgctccggtcgcggagcgcgttcccgtactacgcgctcgtggcgttcgagtgtggcggcgtgccgcggctggcgctgctgctgctgctggccccgctggcggcggcgctccgggcggcggtgtcggaggcggcggcggtgcgggtgctggtgttcgcggcgacggccggggcgcgggtgcgggagatcgagtccgcggcgcgcgccgtgctgccgaggttctacgccgccgacgtgcacccgggcgcgtggcgcgtgttcgcggcgtgcgcgcgccgccgcgtcgtgctcacggccacgccccgcgtcatggcggagccgttcctcgtcgactgcctcggcgccgacgccgtcgcgggcaccgagctcgccacgtggcgcggccgcgccacgggcctcgtcgacgaccgccgcggcggcgtcctcgtcggccgccgcaaggcgcaggcgctcctcgacatgttcgccggcggcgacgtcccggacgtcggcctcggcgaccgccgctccgactacccgttcatgagcctctgcaaggtactttacaaatataatttaaccattcttttttggaagtaattacaattaatcctctccattaatttttactaccattctatcagcatccgtactgcaccggccgcatgtacgtacttaagtaattaaatctataataactggataattacagtgacttatcagtatcacactgatcacaccgggtaaccgtgcttttggaacagttttaaacaagagaactttttaaccaaattttacaaaacttattaaacgaatttcatgcattaccaagttgataactacttaaatctttatttgcatgcatactgtcattatcaatggcgacatgttgacaaactctcaacaggagcatgcatagccctcttataaaattcgcaaaaacaaaaaaaactactctgcatgatcttccatgctctatgatcatctccatcatgtaacacaattagttacatcaattctttaaaaaaaataaaatttaacaggtgaaatttttaggaaaaacaacacgattagtagaagtacatgctactgtgtgacatgccaaattaagatgcaaaatcagttgctggccggggtccgtacgagtgataagagggcaccactgcatgatgaatctggatggactggtgtggtaccgaatcgcattgcatctcgcatgtgttgtggcagcagctagatagttagaattggtactagcctttttttttcacatttcattttttttctcttttgtgcatgtgcaacaattaattggagatataggagtactgttggcactgtagtggctccagtatagagaggagatgaggaggaaattggttaaaaacaaagttgtgggtgtatagggttttaaaatccggggataattcacggagcgtgaaaaactggctttgagaaaagaagttgcgagtaggtttttagaaatctggggataattcacgaaacgtggaaaatggtgcaagagtcactcaattgttttggaattttctttgtgtttcttgatggttttcaaacatggccatctggaaatcactccatattattcagttctatgaaaatagtagtcagctagttcttgcgtgagagttttttagcccaaaatagctatctagcctcgtgacgaaaaataaaaataactttacaccacatatacacattaattagttagaaattgttgctcaacctacttgaattgagaagaaaaagatccggccgcagacaagaaatggaaggctttttcttttcgtgttgtccttgctgtacttatcaaatcatcacacataactaaacggctaattaattagcgatcgatcgatgggttcggttggctcacatcttcagctcagcaagtaaatttaagtgcgtgctggttaaggacccgacacgccgtctacccatatttattaattcaatctcatctacatctccagctcga

SEQ ID NO: 4774 - DNA, 14300 bp, Oryza sativa
cctcacatagtccatcacattttctatcacatagtgcaccacatacgtcatactactaacaaatagattaacttcatagttaatcacttcttctgttggcgccgaatagcttgcgagcccggagtgtacctacatttgaaaatccaatgtttaaaacatttaaaaacaaaatgagggaaatcaaataacatttgagaatggtaaactcatttacctctttttcgctgcctgagtggatcgcaagttgtattgggtgggttgcgtcccctgaggcgcatcgggaagctgcgacatgtctatctcctcagcgtctggtgcgacgtagtcctcatcctcctcgtcatcgtcgtcgctaggtggagccggcgccttcccctttcccctcccttgtggaatgcgtgacgacgacaaaccaccaacttcttcacgctcttctatcctgatggagtgtcgagcgatacttggacgacgaaccaccgtagtaaacacgaacaagtctatccatctacaccaaaaaatcaaatgtaactttacaactaaaattaaatcttccttcctaaacgtagtccaaaccgacatattataaccaatgtataacttaaattgtctcaaagctactactccacaaaaaaatatttaatccacctacaaatatcaacaagtttactagcgcattacacatcgaaatattacaaatactccgtcatacaacccaacctagttctaagtaactataattaatttctataatgcaaccaaaattttctccccttcatataattaatgagtaaaagtttaacctataggctatagcatcaagtccatcaaattaaaattactttcatgcctcaaccctaatttttcatctatccatctaaccaaaccatccaaaaataacattaccacatatatggttcaaaaaatcgtgacaccaatgagtacattgcaaacatgtagcactacaacaagctaatcccaagaacaaatgctaaaaatcacaaaatttgggctaaaaagaggttctagggttaccctccgatctacaaattcaaccaataaaaacgaaaaaaaaagaggggggaatggaggagtctacctttctcttcgatttccacaaaaaatcccgcgaaaaacgagttcaaatcgagtggatttgaggtggagaggtgagggggagagagagggagaagaacagcaagcagcggctcaggctaggactcaggcgaaaatgggagtggggaggagaaaggtggtggggcccacggggtttaagggcgcggcccacagaagaggggcgcgccagccatgctagcgccgtcgtatgaggggcgtcgccagggtggctggcgcccccttctgctcagtcagcatcgccacgacagctctagtgtcacggtggcacgggcgcggcgccatggtggctggcaccaccatgttggaggacggcgccagccactctggcgccccaaaaaggaccattcctggtttaagtttttccaggggtctatttgtaaaataaatttttaaaaatgatcaaaatgtaaaaattctacacgaggcagcaggacgtgacaaacggatcccgtgactccgtcggtgacgaggaaagccctcatggttactcttgtttttttatgctacacaaatcgttataagaggttgaagaaaaaaagatatcacaaacaaattatatctcaaatggtctacaaaagcttaactaattccaaaaacatgttttacaacatgatggtgtttcctaagaacattaatgttataaaaccagtcccaaaatcaacatcggtagctaaacgtgaaagaaacgccataggagatccaaacacgatgatgacaccgaggcatgatatttggtaaaggagttcagccgaggcctacatctccgaggcactgattacgggcgctcctcccggatccagcatattacagcgtatcagagttacaacgactcacggccggtcgccgctagcagctgctccctctcgctatgctaagtcaccatgcagttacaacaggtccacctctctatttaagagagatccaaggatagagtccgactcttactctattccaatttctaaactgtaaccgactatatacacatattcgacataaactctaacaattaaaataaaaaataagagtgaatggcaaattggactacatatcgtggactaaaaccacataaatttgcagtcttgcagattagaagggggcgagaaacattgcaccaaacccccaaattgacaactcaaatctacataatgtaaccaattcaatcaccatataagttagcaccccgttcctattctctatcttgtacttactatatttggcaactcaagccatataacacacataatttagaagaacaaatttgcatggtgttaagtgaaaaggatggttatgccctagttcaatgcgaaactatggttaaaatatctagcctaacgagcaaatcagtctaagaataaacaacttctccttttcacacaaacaacattttaaagtaattaatttcacgagaattaattaaactaacacgtatgaaaaaaccatgtgttctaaggccatggccaacgctccaagctagagcgtggtctagccctgcccgagggaaatattcatgccagctcggatgggaccgcaccctagcagaactacgcgacccacagcagagcgccgcgtttcgtcagagccgtagcgaggaaagcgtgaggaaccgcattgggaagaggcatcgccccgtgtcgttgccccacaccgggaaagaagatatggcgaggggatggatgggagagaatggcctacttgggaggctcaccgatccaccacctccgggcctgctacttggccaccctgagcaccgctacatcgatccgccgccacgttgatccccacctccgccgtcgattttctgtcgttatcacatcgatccccacctccagtacatctatctgtcgtccccgcatcgatcaacgccagggaggtagaggggagctcgagctcatcgccttcttggcggtggcgtcaaagagagggagggcagaagcggcgcagctgagaagggaaagctgacgggagaggtggtgtcgccgaggaaggggaagaggagaggcgaaagaagacagggagagggaaggtgtgggtctttatatatgtttgtgatatttaggggagcatactacaaatattgggcttatatgcgaatagaaaaacacaaggatttaaatgcaaaatatgaccgactaacaacgtccgaaacgcaaaagcaatatgaaactatggttggcactctattagggatatcacaagtgtggttttatcccatttttagcatcttctttcttatgggggctatggcttccaatggccaagcgaagctattcatacataaaaccttctcctgaagggatagcgaacgaggctttcttggcagataaccgcacaaaacctaccatcatacaacaggccactactgtcttgtgtcctcggaaaccggttcgtcccacggtacaccatcaccaactctttaattatttaggtatatacatctatcatttctataatatataacatgcattcattcacatatttcgtagcaaagcgcgggatatcaactagtctgcatatatggctcagacatgctaactagctaggcctggtccggaaagcccgtggccggtgcagttcaatatccagcctcatgttggccagctgcctctctctcatagcaaaccagctgatgaagagccttcaccaagcacaaaatgtggctgcctgtcctctccttgttggcatagaacaatgtctctatcttgctcaccctggaatctgcagaattattcgatcggcttctgataatattgcagtgaaagtcttgcacgtcgtcggcatcctccatcctggtccaaagaaacaaaataatgaagggatgttggacaagctatatctgccctttgtcttgcatgtattttgcatagtctaaactctattcagttttcatgcctaataggaagttggaatgccgtggaagaactgttattccttttttttgttttgctatttatcagttgccaggaaatttcttatttgtcagtcacctagaggtcctagaccaactgcagtttagacttgcacaaaatcttttaccaactttggtgcatcttttaatctggtatgttctttttttttaagagttcacccggatgcgtgtttttatatatgatgattttgctcactgtagttgcctgaattttttttcttggttgtcgttccactaaatttgtacggtgtgttgactaaacttgtatactcttggtacaacctttttgttcttttacagattaaattgctaatttgtgagttttggatgttgatctacttagaagagtgactaatgacaaaaaaaactgtcacttaacaaatactccctccgtcccaaattataagcctatattttttctacatggtcttcggtgacatactttgaccattaatttattccatgttatgtttccaacaaatataaaattagcatcagatgaaagtactttaaaatataaatctagtcccaaattataagcctatattttttctacatggtcttcagtgacatactttgaccattaatttattccatgttatgttcccaacaaatataaaattagcatcagatgaaaattagcatcagatgaaagtactttaaaatataaatctagtgatataacatacataatatttagcatatatatggttaatattattattcgtcaaaagttactgagcttgatttttttaaaaaagaagttgccctataatttgggactgagggagtagatggtcactctctaagtctatttgatgagcaccactgattggtggtatagccaccctaatcttgggctaattgaactgatggaagagacaagattaattcaaattaaatgattaaagctaaaccaaacaaagagttaaatgatgaacaacgaacttaagaaataaaaagaagtgaaactagttaggctataatgctctaccgtacctgttcatcgcctgttcgctagctccatcattgtaactaggtcgtaccccccgcggcctttgccgcggacccaataaaaagcataaaaaaactaaaggatgaagagacatcaacaaatacaatacaatattttggtaaaataagaattgtgtggataatctaaacattgcaaacgtataggagtaaaagatagcaaattagatgtgcctgaagccctgaacattgctaatagcatattagtttactaatgcatacggcgtgtcaataatattggcaaatgaacaggaactgcagcatctcaatacacacattaacaaatacggtacatcataggcataagaacatcatcaaagaccaagtgtgtgcatattggtggtagcatatacaacctaatgattttgcatagtgcattacatatagaggtacgcacaacaacaaacatggaaaagtttgtagcattgtaactgaatgaaggaaaggaaatgataatggtcagcctctgggtttggttgtcgtttgcaactttgcatcgatagtagactaccaggataacaacaaatagatggcaccaataaacaacttgatcaacctgcatgaacatatgagaaaagggaatcaagtagaatgccatgatattactgccaaataatcaaaaaagaatgtgttcggttgtgtttgaaaaaaaaaagtaatatgataaaattaaagttgcaagtcttggcaaagtaaaacaacagaagctgttttgaactatactgagctcagtatacatacataattatccgtaatctgtttcagtgagctgaaaataaaatgagtaaatagcacatactatagtgtgctttaagaagtaaaaaacaataggactaccttttttgtgtgtgtttgtgtatgtggagacacaactatttaactgaatgtattttttttttcatttacagcagtaagcaatttagaggaagggaaaaaatatatgcatcaatatttcctgtatttcgtgccatccaatgcagagtttgagaccatatgacatgagggtacacaaaaatgatgaacccatgtatatccaagggaagatcaacaaataataactttaaaagaaaattacctttgtatttaggtgaagaactgcacactacagtgggaacatacaaccacacggaagaagcataacacatcatatatctctcaatttgatgattttgggcaccatgcactacaatctggaaatagtgaaatatatagatgttagaccaatcgatgcaagatataaacatagaaacatagcgatgagaatacctggtaaaattaagcacgttgattcgcgatatcgctgaatatttcagtatacacgacattatgtgggatgaagcaatattatcgaattagtcctcaacgctgaattagtcctcaaagcaatattatcaaattagccctcaaccaccaattttgacatggaagccatcaccacatgtaattgcagatagtagcctcacatcacagctagcggcaactgcaggaaacagatcaagcaatcagggtcaggcagagcaaaaccacagagaaaaaaaaacagggaaaattagagtgggatgcttaatttcttaacctttacagatctctatgaattgaacagggattgggtactcaggtctgatatagggggcattcatggcggaaagacttcatggtacataaagaaaagtaacactacaaaatatagaacaaaggctaacaaatttatgacacattggttgttagctcacctcttatttgttttgcctaatatagcggcctttccctcacgttttgactcacaaagaatatattcgacaggacatggacatgatgttaaggctatgcactcacccaaatcgaactggttcttaacactattctcatgcactgatgtctggtctgacctagatggatttaaaggaaacatgaataattcaagagatagaaggaaatacatggatagtagcagcacacacagctagagtcatagaagctagcaggcagtacctctgaacccccaacccctgggaaaaaaagagcacaaattacagatgcaaccaatgggtggaaacgatcctcctaacacaccatcggatgttctatattttgtatcttgcttttgcagaacttccattgatagtctaatttaaattgggcaacaaaataatctgtcacaacattgatatataagtccattccaatttgagctaaattttatatgtaataatgaaaaacagcatatacaactattttgcatcataactcataaatttaggtgcagtccaaacatgaatttcttgatcttagtttagttctcttggaaactactgcacaatgtagccctcgagcttcggaggcctgaatctccaccaggtgtcctctaaaaaatgtgactactacataacattggtttaactaaatggaagcaggtcagcagcaggctgagtggaggagacgcagggaacctggtgtagcagcaacactacatgactgcaaacaacaatgacggggaagaactacatgactgcaaacaacaataacgggaagaaataggtcaggtgcaggaaggagaggattgaaggaggattaccacggattgggctctcctggaggagcctgagatagctggagctgcagcaatggctacgacgacccgatctttggatcggttgtggggggaatcgaacttgaagggacaataaaaatagcttggagggactatgaaggatcttctagaagtttcaatgtggggaggagcttcgagggtggccaggagtcgggctcagatcggcagcggcggcgaccatctcgtcccggtgacgaaggcagcttgcccagtatatcgtagctgttgcaaccgccaccgccgtcatcgccgtcagatccaccacgggaagccgttgccgcgggtggatcgggccgggggaaaccgccggcaccgtcgtcgccgtcggatccaccgcgggaagcggccggcgccatcggtgccgcggcactccacccctctctcttgttttccgctggtgccttcatcgtcttcgcgccgggtcggtgagacaggagggagaggaggagagggactggcgacgccggtgaggggaaggcgcggcgtgattacggctagggtttcgatggacggccaaaacaactcgcggaaggatcggacggccaaaattagagtgaacagtggaacagtgccaggctgcgcaacaccgagccgtacctcaccgaaaactagagttttttttttctatcaaaaaaaaagaaaactagagtttttatagatacaatctggtaatcacggagaacaaggaaaaggcttattgaacataccacccattttagaaaatactttgaggcaagtcaacaaatatatcagagcaagcaacgtagctgggataagattgttacgaaacgcattgtccaacaaaatcataattgtgatagaaatacaatacaattaacaacccttgttgtggcattgcttaatgttatttgtcattatgagtttggattgaggcataagtttttgtagacatttaagttttcagaaacatctgctactgaaataagaaattacaagttaattctccacgtgtcatgcattacttagttgacaaaacagtccatattgtcagtatggcagattctacattcattttctagatttctctatttgtattgtgttcttgtccatgtgtgtttgtcaccattagatgcaaattgaacagtacagattgagattgagatgatattctaatcatgtgctgatgcacctttatttttgctcatttatacaggatgaaggaggaactaataattcatatgaaaacatggctagatacatgtaatatttagaactctcttcctttgtacattctattatccactcgttcttgtacataaccttctatgcttcttaatttatatgatcatctttaatagttaatattaccttgtggattcagcaattggcacaagccattgcaacattctattcatttcagctctgacctcttcttcagatgtctacgataaaatattagtactgagatcaaatttgaaatagatgaatactgtatgatatttctcatgttgagttgttgtaaaagagagactaccttatctatggacaaaaacggcttcaactttctataaaatactaatttgatgcaaggaggaagcatttggtataatgcatctttagcttccttaggaacagacttcaagactgagggatcggttttctcaaaggccaatgcctgaaaacaatgaagtcataaaaaaatataggacaaggcataatctaaagaaagaacaatgtcaatatctgaccattaagtggtaatttaatatcatttttcatgttgaagatggcatagcaccagagaaacagtgatgtaccagtttatttatctgcaaaataacttttgaatattgcaaggcaagtccagtggaacctaacgtttccccaagcaggttgcccactgcctctacataatggtcttcaccagtatgcaaaaaaactttgttgatctccaaataaatgagcagcacaatgtctacaagtttttgtacaatctgcaacagaacatatggagcattattgtaagatatggatcagatagaacaaatattgatgacatatcaagatgttgcactacatcatccatcttcttggaccaaagtgacttcttctgcaggtttgccacagcaatcctttggttcttcactgaactaattgttatacctgcatacggcagcggttttattgaaaccggcaagagaatattcacattaaatttgtatcttatttggatgcctatgtcaaaaatttaatacaaagttacaaaccactttgtaccactgtaggtttcccctgttcgaacttgtccaacacacacatttccttatacagttcctggcaattaatagaatgagagaacagaaaaggcaacaagatttcaaaaagacaattatcatgaattagagagtatgaatcactgaccatggtgtattgtgcacgttttaatagatattgcattgcagaaactgcttcttctttgctgcatgccagttctgattccaaaataacgtattctcgagatttgtaaagtagctctaatctacattgacaagaagagcaaaaagggatacatgaatggagatgaatcaatgagctccactataaattagctggtaaaaattcatggtaaaaagttgtatttgcagggtcaaagtagcagaagaacattatgttttgtttacttgttaaaataaagatccaagttgcgccatacaggatctttgcacagctttccaagcctaataacatctaaagcaaatcttctcaactgttctctgcatagtttgcagtaaatatatatataagtaatcttggaaagttcatctacaaaacatccacatgaaaatgcatagcttaccttatgtcagcttgatgaataatgagcaattgatagtactgttctgaaatcagagtgcggacaccttcacactgaagcacaacttcattcagatgactcacactttcttcagagagggatttcataaggtttgatccactgacaattgtgttggccacctcaaaggccaggatacctatttttctttctccagaagcagcaccatcagatttcatcatatttgagcccctgacaagtattttggctactccaaaggccatgatctctatcatacttcttcttgcaggaacacaggacacggcggcggtgctttcggtgttcgaagtagatgatctagcccccagcatgctgtcaacataggttgcagcaatgacctgctttgcagtgtttgaggtcgatagtccagtccttgctatggttaaatcatctaataagtttgcagatttcatggtgaacatttgtagtgcctgtatgacaaagatgtgtcatacttagggatcatgatttttctatatgaagtataatgtgattggagaagagtaaattacatgcatgaactccagttgggaatgcagattttatttgtatgttattgttcaaaatcaaggtgctggagtcattgaatgacagttgtacaggcacataggaaatttccaaaggaagtaaaagaggcacttcaatccataaaatattacaaattaaataaatattttaattttacttttaaaatacttgctaatgcattagaatcttttgaccgatagaaagttatattgaaccaaatggtgcatgcaccagcacaaaaaatttgcatatatattcactccaaatttcctatataatttattgatgtagattataccagcaatttgcacttccgaatttgtgtgaagatgataatatgtgtgtaaatataatagtatactgagacagactacattttatattatgatgccactgtctattttgtaatttacaggaaatatcatatatgacaaatttatagacattttaccatgtgttctaacatatcctctattgaaaaattcgatggaaatcgttatgtgttaagtgtaaactatagataccgatgcatgacactcgcattataaaattttatagtttattttacaattgcacattactttttatagtgctctagtaactaacatattctaatggtcaaactcctatgttcaaataatctgcgataacaagtactccctacccaaaataaatcaacttttgtacacaaatctgggcatagctatagttttgtacactatgtaatcaacttttgtacatgaatctggacatagctatgtccagattcgtttacaaaagttgatttattttgggacagggcatattatacaaaatatgagcgccaaaaaccatattgtttctattttcatataaactaaaagaacatccaatcctaccatatgattagtttgatttggagttcctgtggacattctatctttacagaaactgaaattataatcatccattcccaacataatatgatgagctctgttctgtgcagagttcctgtggatagtctcttatgtttccatgggctctaaaactagctctatgtaacaaaaagaacgcttgttctacacctaaatgtttttgtagataatggaagataacatccaggatctgcatcacacaaccattctatacctagttttagcacaaggaattatgatagagcatgggatgagtaatcttacctggcctacatgtgaccaatttttacactctgtttcgttaagcttttggattacatttcaagcactaggccttttctttgggtcaggatcaacacaagcgagtcctatctccatgcatgtgtatatttgttggcaacaagtcttcattgatgtgcatcccactgttcgttccaaccaatccctccaattcttaactacctaacaaattttcatagtgagaaattatgaaaacactagcttaaaattaaattcatcttacatcctctatgaaatgctggaaagattctctggtgcatatccgaggataattcctgtgtcctgttataacctcgatgattatcactcccaaactgaatatatcagatttggttgagattaatccattggccaagtattccggtgccatatatccactacatcataacatggaagttaattagaaatgatacaagaactaaacattgcagtatgtacttgacaaacttatgtagcagtagcttacagtgttccctcacgacttccagtgataatccgtgattgttcatggccgaaaagccttgacataccaaaatccgcaatttttgggcccatatcgtcatccatcaatatattttcaggtttaagatccaaatgaataatatggcattcctcatgaatgtattgcaagccctaggaaattcccctgattattttgtatctcatgtgccacccaagtccataggattcagctataaaagtatatcaaagcacacgcacaagcatacaatcatgtaagaataagatcacccaacacttgtattttcaacaatgccacaatatttataatctaaagtgataagcatgaaaagagagataaaaatcattattgtaccagaaatatacttatcaaggctcttgttatgtagatactcgaaacaaagcaaccgtcttggcatttcaaccatgacatatttcttgccattcacttgcaacacttcccaccgtgattcagcacagtagcctgtaaatcgtactatgttcgggtgcttgagatccataaggaatgtaacctcgttctgaaatttatcatctttcaacatgtgtatctcgaggagcttcttcacagcgatcatttttccattgctaagaattccctgtttatataaattgtctttcaaatcttttttttatagagaaggaatgtaacctccttctgaaatttatcatctttcaatgtgtatcttgaggagcttcttcacaacgatcatttttccattgctaagaataccctgtttatataaattgtctttcaaatcttttttttaaagagaagggtatttttttacccggcctctgcatccaactggatatatgcagccttttttaaattaggaacttagccctcaattaacccaatctgaaattcgctcctatgaagatttgaactcaggaccttagggtgttactcaggtcactgcaaccactaggctacatgcctggtaatacttggggtctgtttggttccattgcccagctagcctagctgggtaagggcaagccaactcgttgccagcttgccaggcttgccatataccctttgtttggttggtgtgctttctatggcaagaattagtggctagccgtttggttgcttcaacgaatcatctttctctttagagtattttgtgccgcttcttttcatattgagaaaaataatattgcacacagatcaaatttttttaacttatggctttgtcacaagaacactacagattcttccacagttaacttggccacaagaataatacggatagaagtagtaaaaagggcaaagctatatgctaaaagaattccttgaaacaatcaaacatctttttgaactactttattacaagttcgaaccaaagcatatcaattatttaaataatatctaaagtgcatgtttcattcttaaactatttagcttgaatgcatagtaattattcaaacatctcagcaaagaaattacatagcagctggatagttttgtattatccattgggtcacatattccttaat

SEQ ID NO: 4775 - DNA, 18053 bp, Oryza sativa
  unsure (1)..(18053): unsure at all n locations
cagccactctggcgccccaaaaaggaccattttcggtttaagtttttctaggggtctatttgtaaaataagttttcaaaaaggaccaaaatataaaaattccaggttgcctcgtaactgttggttgatttttattatctaatgccggttagttgggataagaataaaatcttactggtttcctttcctaacaagaatcaataagagataaagtctatttttgtgtgatcggtacaaaaacacattcagattctaattagagataaagccattgagtcccaccagtgtcctatataagaaagagtagagaaaatagaggtgacaactgaactctctctaaccctaaaaccctaaatcaattcgtccgatcgattttgaaccctaaaaccctaaatcaattcgtccgatcgattttgacattggaaggggttcgtgagagtttccttttcgtcaaccggagagcgtagcagaagaggagtgaaggagaaaagcaaaggaataacatcaaaaccacataccggtttcaatggcttcattctcaagccagttagatcgcccatgtaattaagcagaggtgattatgtttagactaagactcaaagtaattaagaagattaaactccaacagtaaccaactccatttcctcgcccctgtcgtcaaccctgccaataagcaggttagcacttaggccctgtttctttcggtttgagattattataatctagattattgagtcagattactataagctagattgttataatctgtagtagaataagcggttagttgtttctttcctagattattagagcctaaattattgggtttgcaagtctaaagagagagtggggtggtatggtgggtaatttttcactcaataatctggaaaaagctcacctaaatgagcttatcagattataataagttgggctccagattataataagctacttcaataagttgtatgtttctttcagtttactcttagtaatctggattataataatcccaaactgaaagaaaaaaggccttagcaccctcggctactatgcctcgtcgttgcaccgccaagaacagcaacaggtgatggagagagatgaaggttgaagaaaatacaagagacgttggatatcaaaccaatggtgagattcaatcgactatctccttcaatcgtctgataaataggaaagccgtacaaataatcactaaataggaagaaaactaactaaacaacccccctcctctcttaaaaaaaacagtgcaagtttgttcgcccccaaaagaaaaaggaaagaaagagaggaaaatttgtaccgctgcataattaatgtgaaaaaaaaagaaaaaaaataaattttacagactcaagtgtgtaaccctcttactcatactggttgttcttgtgaatccagtagtacaggcatatgtacaacaaaggtgcatgattgcatcccagggcctcacttaataagtacaagaaacaaacaaacaaaaaaaaaacagagaaaaaacaaaaaattacactcacctagctaactaagcaattatatgccacacttgctgctgatggtgattaaaagctccaggttgatccaccgggttaactaataattaattaaaccacccaagctaatcactaattaggagacagtaattaattaaaaaaacattctgtccgtgacgtcacttcttcttggcgatagcgccgccgccgccgtcgtagcggcggctgctgctgccgccgccgccgccgctcctcacctcctccggcgcgatgaacgactccgggcagaggccggcgacgttgaaggcgacgtcgtcgatggtccacgcctcctccatccgcgtgacggcgcgggcggcgccgacgtcggcgccgaagcgggcgaggtgggcgacggaggtgcccgcgtgcgccaccacggcgccgtcggcggcgcggtagtcgccgaggcgggaggagacggtggtctcccagtacatcgccggcgcgccgggggtctggatgcgggtgagctgcgagtcgtcgaggcgggcgaggaggccgctccgctggctgaagtagcccgtcatgccgtgccggatcacctccgccgcgccgtcgccccaggcggagagcaccgacggcgccacgtcgagccgcagcgcgaagcagtcctcgccgtcgacggccttctcgccgacgtgctccgccgccgagaacaccgacgcgatcgtcaccgggtccagcccctgcacatgcacagccatgcacacatgtacgatcgtcagcaccgacacttcatcggcatgcacacgtggacgcttctcattggtgcagatgcattgtctatattctactcaatccatcctaaaatataagtaattatgcttcagattcatttcagattcatagtaataagatatttcattcaaccaaaatctttaggacactgacgtgtctacgatttttctatgggtggtccaaattatatatatttttcaaataacctaaatataacaaagttaaaagtataaatggatcaaatgtacattataatatattaaatatgagctctttttttttctcaaaagttttcttttcacatatatgtatatttatgcattgggctaggatttttttagtggtcgtatgaccaccgggatcatcctctagatccgcctatgctttaggatggagagagtatccgtttcatattattataagatcttttagttttattccaaagtcaaattttcttactttcaccaaaattatagaaaatgcactaattgttcaccattgcattgcattattttgctcctatttttcctgtagttttaaaattttgttaggtaaactcattgatggggcatcaattttgtttcataattaaagatataaaggctcatggcatggcctttttattagacatctagacagattcattactgtggtacagtgttcatataggatgccattgagccctatgaggatgaaaggtgcttggtagtagcatctttttggagtcctatgtcctagaactgttgttattgagaaaaggttgatgtccttatgctgttccaaggacatctctgctctcttatggatgtaaatatgagccataaattcagaggcaagaacatgcaggtgcagtgtattttattgtgccatgggagacaaaaaagaatgctgtgtgaaatagaaagccagtacacttgtatgttgtatcaaacacatcatgcccaaagctcctctcttttcacagtacaaaaacagctaagacactctaggatgcccactgatatctgttcagcagtattcactatagtacagagcatccagcataggatactgttgagagtaacccccatccagtttcatttcacacacttttgccagagagatttggtgaagtttggtgtgttggcaattatacagcatgaccagcatgcagtgctgtgtgattatgtactaaattagtactaacctgacatggggactatgatgtgttccatctccattgttgatctgggtcagctaatcaattgccagaaaggtacatctcttaatgatacaccatgcatgtaaatgatcccagttattctgatagtctgattgggtttcagaaagactaagcaaactgtttcagtgtctataaggaaaataacatggatgcagactctcactcaaagtggtttaacatgatgtcccatgttcaacagaagcttaactttctttgccatgctgatgtgaggcagcttacaaaaagtctaaatcaattgacctaatagaccaaattggtgtaacactcaggacagatacacctacttagatacgcactgctgcatcctaaaaatatttaaaactatttgataacatgaagattttcagaaatcagaatgcatgagtggcagtgcatccaattttcctactgccaagctgttaaagctgtactagccaatcatagtagctagagatttcaaaggacaggtcagtggcctaaccataatcataatccatgctcttttatttggtcctcctatgaggaccggataaaatggtttttcaactagctatctcagcagttgctagaatatccagatatatattaaaaacagtactagtcgatcggctaatggtatgttcagatatcttggttaactttcaccaaagaagaatgatactactacttggcactagagtatcatcaatttcagacacagatttatactagcctcagtttgccaaattgctcaagatatatgcctcaaaagccaatcttgtaaacagacgagtgctacttagaaggaagcaaagtctgcggactctgcatcctcacagaaagtttttttcaagagtatctcaagagtgatctgaatttttttttcaggaaatgaggggcagcagcctcagatcccgaggtgaaacagtggaaatgaaagaatgccatatctgcacctttattttcagccaaagattcttctttcacaaatgctccccaattcttcaccctctttttttgcgaaataatactcccacacacccagcacacaaattaaagcacaaaaggcaaaggcgaattcagcaaagcgatccacaaaaagaaaagcagcgatttctacgtacacgctcatacacctctcacattgcttttgggtagcttcccagtgtactccgacatacataaatttcagcttaaatttttgtctagagatacttgttatttctcattcaaaatggtttaaatgttttaaatatatatacatgctcacattttttaggataaaggaagaaacttttattgttgaacttggacaattatatcaaggcaacatctacataactaagcatacagccaaacctattcgcatcgttctccgaaaaagagtttacatcattgataaaggaataggtttccaaagataagatcacctaatgtatgtctgtatgtgcttgcaaaattatcaggtattttggtcactttttttataaaaaaaatgacatgtttttttttttgacacattggtaatttctattcgccattcgaacaaaggccccatgtatatatttgaagaatacacatgaagtactcctatttattttcttatgaattcctttgtacgttacgtatgcttgtacgtacaaaatgtatgcgtacgatttttttttttcgttttgatttctttcggtttagacatttataagtctagattgcaatgcaaactaatgcaaaactaattatttttttgcctaaactgaattttaatcggattagaggaggagctaatcagaatggccaaatggcagggacatgcggggtgccaacctggagggctcgccggagaggtctcgcgccgccgccgcgcgcggcgtgggcgtcgagccagggcgtgcggcgccacgcgacgcggccgtcgcagccggcggcgacggcgtgcccggccacggccatctcgacgagccacatgtccggcacgagctgccacactacgaagcacccctcgtgcccgcctccgccgccgccgccgatgccgatgccgccgccgggctccggcgccatggccatccgcaccctccccgccgcgtacatgctcttcgccgcgccctcgatcttggcgcaccccgtcgtcgcccggaactgctcgaggatgtactgcgccgacgacgccacctgcacgacacgacacacacgcacgacgtcgtgagcgcgcgtagcacgaagaggaagtccggcagagcgagacgcggcggcggcgacggcgagacgtacgttgcgcgggtggcgcgggaggacggggacgggggagagcgggcaggcgaggacggagaggagcacgcggaggtcgggggaggggcgtgcgtctccgccggcgacgccacgccttcgccacctcccccaccgaaagaaaccggagcgggatgcgcgcccgcgcccagcggtggagcgccgcgtgcaggccggtcttccaccgcgcccgcgctgcttcctccccgccccccggctcctccgccagcgtggccagctgcggcgccatggacgaacaccttcgttgcctcagctcagctcagctcatcacttgtgttaaaaaggagggaagagaagagacaagggggagtttgacagtgtctggatggtgggcccgggggaggttgggttgtggggcccactggcagggagggtgtgactgtatgcctggaaggtggggcccagggctttgggagagctttgaagggaggcaagaggattgagggggtcgggggagggtctaaatcttgggtgtgagaaattggagctattttagcactaaatgctggtatgggataaaacattttgatcatgttttttttcctactatttcaacatcgattttttacggctaactattctttggtatgtcatgtacctgctgaaaacaaagcgcttatagcaagttcgtcaatctattgatatgctggcccaatcttttagagaggcttataagggtaggaataggatgtatgaaagtatgtttgtggggtgagtgtgcatgtatttatataaacgtttgtgtttgtgcttttttttaaaaaaaaagaaaatatacaccagaaaagaatttcttaataatttcatattatttatgtatgcaaattcaatgttcaaagttttaatgacagtgcatgtttgcggataggggtaaaaatatttttaaacacaaaaataaaaacagtgtacaatctaagacaagggagaagcctaagaagaacagtggatttgacagatcaaaactaattaagcatgaagtccatgaagaataatgagcaacatgacatttcggtttagcaacaagaacttgctgttggtgtggtaacccatcctggggtgatctgatggccacctgacctggagattacatattgccaaatcgttgatgattcctctcaaatcatggcattttcagaatgatctcatcttctgaattgaaggccccatcacgattcccaactactgcattgcattacatggcatttcagggccttttatttttctttttattcagatgatggcgacactgcaactctttttcgtagctcatgtgtagtgtatgtgagatggagaatgaagaggagggtattgagggtgacatggcaaccagatgtgtaataccttacctactactagtattgtttcctctgtatttagcatgcattggtagggttttttttttgtactggagaagaagaatccaagctttgatctttttgcattgtgatatttcagaacagtattgaaaaaaaagacttttagaaccttgagctttcttttcttgtttttggaaccaacttgagccatggagatcaagacctgaagatgaaaagaatgacaacttaccatctgagttttgagctataggtgttgaagattgatcttgtcaggaaaagaactttcagagttacattccaggagttagtgtaaatgttaagcttctgtaaaacaattagctgtcttatttaacagctgagttatgaccttagtaacaggatttactgccatgttaattcatgggtcctcctgctctgctatgttagtagtatatatctatgactgcttcaagacccttttctgtggcatttatcatgatcctgtggacctcaagtacctcactggcaagtcaatccagacctttatttccccagcttttctggttcccaatgattttaagctatttgatccgtgcactgatcacatctgcatagttatgtcagtattaaaaaccatggcttcactgttgctgaacccctgatgcatactcgttcgtttcaaaatatagctatttcttaaaaaaaaaaattcacggagattaacaagataggtaaaaagactaggttatcctttattaattatcccagatggtgggatgtgggtgggggttatggaaatgaatagtattttgaatatttcatcactataaatacctattagtagtttataagtagttatattttaaaacaaaatttgaacgctagaatatattttaggaccgagtgagtgagtatataatagctgcatgctttactgctggtcatagtgtgccccagcaattatcatttaactgatggatgcctttattttgttcagtcacagaactctcatggacttttttttttctgtattggtattcttgctgtatatccatccaattcaatacggaacaagggtcaagattaggatagaatactttctgattcattacaggaagaagaagaattaaaaaaagactagtagttgtagcttgcaggcttatccaggaaggatttaggagacagggatattttcaactacttgcattgcatactaagcaaagagagagaatatcagtttaagggttactgtcacaactgatggctgggttgctgtcacttgagccctctcatgtactgaaatgaagccacatggccaaactgttaatgaggttgtttttcatatgatatgatttcttttataggttcagaactatgataacagtcttacaggtggctgtcattttcattatgcaaccagtgtttgttggcaggagaataaaagtcctagattgcattgaacacactaatccatttacttgagaaatgtgaatttctgaaaaaaaaatgatatgcattcagtctcactgaacagaagaagaatttatatatagatgatcaaatcaagcatctattcttatgttcataatagcctcatcatcaggatagcactgtagttggatttctctgttatcatcactttgacctgacattgtaacagtacacttccaaatttgagtgtcagacatctctttccctgatgctattttaagctggaaaaattattttggctaaacctccaaaagcatctgttggagctgacatgataagccacttctttttatgagcattgccatgctaatgaatgaattaattgttcctaaatttgtgacctcctgcatcgatttattttgtgtagttatgatgtgccactttcggttattcactctctcaagcaacccatagctgtctaattgctgtccttgaattaacctctggaaaaaaaaggacaaggattagagacagcattagaaaggtagtctctgcttcttctgaaaagacaaaggaaagggacaatactaactctgtagaattactgcttccatgcttgtctgatcatggccactcattttgtttaacttctaagcaattatgcaagctaatgttttcagactcaatgtcacattttattttccttgacaaaggaaagtagaaatttttcacctgctgaaacaacctttttagaacaggcaggatgtaaaatctacatattttggagatatctttacttgcaaaaagtccaatcaacaaatgtcctagttgtgaaaaagaatagataaactcttcagcagaattggaagctgggatgctgacctggaaagagtttgagacaatttcactagggaatatttccttcaaaaaagaatttgagacttatttccttatataacttgttcaatgatcaagtactacaaattagacaagaaaaaataaataaatagctacaaagttttaagaggtcatctttgtgtaggcctcaaattatggcccaacaggtaacaagcggggtgcctgagaagacttgaaaattgaaacttatttaatgggctgaggtgagatccaagcccaactcaatttcacacaatttgatgtagccaagagatgaaattgtcagcccagtaaccatagctgaaaaagatgtgttgtttggatggcacaaacaaagttgaacaaatttatgcagcatggattttttttcccatttagttaagcctaaataatcaatccaccaaagctgaaaccacaaactgcaatctgaactagtcatttcagaaaaaacagtaatctaacatgcactctgaacctagtcacttcaaatcaaagggttaacatcttggcccttttgttagctcgcccaagctgaagttctaatctaacatggtaatgacacctgagttttgttagggcctgtacatattggagaattatcactgttcctgtgaaatacctgtcttcttgcaggcagcattttcttcagggcagggattcagtccatccctatgaaggtcgaactgacacatatcatgagtcatgaccgagatgtgttccagttcatttttatcttaatgaatgaatggattatggttatctgattttgtggtaatattttagaggaaaaaacgaataaattaactattgctgtttaaaaaggttgttataattaaaatactattctatgaaacgtaacttatatatagaacttctgaaaaatcaaaccatttaaaactttggaaaacatgctcatcataatctatctagtatatgtatatatggccacctatttttatgtcaagctaactccatgcagcatccgagccaagagctctgagacggtgagacctgcaggaccaagggtagctaaaataagcgaactgagcgtagctggtaaggtactttgtgttggctgcttactcctagacttatgtggatgtttgtatttacggataattattttttcagtggtaagtgacgtacctgttaacagtgagacacgtgctaattttgtctatcttaatatatgttggcccggttttcgaatgtgctcatagagataaggtatgtgtttcgcaaaaaaaatatatatatattaggaaagttatttgtgccatcgtaaccaactccagcaagtcttgtaaacaaacccctcaaacaatttttagggctagggaaaaaatgaaatcgagcctagagctctaaaatcggaaagcccctggcgctatatcctaccgtacatacccccaattcccaaggctctagaccacagcccccattctccgtttattcacgcgggaggaaatttatggtctcgtgcctcccactcttcttcaccccatgcgagagccaccacactgtaggccctatctagccagtggcgtccctggcttgccccgtgactccgctgccccgagcttggccaccgatgcctgctccgattgaggctgctgcctccctgccctactttagtggccacttcaccacccctccttttatttgtccgtgcgccaccaaaaaaatggattgggtgtaccgctgatggatctggagatccccatgccatgatgccagtcctcaccttttggatgtccctaagcacccctaacgtcacaccatcatctccattcccgagttggaaccctagcagaaaccagaatatcgtgttgccacctcttgcacttgatgacctcggtgatggcgtaccacgctcctcacccagaacccctaccttctccatatggcactgtcctagcaatcgctcatcgttcgacaattccgcttcgctgccatgcgtatcgtggttaccgtgccagcatcacataacgtgcatgtcacgctacttggacttgtgtcgctgacgtggggatcctaggaaataagggtggtttcttggatttggtggagtcactttggccctcaagaaattggggtagacccctatttatcttttaggactgtaaaatagggctatttatggagattcttagagttgccaaatcacatatactctctctctctccatgatgtcaagaaactaataggaaataggtaaggggtccataatgattccataaagccacagggcaggcaccgaaatggggcttatattagcagggactaagaaataaacgttgtctactgaaattggatactgaaattggatgcctcttagaggtcttaggaaatagggacggccctcatttagtatttggggctacaaaatactagtgactattgctgaatatgctcatattattatatcgctctctcttttcaccatcatctcaagaaactagtaggagctagataacggatcataaatgatgaattcataaatccacaaaaggcaggcaccgaaatggagcctatatggctatatattactgcccatggctcaccatcacaatcaccagccagtcaggcacagtcatcagccgtgtagatgaaatggagagtatgcaaatcaccagtcgccctcatagatcacacccatgtctcatctcatcctcatcatcttgcagatgcaaatgtatctagcatcgatcctagctagctaattaacctaatcttcctccccaatgaacttgcacacactgcagtagcatcagtgatcagtgatcgatcagcttctgctgggcccctgcatatgtctgtctttgaggtagccaacgcggttacacttttactagcaccaacaacccaagaacgaactgcgaccggatgcttcgtttcagtgctagctattagcttcactcgatcgtcgtccagccagctgtggctagctcactctcacttgatcatcaggagtcaatattactcaaccttcagttcagcgtgtgcaggtaggtagggtcgatcagcctagctataacgatgtggcatgcattattaggcctcgtttagttcccaaaacaaacatttttcacccatcacatcgagtgtttggacatatacatgaaatattaaatgtggaaaaaaaataattacacagtttgcgtgtaaattgtaagtttgcgtgtaaattgtaagatgaatcttttaagcttaattgtgccatgatttgacaatatggtgctacagtaaatgtttgctaatgatagattaattaggcttaataaattttaattttataacggaatctgtaatttgttttgttattaaataatatattttatacttcaaattccgatgtgataccccaaaacaaaaacttttgggaactaaaccgggccttattcatcggtgatcgatgcaatgcaagatctctagcttgatcacccccactacccaactaataatgcatttcgatttgatggttccctatatggacgatggattatctgattttgcgataatatttgagggtgcaaataaccaagttaacaattatagagttgaaaagttgttcttaaatgctattctacgaaacttacacatagacaaactttttgcagaaatcaaactattttagagagcttgaaaaacgtaccgtacgtgataatttatagtaatctgtaaaagtaaaagaatgtatccctcttcgctacaccttattcacatcttgtacaaacaaagctataaactgcataataacaaaaattctagtacatgtgtgtcaacatataggatatcccatctgttcaggaatatttgtctgttttgaacgagagtagatggactttgacaattatccctttaagcaacttctaagaaaataggtttaaatgtaatacgttggtaaagaactttaaattacgaatatattgatacaactttgctgctaaatttctctattatttaaaagaaattattttttgttaaaactagacaactcatattcgaacaattattttaaaagtaaagtgtaaatcttttttggatacggcacagtttaggccaaagataggtgacagatgcaacagaaaatactttttaggatgagatttttgcgcttctactcggagtgatccaaaagccactaagtacagatccttccatctgtgacggcccataacaagactggaatttgcgggccgtcacaaggaagtaatctcaatcgggccgaagtttcgcccgattgagatatggtcgcacagccatggtatatcggcataaaactaaagctcatcatggatgacacttatctgtgacaggctatagttgagacccgattgagacgagggttccatatctcaatcgggccctaaaagaagcccgtcacagatgagggtcatctgtgacgggctccaactagaggcccgattgagataagtttattgcccgtcacagatgacactcttttttgacggcattttattaaggcccgatagagattacttgtatgctcgtcacggttgattgttttagggccgttacagatatttgttgcacagtataaataccccccaccacctagtgtaactgtatcccactgttcactattttggtgggaggctgtagggggcgattttttgtcctttttccaaggaaaacagaaattaaattcccaaaagtgatcaaaatggatcaatcaagtgagtaatataaatcattaattgagcaatttcatcatgtcttacttttgcaatactgatcttataatatgtgcctctaatttgttttttttttgtagcaattgatcgaagttggatgtatgccaaaaatttgaaacgtcattctacgaagtaccgaaagggcgtaataaattttatgaatgccgcggaggaggatcggataagaagaaacagtgattacatgtgttgtccatgtgcagattgcaagaacgagaatatgtttgatagcggagaggacgtacacggacatctgatacaacgaggattcatggagggctatacatgttgggtgaagcatggagagcaagaatcaggaagtggagcagcagcagacagaagtggtgcgcataatcaggaagatgaaaatgagcatgacatgtttataccttctccattgggcggtgaaatggttgatgtggatcacgatctgctgcaagacatgttacgtgacgttgaggacctagcccagaatgagagagatggaatgaaattcagcaggttggtaagtgattccgagacgcctttgtacgctggatgcaaagcaaaacacactaaattgtcagttaccttggacctaatgaagctgaaggcaagtagtggatggacagacaagagtttcacagatcttttaggaattttgaaggctatgcttcctgttgagaacacattgcccgagacgacatacgaagcaaagcaagttctgtgtccattggggttagaggtccgtagaattcacgcttgtcccaatgactgcatattgtaccacaagcaatatgcggacttggatgcttgtcctgtctgcaaggcttctcgatacaagcgaaagaaaagtgctgacgaaggaaataagtcaaagaggggtggtccggcaaaggttgtgtggtatctacctatcattgatcgtttcaagagaatctttgccaacccgaacgaagcgaagttagtacgttggcacgccacggaaagaaggaatgatggtatgcttagacacccagcggattcgattgaatggaggaatatagatcgaaaacacaaagactttgctgccgaccctagaaacatgaggatatgtctttgtacggatggcatgaatcctttcagtgacatgagtagtactcacagcacttggccagtttttattgcgaactataacctcccgccatggttatgctttaaacggaaatatattatgttgtgcttgttaatccaaggtccaaggcaacccggcaatgatatcgatgtattcctggagcctgttatcgacgatctggagattctttggaaagaaggtgtggaaacttgggatgcatatggtcaggagaacttcaagctaagagttctattgttctgtaccattaatgactaccctgcactcggtaatctttccagaaaaactataaaaggaaagaaggcatgctccgattgcaaggaacatacacgaagccggtggttgaagaaatcacgaaagatggtatacatgggtcaccgaaggtggctcccgctacgtcacacatttagaagaaagaagaaaatttttaatggtaagagagaacttcagcctgctcccaaagatttgtccggagatgaggtccacaatatggtcaaggacataagcaatgagtttgggaagaaaagaaaacgtagcaagacaaaggagaagggtatgtggaagaaaaaatccatattttggcggctaccttactggaaagatcttgatgttcgtcattgcattgatctcatgcatgtagaaaagaatgtgtgtgagagtttggttggcctgatgttgaatattcccgggaagacaaaggacgggttgaacgcgcgccttgatctacaggacatgaatattcgcagcgaactccagcccatacgagatgcagagacaggtaaagtgtacctccctccagcctgccacacactgtcgaaggataagaagatcgcaatgttatcatgcttgaaggatattaaagttccatcgggctattcagcgaggataagtaagtatgttaaattggacgatctaaaacttgttggaatgaagtctcacgattgccacgtgctaatcacacaaatcttgccagttgctatcagaggcattctaccaccgaaagtgcatcacacgatccaacgtctgtgcgccttcttcaatgcaattggacagaaggttatagatccagaagatctagatgggctgcagactgatattgtgaataccctctgtcaccttgagatgtttttcccactgtctttctttaatataatggttcatctccctgttcatctggtgaagcaaacaaaactatgtggcccggcttttctaagggaaatgtggccgtttgaaaggtacatgggagttctgaagtcgtacgttcgtaacagagctcaacccgaggggagcatcattgaaggttacacgaccgaggaggctattgagttccgtgttaattacatgtctgatgccgatcatatcggagttccagcgtctcgtcacgagggaaggttgtcgggtgttggcacaatcggaaggaaaagaattaggcccgatcaagcatcgtacgcgcaggctcattacgctatgctccaacatatggcagaagttggcccatactttgaggagcacctagcgaaaatccgagatgagaacttggggcgatctgatgcatggattaacagagaacataattctcggttcaacgaatggttcaagaatcgtgtgacaatgtccacggatgtcccaaatgagacagtacagttgttggggatgggaccgtcttggaccatagacacatggcaaggatacgatataaatggatacacattttacaccgtcaaacaagatgacaaaagcacagtgcaaaacagcggtgtccgtatagatgcattccaggatcaagttgggtcaaacacatactacggccacattgaggagatctgggagctaaactacgtcaagtttaaggttcctttgttccgctgccgttgggtgaatctacgcactggtgtcaaagccgacaaggaaggtttcactttagtagatctatctaaggtcggatacgccgatgaaccatttgtacttgcgaaacaggtcgagcagatattctacataaaagacccttcaaacaagaagatgcacatcgtgagggatggaaagtgccgaattgtaggagttgacaacgtcgtcgatgaagaagaatacaaccataatcttcatgtaagacctcacattgaccttgacgatgatccccaagagcctgtggcatgtgctcgttcagatcataccgaaggcacaaccttgtgactgatgcatttgtacttatctattgtaatgaatgaagtattttgttttattgcaaagacttgatatgtgtagtcattaatatggctaattttgttttattacaaatgaccaaaataaaagttgtagatcgtgatgagaggatcaactttgttgttgaccatatttcaatttgaaatcatttagtatttacaaatgctgttaattagatttgtcatattgtcgaaatcaatttcaagctgttgggaaaaaaattatatagaataatgaccaaaataaaaatagtagatcttgaaaggctctacaactttgttgttgaccatatttccatttgaaatcttttactatccgaaaatgtattatgactaataaaatgaattattacacagctgctatatattttgcactcataacaaatgaaagatggaaaatgagtcatcggtgatgggccttagtttacggccgatagagattaatctatctcaatcgggctttgccgtagggcccgtcacggatgactcatcggcgacgggctccatactaatgcccgattgagatgacagccgngcccatcacggatgactca

SEQ ID NO: 4776 - DNA, 82008 bp, Oryza sativa
  unsure (1)..(82008): unsure at all n locations
attcctgcagcccagcgaaattgtccctaacacggagcgccgccgcagccgcctcacgcgcggccacctcctggtcgcgctccacgccatcgacgtggccaccgcctgccccccgcgcggccgcctcctgctcgcactcctcgccactgctgccggtctcgcgcacggctgcctcctattcgtgctccatgccaccgccgtcaccaccgacgacgaggaggacgatggcatcggcgcagcaaccatcaccgccgtggcaggatctcccggcagacctgcttgcgctcttgctcctccacctcccgtccctccccgaccgcatccgcctttgtgtgatctgccgctcctggcgcacggatgccgctgccagctacctcaccgacggctgctcccagctacaaaaaaaaattgtgatttcgggtgggggaaggtggcgccaggggcaatctcgctatttcaaaaaatttctcacctcttttgaccaagaaattataaaatattggctccagtgtcctataaccaattacacaatttttgtagtgtgcatcagccgtatcacgtttttgcagtgtctcccagccaattataagttttttgagtgtcctacagcaaattttgccaagttaattttatctagacttacaaaaagaaaaagaaaataacaaaattatatttatgtgaaaaaaatccaaatacaaggataagtgctctgaacttctgaagctttcaacggtaagcgtggacgacgactccacatgagcttgaccgctccatcactcatcatcgttatactacttaagtgcctcaccgccgcgtgaaaaatatcatcagatcgatatcccaattaattccacgattgatcgatctctcgcgcggtggccaaaatgccagagtccatagccgagaatcgcagcaacggcttcgtcttcgccgtcgtcgtcgtcgtcgtactcgccgtgctcacgctcatctgcggctcgacgacgtcgccgctgccatgcgccggcagcgccgcggtggtggcggcggcgtcgtgcgtcctcgccgcccggcggatgctcgccgtcctgtcgccgtggttctacgtcggcggcggccccgtgatccgccgcggccacgagtggtcgcccccgttctacatgtacgcgagggcttgcgacgacgatctctccggcgtcgctctgacgttgggagcggcggcgttgctgctggccttggcgctgctgttcttgcggcggcggcgttcggttggtctaaagaaagtcgataaggtggagggaaaatcagagtgaggaagatgtaaaaaaagattattataacaattaaaagtaatttgtatttaaaacttttatatatttggtcttaacaataataaaacttctatatatttagtcttagcaataaaaaaactaacgctgtcaaaataaggggcaaaatgaactgcaaattttcgctttaaaaattaattttagcagcagcttactttgattgaagattcattgcccgtcgagtccgattcgtttattgcactcttctccccttaacttcacttccttttgtccatcgatcttgtgatttgtgcgttatgtcacatattagaaaatggcatgtaatgacaaacaaacaaacaatgaaattaagtggttgccatttttaccaatttttttgcggtgaaaacggtcgatcgccatgggaatttggccctcacgaaggtcatatcactggccgactttgggtcatggaccgtgatggaccaacacttttaggctgggcaattatccaaatacctaatttaaagttttttttctcctctaagatggtggttttcttaactatttgtcacttttatctatgtggcatgccaacatgacaaacaaggatagaaaataatgtgggacccagtagttagcctcacatccctttcatttcccctccagcccatagatggcgacggtgagcaccttggcgccggggttgtggtcctagaggcccaccaccttgtagacggaggcggcgatgacctgggcgtggtagacacgacgatgcggatggaagcagaggaattcttggtggcgaggcagacgtggcaagcgtccagcttgggctcgcactccctgcagaggcaacggtggtgacatgggagaagcaacacagtggcatcgccctcgccacacgacttgcacaaccactttgacactgctagcgaggtagcgacggtgtcaacgggcaccaccgcggcgcatgccttcatctcgaagcaacaggactggccgtcgttggccgcggtggcgagggggtcagagtcaccgagaagccctcgacactactggagaccggaaggctcccgtgtgctcaaaacctacggtaacaggccaaaaacacacggtaacgacgttaccgggtgctagtgcacgggaacatatactcggaggcttcatcagtttaccgtgcgcacttcccgggtgttttacgattatgcgcacgggaaggccaaaacacataccgagtgtgctgaatcacacggtaaggctgccgtcatagctggactcttgtgtaacggagctcctaacggaacggtggcttaccgagtgtccttcacacacggtaacatttggtgtgttaccgtgattcattcacacctggtaacatgtggtgcgttaccgtgtttgaagcacccgctatgagaacatgtgttaataaaaaaaaatatatgctatttgcaatttgtttactatatccatcagagcttatttccatcacaatataaaccaccaacaagcacacaagagcacaacacattccaacataaatatatatttcagtaaagaggttacaattaataattagcatacaagcaattcatggttcatgtcagttaaagcaatagccaaagttacaatagctaggaacatattatttggttgatgcaaggggggtggcggcggttcggtggagaaccagagtgggtcagaggtggcttgctagggttgaagtgttctatatatagccatatctgttgatgaatctaagccgtccgatttaaatccattcgaccacagtttacaagcagttttgcttggaaaaataatactattcacacgatttctgtacaaatccctttaatgagaacttaaatattcaaattatatataattgttattaaaacttagtttgtttgcaattgttccaaacaatatcatgtgtttgtatattaacagagtgggtaataacactacttgtttatgtgcaccgcttgaagtcacaccgagaacaacacacaggtgggaaatcctaattataacctactcaattaatctcatccaaaacgatatgtggttttgtgttcgtatttatactcatctgtgtccctatccaagtagaacatgggaatcaagccaggatatggttcatctagttctgttggtcttgactagctagtgcgatcacaactgacgttgcctttctatttaaaagataataatacctttcttgcacttttaaccatccggctctcttctcaatcatttgagccatcttgggtactgtgacatcctagcccaattaggatttggcctatgtggctcctgtgagctgtgtgcgcatgtttagtatcaccttactagtttagcacgagttgaaccaatttacaaggcatcttccctccaaccatgccacttccgggttaacccttttatacgaagcgatgaagaaatataagtcgagtggtgtgtgtaagtgggtccgcccgtcggatgggctgggctacgcggttctgaagggagggctattacaggtacattatctcctacttgtctatgaactcttgacggcgacaatgacaagcggtgatggaccgcaacgatgaaaattatcgagttttttttttggatttttatttttgcatccatccacacacaaaaatctgattttggcatgcagatgcgccacccatgtggaaagaactcttgacggcgacaatgacaagcggtgatggaccgcaacgatgacctagctagggttttcgagtttttttttggatttttatttttgcgtccatccacacacaaaaatctgattttggcatgcaggtgcgctacccatgtggaaagcgattttcacatacacttttgggcaaatggacggctcaaccacacgaaaaaaaggttttggaatatatggaaaatgccttttagtagtgggtaagattaaccaatccaaaataaaaatattggttaaaaggatgatccaaagagaaaacatcggtaataaaagttagcgtaaagtgaaattcaatctaataataataaatcaaaattagttgtattatgtgaattttatcgtctactatattgggagtgtctagattgtagcacacgtcatgccaaatttattttcacaattttcctcattttctatacttttacaacttttatgtgttttttagattttataatattttcctgcaattttcagttatccgtaaaaatattgtgtacagtgagttgtgaattatagataccctattattgcgagttgtattgtctactactctactatctttgagagtgtcgatataaataattttcccttacattttacaattttcatgcatttttttatactttttaaacttttcttttaatttgaaattgttagacattcccgtatgtcaaaacgaaaaaacaggcgggaggattccgctccgttgccgccaacaaaatcatagtgcgtgccaacaaaattcaaagttcgtgccaacggagtgaaaacggaagtatggaattcagtcatgttaccgtgctccaggtggtcccacacggtaacttctctgttaccgggtgtttcgtggtagcgcacgatattgttgggacgttaccgtgttcctagtcctacacccggtaagttactgggtgttttgttaaacccacggtagcatctggttgcacacgggaactttcccagctccagtagtgcgacagcttgggcgggggcgaggcggaggagatggttgagcgtgccgcagaggtccgccacgacgtccccgttgctacgggtgagcccgcaccacgcctggctctcggcggttttgctaaaaatttgtcgacaaattttttgttagaaatctcccagattttccaccgtccaaattgcattatgatttgtgctatctgtccgttacaaccaaaaaaaggactaccataacctccgtgggagtcgatcccatgatctgatgctttgaacgtgaaatattttgccagctgagcaagaaggagcaactaattgtttcaccaaaacaatacttacttattagttatactgtattagttatactgtatgtacatattaattatattattagttacactataattatatatattagttacattgtacttacatattaattacatattagtcacactataattacactatagttacattcgtaagtacagtgtaactagggtgtaatttttttaaaagaaagattttggtgtagttacattataattatactgtagttacattcataagtacagtgtaattagggtgtaattttaatttttttaaaagaaagattttggtgtagttacactataattacactatagttacaagtgtaagtatagtgtaactagggtgtaattttttttaaaaaagcttttagtgtagttacactataattatgtattagttacactatacttacatattagttactgtaattacactatagtatagttacaaatgtaagtatagtgtaattagggtgtaatttttttaaaaaaaaagcctttagtatatgtgctgacaagtagttagttttgtggcttggattaacacgccttaatctacactatacgcgttgctttttaatttggctagcaagttggccgtttggtggttagaaaaatctgtgtgattttataacaaaaatctgtcgggtgttatatagatagatccggctctcggtggtggcctgacagaaccgctcctccaggcctccttcaagagtaggcttgattgatgaataggccgaatacatgcacgcgaaggagaagggccaaatttagttatgggctgaattcattcaaggaaatgatgtgggcaaaggaatatgtgcactttgactcccttaactagtggccaaatctaattcgtgggactcaaagtggacttaatttccgtgggcaaattcatttttggcccattgaaaaaagaatactgctatatgtacaacccaattatacaactagaaacatgcaaccataaatcaatcaaaggaaatcatgtttatatcattgtacccatttacaaccgttgatcaaattcagtcgcaagtgagttggacagttgggtcatatacatagcaatttccttgaaggaatggtcatctttatgtctaatttactgaacgaacctaattaaggttgtgtcttttttgttcctgactcctctctcgttttccacacttttttcaaactgttgagcggttccttttttttttcaaaaaattcctatacgaaagttgctttagaaaaatcatattaatccatttataaaataagttagctaatacttaattaatcatgcgttaatgtaacgttccacaagattagttcccagcaccaaggaaagaacgcaggcttagctcatttacggaggcctgtttagtggtccattcacgacggattcggcccattagctccataataatgatttcgataaatgtgaatctaagacaaaatgtatacactgcgataactattgcgataaaatctaaggtgatcatactaacttaccgcctaacctaaccaggtagctatagcttgtcatgcagatgcagcgaagcttctgttgtacaacgatgaagctacagatcgaagactttttccatcgccagaacagcatcatcctccagcaaatttgaatggtaccttctgaaaattccccaaatatcacctctttcaaaagtttgaatcagctagttcttcagaaagctgccattgctattcccatcttcagaaagctgcctttgctagtgagtggccctggccttggacgtgcccaataggctatttactgcgcacgcacacaggcaataagatatccgcgatgttcaaatggactgaaaaatatgacacattccaaacatccttcatggtttctgaaagtttagttaccatatgagagcaaaacatcgcattttactcattttccaaataaccttaatgcgagggcataaacatccttcttctttgctgatgtagcttcactcaccattttcactgcctacattagaaaaacattatttcagaattaaagaaaataagatatgattgtatgaccagtaccttgtgtgtatttcttaaaaacaaaaaaccatagaaccgaaacattgctgaagacttgaaaggcatcaaaagctaagttgaatgcacaccgctgacagaggatgtccctgcgtcatcaattctctgagttcatgctcaaggaaatcctcagatggagtttcatcagctgaaattaactttccctctatgagcactgtaatttctccctttggctgccgagttgcaaaggcttcatttgcttcaccaatagttccccgccaaaactacaagatgtatgtcaaattcaggactacaaagagaaaataagtaaatacaaatatttatgagtccaccatgtagaatataagggtacagcttggtctacagataatacacaaacaattcagtatagctgattggcatgaacaagaccgcatattagtttcttaattcagagtcaataccaagtagaatctgaccagtagcacttcgcagtaggttcagcaatgtaaagctggaaatgacagcactacaagttaagagtacctgcttatagtgggtgggatataccatctgctgtaactaccagctgaagtatatttattttatttgaagaaacagctctagtattttattgaagattgaaatataaacagagtaaaaatttgttgattacctcttcgtgtaatttcgttatctcccttgcaataacacatgacctgaatatcaatacataaacaaaagaaagatcaacaacgcatgcataacacattagcaccacatacaaatgggatgcagcatagagtgcagtatttcagttgtttatataatactactacaaattccacaaaaagaaattccagatcatgcaataagcaatgatatacatgggtgacagaatatcaattacctagaatcaccaaatgatgaagcagcatcagaaagaaattggtgaattccatggggaggaacatagaaaatttgtgtggcagcttgacaggcagatatttcaagcctttcttttcttgatcgagcatgctttggtaaaaaccccactagaaatgaaatatcagaactaacaacaaatattgttcattgttgataaataaagtaagtacataatcattttattaccaaatgtaaattcatcagttggcaaaccagatgcagaaagagcagctattgcagcagacggcccaggaatggggataacagggattccctcagtagcacatagtctagcctgtaagcaacagtacaacatgcttaacatctcacacatctagaagcagcatcgggctttaaaaagaacagtctctgatgctgttactgctaacttgagtagtgtcaactaactgatagcacatgtagaatgtgcttcaataatattgttatttgcagggcatttcactattagacactattcattgcctatttgtttattcatggtttaagagagtagcaggatgtactattcaaacagattggcaagtatgaatggtcaaaggagtgaagtgatttaccagttccatgccaggatcactaattccaggagtaccagcatcactaatcaatgcaactgcttccccttcatgaagtctctttaagatattaggctctctttcacgctcattaaacttatgaaagctgagctgcaaggtttacagtttagactaagttcaatggcactcatcacacaacatggtgcaaatgtgcaactacttgtgattcatgaacaaaaacattagaatgcagttaactcacaagaggtgtcttgatgttataatgttgaagtagctttccagaatgccttgtgtcttctgatagtatgacatcagcacatttgaggatacgcaatgccctgcagcaaggaccatccaagcttaaagctaggagcatgtttcaggaaaggagcacacgctccagttacagcctattactacatggaggtagcctcaaggttcagccaaaacaactatgttttgtttttcctttttcttcttctttttttttgtgcagaacagaaagcatgccctccctgatattttcctcatggtaaaaagtaaaggggattgataaaaaataataataactgatgctaattgtgctatcaaacaattaaagtttttttttctccctgtagagattttagcagaacattgctctatttcctcttttattctaaaagaagtgctgctaatcagctgattgcctattcacaaattttgttaagagtttacaacaattgtataatcagacaagtcccaatactttcgccttttctttttaagtaaaacggcataccactgtcagttctattaccctggtatacccttatgaatcactagatattatgacatagacatcaaaattcagaagatatttcgtaggcgtcagcttgatgaccaagtgttttcccacacaaaaatgtttgcagattgaccccataacagattaaaagctgataccttaaggtgatatcctcgaggttcccgattggcgttgccacaagatacagcccggaatccaaatcctgaagattgtaatagatcaacaacagacatcatgaaatagtcatggacaatctaattgaccaatatgtacatattccccacaaaatacagtacgaaagcattcttgcgttctactccagttctccagttcatacagaagagtagaagacacaagcacctgcataaaaagcaacattccgaacaacagctcttatttcacttgagagctgagaaagttcctcatggtccacaggtacgaatttatgcttgctcaaacattagaagaacatccgctcgcaatttggcacatagtaatgcatgaaaaacacacttatcttaacaattgctaaatgtctcaatactcataaaccaaaattacaccttccacatcacctatgattttagttctacggcccaaaccaatgcgttgttctgaaaataccaattttttttctagctcttctgagatgcactcacacagtgaaaccccccacgcccacacatactgaggccatccacccgtgagaaaactttgcaagagaagtgaaagaaaatcataagctgatgtactaatggagacggagaggtcaccggttccgaggcaggtgactccggcgagctgccagaggcggcggcggtggagaggcggccggcgagcggagccgtcgcagtcgtgacgcggagagggaggaaggggaggcggcggggtgccgttaggttcagggcgagggcctggaggcggagcagcgacgccatgggctgcggcggcggcggcggcggccggagagggaggcgaagcgtcgccgccgtttgctcccggagcgagaggggctggagaagtggggagtagatattgtggtgggcttcgctaccgttggatccgatctggacggcccatattggcccagggtttaattttctgggcctttgcctatttctcccaggtaaacctgcatttttaggatcgttttcaccgcgattttttgttttaataagaagtagaaaatggcgctggctagttaaccggtataggcatatgtaaaaaatgaataagcattcaataaagccgttatatattgtaaaatttatctaaagctctcctaatttgtaaaaccgttatatattgtaaaattttgaaatcctaattttttttcaacaaaattttatgaatattcaaatgttacttacaacttgtgttttatctgatttttgcaatgtaaaaaatcatacataataatcgataccattggacaacctatcaaatattgtcaaccacaagttagcctagccattgttattatgttttacgaattaacattgaaaatctatatgtctgttgacgcacccattcattagcccctattcttgtcactcactaaatatacacgttagtggtgcgcccaccaaattatagctattgtataacgttagtttactattctatttaggaatattatatagtatttataaaaatagattaagttctataaaatccgtgcagaaatcatatgttcaaaatttagttacaataattcttagttgttggttaggatcctagggtgtgttcgggagaaagagttgggaacccctccttcccggcacgcaaaacgaagcttgtattattgcatgattaattaagtattaactatttttttaaaaaaatagattaatatgattttttacaactttcatatagaaagtttttgcataaatcacatcatttagcagtttgaaaaacgtacgcgcggaaaacgagagaggtgggttgggaaaatgggggaagaacacagccttagtgtccacagtatacttttcctcccaaatattccatccggctataaatatttgttatttagaataaggtttgattaaactttgaaaatttaaccatcatttttaaatacaataagtttgacaatacttttaaacgtaaatctacacatacttttttattgagaattagcaaattattgttgattatcaatttttttttaaaaaaaatggaccaaatattgtcctaaacttataatattatgaccaaagggtgtactgaaaatccattggcgcatatatagtacgtccagcacaaattcacacttggatttttaatttctttctctatatctcaagcacatctaataactttacatatttgatatgtgtaatatggtatcatataagttatgtgataataaactttaaggtgtgaaatgatttttttccgtgcaatcctcgtgacagcggagagctagcttgctcaaacttgaagccacgctcacaatgtacttatgtaccaagagtcgaagactccaaagaagagatcaagagaccagaaaagtcttaccaattgaaatgaccacaggtgatgctcaaaagagctaacatgcataaatccgatcacaaaagcgtttctatccaaattacatctagttaataaactaagtaaccacaaaggtatcgtagcatcgtccccacaaggttacaagttaaaaggtcttagaactaatcattaatttactttccaaagtcacagcgcaaattgatctttctcgatcattttctttatcaaccataactagtagcgtcacatcatgcatatgggcgtgtttggttacctacatcaagcctaacttatatccacgtatgcaattgtcaaatgtttggttgcccgcgccctctacaaggcctggcgctgcacatgcatataaaggcctcctgactccctagccaggcccaagaggaagccggaattgagcttcactttagagcttggctgagcgcgtacaagtgcgaggatgagcaggtgcagtgtggggatgcatgagttggtgcagtgtggggagagggggtcacacatccgatccagtaacctccctcttctcatttgcttgcttggtgcctcacgaatcgtcctcatctctactgttgttagccatcatccgtcgccatatgaccaccgtcatcgtcatcaccacccaccatgcaacgtcgatagttgctttcctatcccttctcctcactagcctccggcctctcctcgggacaaacgatagtgcttgagggatgccttggggatgatagatggcctccatcttcttcccgtcggtcgtcgcctccatcttccacgccggtcactaaaactcttcctcaccgatgaccaccgcatttcaagtctctgtcgcccctttttgaccccgcaaaacactggatctagctaatggccaggattggcgccgtcggatccggctcagaggacagtatataaatgttcttgacatgctattctgagttttttttcccaatcatgcaagacatacacatactacacgtctacaccacaagtatacacatgtgaatataccccgttaatacatgctaaaaggactatagatcctaaatctcactaaattattctatatgaatggtgtccaaaaatagcaagctagaggagtagatgacagcccaaggaggcaaagaaagataatcccaaatctcactaaattcttagataggtcattttttcctgaaagcattgaatcataggatcaggatcctatcggattcggattttacaaaagtgcatattttttataaaagatctgtaatacattgcaaaaattaaagcctataacattaatttgttaaatttaattgacctttttactattcacattattttcgatccactttttattaatatatagtacttacatatagaatcatatgattgggatcctaatgagatactacaaccatatgatcccacgagattggtagcatcagcatatgaatacaaatagaataacacgagattaattgtttcggcttgctagctaggatatcttacaatatacgatcggggatcctattaattaacaaccttgctactacttatcactcattttgcctagtagctttcaattgagacagaatcagaaatattcaaaatttcttctcagaagcttgttgttcgatctccaggttaattttcatgaacactatatatcacacagcagaaagtgcagtacggtgataattgatgaaatggtggctttgcgtcgtcgtcagtggtgccacctaactgcatgcgtgcatgtgtgtcggcggtaatcatctgcaggctgcaacaggggcagcaagcaaagctggattcttgggcttcacacgtgcgagcaggcgaagcaatcttggaagcgatctttccatgatagtaagagaaagatccgtggcgacgacgacaccacagctgatcatgcatgcagagccgcaagcatactacctgcagtagttaatgtcgttggaaaattatatctctcggcatggaaatcgagaggaaatccccgcacgcacggctgttttctacccttcgcatgtgggattaatgtgatttaatttgtgaatattttcataattagatgattacgcgtattgattggtagcgccaaatctttccatgttttggattgcccccgatctcccttaccttcatattaataggggagaccggtgtcatggatagatgatgatctctccacgatcattttctccctaaaaatcctcaaaccttatctgatcagttgagtgctagagggagaacgtacggctgttatgagacagtgtaggtggagaccaaaaggtcaccgctactctgcaagtgatcgtcggcgaccccctcgggatcaagctggtgtcttcaccgctacgactatttcccctacactgacaatacatgaggtggttcgaggttctacatcctctacatccacttcggttcaaactagatcaattgtagttacttcaaacaacggtcatttaaaatccaattatgtattatagtgatcatagatggctaagcacttatgttagtggatcatataatctacaaatgtgctaatataattaaactaatctttgtgttttgagagtggtgaatgtgattgctagctagataaaaaggaaaagctgatgacgatttgatgaagctgctgataaaattaaaacaatctagctaagagagtagtgatcgatcaagatgctactagctagctagcttgtctgaattgatttcctttccaaccaattgatctagtatcgtcattgcttcacgagttaaggaagatgaaatcatcaaactcagtgcttcatctgttcatcatcgcatgaaatgtgcaaatgcctggaagaaccaagagagtacttaccagttaccacagggcaagacgaagattgttgctggtgcaaaaggatatcagaggaggtccagatgagctccatcactgtccgtcttcttcctctactccgacgagttgttgaggggaatgaagcctggtccgagaccgtccacgtgtacccaccactgtggtacgatctcaggccagacgacattcctctcaacaagatgatcgaggggaagaactgaaattaatggaggagagaagaactgaagaatggaggaagaagaaagcttttctcctatatactagctagctacctgcgtatatatgcagcaaatgatcgatgctgcaatgcttttccacagccttacacatgcttctttcttcctttgctctctcttgctgctttcacactacacttctacacccaacacacgaaactgtcaactgattttaagttatttcgggttattttatgtgcaattgtgtcaaggagtgcactgtatgtatacttaattaggagatttaatcatgagcaatatatgcttggcaatggaattcagtcatgaggtgcatctgccttagtggtaatcatgagtaatatatgcctcattatctgaaaaatgagtaatatatgcttggtaatgatcatgcagattaaggcagaggagaagaacttcgcaaccaagattctgtggatggtcaactggatttgtaaaactgcaagcagggagcagaaagtcaattggctggttatgaaaattaagcgatgattacgcatattctcggtcatgattaagcatataacacatcactagccagtgaacaaactagaaattttgcagttaactaattagagtttaaaaacattttgtgtatgtctttcaggagtagtgctgcatgcatgcagggctctgacctgagctgatgattttattcgcaagcaaagcgtttggttccttgccctttgcattgcgtttgcatgccgagttgttttgattccaagcttaacactcaagaaactgaccatgaggcgacctgcaagctagctgtaacaacaaagatcaccttttggcccttttttttgtgtttttttcctgcattttttaatgttctcttttgccccctttttttattgatgttggacatgcatgctgcacaaaaatattttcgactaacaagtttttctgttttcttggtatcggaggttcaatacaaaaattatttctttttcatcaagcaaatattttttctctatttccatttatactcagaaaatataacaatataaaaaattatctgtttattagtgttaagcacacagattttctttgctttggagtgaactagaataataacaatagtttaacatgttttaaatttggaataagttcactttgactcccttaaaagtgacccgaatctaatccatgaccctaaaccgtaaaaccggatatcttcacccccaaactattgaaactggtgcaatttgactcccttggtggttttggagggcagtttcgctgacgtggcggtgttgacctagtgttaacagtgaaatttggtaagcccaaagttactttcggtttagagtcagtatcggcttcaaagttctagaatcagcagatgggagtcaagtctccacgatgtcgtgttcttggtagcgtcggatcaatcaaaggaagcttatctagaagagttcgagttcaagaaggatacgacatgacagttatctattaattagtcatagtttgttagttttcttttatctttaggaaaatgtgtttagtgtccgataagaactttatcttttcctttttagtttctttcttgtccgacaaagactagtatctccctataggtataaatatgtacacccggggtcattgtaatctatcaatctatcgatcaataatactctcggcgcatcgccaccctcttccctgaggtttttacttatcttccggcagaacttgggcacctgacgcagggctgcatcggctttcaatctccagcgaaggggtaagtcctacgttctgtcgggccctggtgaatctgtcggctacgttggtgttgttcaaggctgcatcgattcgatctcttggatcgctctggtttggttgatatatttgcctacctgatatctcaattctatctctaattgcattgtgtttagagacgcatcggtttagttgggactgtttcagttaggtctgatctcctgtcttagccgatatatctctacaatcataatgttgttctaaatagatttgttatatccatcacattagacagatctatcggctcattgagtattagattatcatatacaatctcgtgctgcatcggttagattcgatctactagattgttgttgataatataagtcttgttaagccgataggttcatgctaatgttttatcggggtgctagccgataagttatttggacgttgcatcggcttgtagggattgcatatacatataagttggatttagccgatggcaacaaaggtttcgctggagatcgaaagccgatgcagccctgcgtcaggtgcccaagttccgccggaagataagtaaaaacctcagggaagagggtggcgatgcgccgagagtattattgatcgatagattgatagattacaatgacaccgggtgtacatatttatacccatagggagatactagtccttgtcggacaagaaagaaactaaaaaggaaaagataaagttcttatcggacactaaacacactttcctaaagataaaagaaaactaacaaactacgcctaattaatagataactgtcatgtcgtatccttcttgaactcgaactccgacgagatcgagcggggggtcggtggtctacgggctacagcttcggatccatctgcatcgccgggatcagagctcctcgccgccatcctccaccacctccccgcatccatcctcgcatcgtcgtcgcgaggaggtgcgacctcgtagtccagtgcctcctcttctcctctgtccctccacacgcatcagctccagcgcaggaggacgcgggacgtcgacggcggaggcatcgagcaggtcgagcggtagctttggcggcgtgcgggcgattgtgagtgcgggaggaggcaccggcggcggcgacaacacgagctcgacggctccgcctctcccctctccattccggcccttatgcgccgccgccgcctctcgtgtaacccaccacctccgttcctccctcacctgctctcctctcctctcctctctccacttggcgaggtcgatggtgaggccgccaccgccgccgctctggcccccgcccgccgccgccactgctttggccctgcccaccgccgctccagctccagtcgcccgtgctccccgcggccggcgaaggggagagaagagaaagagaaagaaagagagaagggaggaagaagaaagggagatagaggatgacatgtggggcccacatgtcagtgggccccacaattttttattttgtgtgtgaatgactaatgggtaccacgcatattttttatttctaataccacttaagcgccacgtggaaagaagaccgagtcaatactgccacgtatgcgccacgtcagcaaaaccgccctccaaaaccacccaaggagtcaaattgcaccggttttaagagtttgggggtcaagatatccagttttgtggtttagggtcatggattaggtttcgatcacttttgagggtcatgaagtgaacttattcctttaaatttagcccatgacagacagattgggcccgttccaaacaaggcctgaactgtatgggccagaattctggcccatccaagcaaggcctacatcctcttttcggccctagaaagcccacttccaacacggcccatttattcttttttccgtttcattcctccgttccgttccacgctctggccatcaaaacccctcctcctcctcctccccccacaaaaccccactctccttgctccgcccccgccgcgtcgccgtcgccattgcgccgccgccgccgccgccgccgacgccgtgcgtcgcgaaggtgatctccgcgtccctagctctctccccctcctcctcctcctcctctctctctctctcctaccttttctccgctcgcgcgcatgcaagcgatgcggcagcagcggcggcggccgtgctccggtgccgcgcggggcggggatcgccggccccatttctgctgggtttggcggggttggggacttacttgggtatcgagctgggaggtgtacggcttgttggtctaatccatggggttatatgtgtcgctctgagttcttaaggcactaaagggggttggttcgttttattcattttttttttgtttgcttgtttgtatgctttgatgcgtcggcgtcgctatagcgagttgttctccgttggtgaccgtgttgggcttggttcgagttttcgtttcgggcaatgcgcaatgatgctacttggtagtacttgggagcagagctgtaccaggggctaagctgatcaggttgttctttgctacgattgagcttcagattacacagttcctttgtttgtgggactgttaggatcccggtgattgaggcttgttatactgcgtctgtgtgcaagccttgattgagctcttgatttgagtcgctcactgcggggttgatattcgatgggattttgccaggaaattttacttggttccatcattaaattgtaggaatgtcactattcagattgttctcattactatttatccttttcgatgattcagtgctaccaggaatgctgggatgaattcatattgtgataagaaagaggttactgtagcttttagcaaaactaaaaggcaagaggaggatgaagtgatttggagaatggtagaacaaggcgctacagatgatgaagagtgtggtggtaccaactgttcggctggcgaaaatagggatcctggttggcctggaacgagtgtcttcaggatgctgattcctgcaactaaagttggcgcagtaattggtcacagtggagaaaggcttagaagactgtgtgaggaaacaaaagcctgcgtccgagtaataggtggccactttgctgctgcagagcgagctgtaagttctccatttagtagtattattttttttcttgatcatccttgacttcccattactatttatactagaatactgtttccttttctgcctgcagtatgctagcatttttttttctttttggcaatgatgatcttaattgagtgcttgcaattaaattttatagcatttggccacaaacaatactgcggggtttctttcagagaaatgtatgaatgattcatgatctggctaacgtatcaagtatcaactagcaaaccagaagtggactatagaatgtacttatcctggatgcagatggtttttctttgcttttagaatgttgtcctgttacgatgttgtgttgacttccaatcgcttttgtggtaactgaaatataacctcctatattgtttttttttgtctttgtactttggattcttatataagttggtctttttcaacataatttttgcaatagcttgtgattcataaaaatatgggcatcatttatgtttagttcaataatttcctcaattttgtttctttcaattttttttattggaaggtaatcatttttgcaaaggaacaacctgatgagccaaaacctccagctattgatgcactactaagagtatatgagtgtataatcaatgatgatggtttagatgtgagatataacaatatagttgtggcacggattcttacaccaagtgaacaggcagcaagccttattggcgatcagggttcagtgattaattatatcaagaaagcttctaaaaccaacatccatgttattggtaactttcttactttgatgcacctcttggaaccactagttccttctattgataaatttgatatcagtggtctccaactctccatatatacagatgcgggtctttggatgatgcactagtgtatctataagctacatgaatttcagcttactgaagcacatggttactcatgttgcttggtgactctactgcattgaaactaaatttcttaagcatgcagtgatgttttagccccatcaaggaattaaatggactactacatcagcatattctgtcaaacatgtttttgctggttaattataagctgagattgtacctgtgaaaaaatatgttcatgcaggaatagttaatattgcgtgtagctatgtacatgttgtcaggtgtccatattttcttatgtgttaagaaagtatttgttatggccagtgttccgtacttatgcggcccgtccaacatgacatccgttgaaagcggaccactggcgagagataattagtggattagatatccctacttgctatctttgtctatgtttccattccattagattgtttgtttcctttttcattagagattcttgttagggaccatcctataaaaggatcaaccatattattttaagaattaattgatctttctctttcttttgtcactcacttaaatagttacagagcaagcagagaagttaatatacataatgaactaggacttggttacacttaaaggattctgatatggcatgaaaattatgtgactaattaacttatttctttgaatttatcaagcaatatcaacaataacacaatgattgcccatggatgcaatgaaaagaaacagttttaagcatgacttcatccatggcggatggagcagggggcgcgaaggtggggaccccgggcctagtgctttcagcccatcatgcctgctatgtattcacggtcaaattatctagtaaccaagcaatggccacggcattgcaacatacagagtagcattttagttgatccgttgattattattttgcatttatcgttcatctattactagattcataaatatggctaaactaaattacatagtttttctcaagtgatattagcaatatttcccgcacaaatggcagtatgaaacaacaaataaaatcttggagggattttaatctcattgatgccatggtgatctggtaaaacatatgcaaaccatccttctgaatcctatttttttattagtgttgttccacggccccttcctcgcctctaaattttagctctgcgtttgacactgacttcatcaaaactacaaaatgcaacatctgtttaatgcgatgacgcatgggtttcattgcatccatcatttggataaaatgggttgcacttttattttaaattcaaaagtttcagttatgattgacctaaatggtattatattagttccatttggtgatatgcagtttcagtatctaatactactttcaagattaaactgctattatttggtacactttccagccttctatatataatcttaataagtactcattccatcatgtcttgactatgtagacggtgacttgccacctgttgcacttgaagatgatatgattattgaaatttggggactgcctgcaagagtgcatcaagcattggaacttgttgcttgtcatttgagaaagtacctggttcatcgaagtgtcatcccactgtttgacccccatgtaagttgccactattttgaacatttgttatttaatgagcaattgagcataccgacacagtacatttttgtcctcgcaacatttaattctgaggaatgattttcttcaggtgtctattccaatctcacctgtggatatgcccccattccactacagtgaccatcatgagggccttctgcacgaagctagtccaggctattactccctatatgctgaagcttttcaacttgaacacccatggactgatactagttattcaaggtatccaatggaaaactttacacatgctgacatatttgaatacagacaagaagcaccagtattttttgggagatatcggtcagtcacacctccacattatgggcatgaagcagaagcatatttatcatctccaatggaattatgtttgcataacaacctgaatacatatggatggcaagcaactccaccaattggtcgatcagatactgttgaaagaatacgctcccttatatctgtgtatggaaaacaggcacatccacatccgctgaggcagacatatcaatcaactaaaatggaaaaacatccacactcggggatatctttgtacagaagggatgatcatccaacaagggtatctccatcacctgctactgaactacccccatctcctgctgtttctgcatataaatggcaagtatctccatccttaaagatgtatccttcaactaatgtcgaaaaccttcaacactgccgtgtttctgcatgcgctccagaagaactgccaaatgtggttgtgccttcgttaactagtcaatctcctgcagtcacttctcaggtttgtatggtttttatcatagactcttgctgacttgttttaattagtcctgtcaacattatttacttcttgtttgctgacatgtttttattgtctgcgcaacactatttactatcatttttggacggtgggctgcttggcaggttataatgaagatgcaagttccaattttctatgctgaagcggtaattggcccaactggtgcacgaattgattacattcgccaagccagcggatcaagcgtcgtgataaaggatcttgatgacagtgcaatgtctattgagatcactggaagtgctgcaacagatgttcaaattgcagagcagttgataaaggtagcagcagcttttataattttgttgttgttgttgtacttacttctgatgaaatgactagtctaagtaagttcattgcatttctgttgacataactggtctttacttttagacaaggttctatttctgttttatgaaaaacacaacatgactgcaatcctctcttttgtgggtattgcttccatttattgtaggcaaaattggttctagagtagccaatttttcctttattgtaaatatagttcaatatctagttttcaatcttattttacctactggacagctaattaattgtataagattccatgtttccgcaaacagaccacatattgctattcatctaatgctcgctagcccagtccttgtatggaaaatcagggtgctggttgctgtcctggtgtatcaggttctagactcttcgttgatatgcatgaactttgacctgaatagcagctcagtacccttgaaagttcaaccacttgctaccgggactgctttttgctttttggaattgcaccttggtttctgtagttttaccactattgtgctgagagcctgaggctgtaagatgaattccacgcttgtacgtttgccttaaaaatatcaatgttgccctaccactctcctgaccatcgttttcttttccagaacttcatggctgaagctgctgccgcttcccctgatcacagttatgacttcattccatcacatttgccagcaccgagatctccagagccagatattccaactacttcactcactcgcagagcaagctgttttacagaacctcgcctgcaagcgacctactgagttcccaagagttctctttctgcacatagtccctacaccggcaatacaggaaatccgcgagagtacattcccagaaagttttgatatccatcctcagatgattaatatgcgccccctttttgaacccccaagacttgtatctaatattttctttttctttggcttttagccatagactttgatccatgagttagaaattgactctgatccatgagttagaaatagaccttgatccatgggttagaagtctgagattatggtataggacaacaattttttggtggattcagggtaagtgatgtacaagatatgtgccctcagatgtttgagagacagtttgtattacatgacaacatgcattatgttatctacaaactaaaattcacttttaattccttgttaactgctgatgtgtgacctgactgttaaaagctgctgccatgtcaatggatgcttgggtgttgcatagcttgcattgatctatttttgtatgtgtggccatgcttgaatctctcgcctgacattcagacttcagacattacaaggggaaaatgccgggtttagaggagagcaaggcagccattctgttcctcctttctctctcctctcttcgtccctgcgtagagagggagagagagagaaggaaccccttttgcctcctctttcctgccaagaaccacattttcccccaatctttcttcagattttccacacaaatctgtacgccttttcggtctaaagaaaaattcagcatcggtatgttcaatcaccctgttatgtatttcttaaaattccttgaaaaatcattggaacaatctttgtatgaatgtgaaaatgctgtgatgttacatgtaatcaattgcgctgcaagtaatttcttctcaagattattcaggagtttttcccctgttataactggtgaaaattttggatccttgctcatattttcctcctttttttgtctgaacaatcagatattggtgtctttctgcaagaaaggtgggcattggcagcaccaacgctccatccatttaccttctgagcaaacagcttcctgtgaagatcaccttttcttggtgctgcaatctgcattggcaccaaatcaagattcaacatttgctcccatatcatcaaaccaagattcagcagtgtgattttggttgccttgaagctgcattgaggaacctttcatgtgatttttttgatgcacattgatcatccatggctgcgaaaaaccatgcgagatcccaggacttctggaggagattctggtccatgctgtcttatgcttgcagcgagctttgcttgatcatcctgctccatgtggccgcaggagcatcctacctggcgacgaggttggcgcgcatccacaagctcaagatgccatgcatcctgtgcacaaggatggatcatgcccttcatgggaagccatggttctcttcggatttggtctgcgccgcgcataggtcggagatatcatctctggcatactgcagtagccacaacaatcttgcacaatgtgatgatctctgcaaaagatgcactgtagcaacgaatgatgtggttgacacaaggagatcgaaatccaggcagctgtgttcttgctgttcggagccattcaccaaggcgcgcaatgcgcataggatttctgagannnnnnnnnnnnnnnnnnnnnnnnnnngggaacaaatccctgcagatcattcaaaagataagggtaagttcacttgtctgaactactgtacttcagattctcttataactgaatcctttttagaggttcaccgagtgaatccattgtgttttttttttgtagcctttgtggtgggtattgaggaggtgaatgaatctgatagttcaccacgaacatatgaacaatccacaaagaacaatggcgcttctggaaatgctgggactgcaaagctagcacccagtggatctactgtgcctatgcgcgttttcgtcgatcgcaacagcagcgtaaagaacggtttcataagtagggccaatctttcatcacctcggccatcacaaataatctctgccaaggacagcaattcaaccactcagcaagaagtgaaggcattcctttcacagatgtctactgtaaggggcattgacagttcttggagtgatggagctcctagccccggaatcaatgcgcaaaccgatgaaagcaatgccaatggcaggaggccatccctcgagaggaactattctgtgatagaaccatcggatgcgaacctcgctgatgaagttgagggagagagctctcctgagaacctgaagcggcttcttgagctcaacaagaagtcgatgagtgctctctacaaagagcttgaggaagaacgtagcgcttcggcgatcgcggctagccaagcaatggccatgatcaataagttgcatgaggaaaaggctgcaatgcagatggaggcactgcaatacctgaggatgatggaagagcaggccgatcatgaccacgaagcgattcagaatcttcacgacttgcttacggagagggagaaagaattacttgacatggatgctgagcttgagaacttcaggaggctagtccagaatgaacaattcaatggcgggaaacatgatatcgctggcataatgaatgaaacagacatgccgtttgaggtcttgaatgacttgggctacacgaagaacaccatgtcgggtttcgaagacgaaatggcgtatattttggaatcgataagcagattggaggataagctctgcgtctccacaaacagacttgcttctgacgatgccaaaattaatcaagagggattgataggaggggctgattttgggagctcaccaacgcatggtgaatcaacttctgatcagcaagatgatggaaacaaatctgttcagaaccataaggataactgttcttgttctcatccagaggatgggaaaacgagtgatgcaaatcttaaggatgaagtctcactgttgcatacgagattgcaggcacttgaagctgatcaggagtttcttaagcatgtgttaaactccctaaggtgtagccctgatggactgcagtgtgtacaggcgatagccagccatttactagagttgagaagaattgcaactcagagataattttcccccctgatttcacaccttctggtcatgaggtaataattattctagctaccatttcatagcagtgagctattattttaaagtttccttaacattttgaaaaaaaaacggaaggattttatcattttatgaggtagtaattgatttaccaaaaacatgtaacctgataaaacagaagcctatataaagaagattctagaaatatatccatggtaggagctaccaaggaaatgcacattcataattgatgcaaaattaatgcaagtgttttcatacactgataagtgacactaataattctggcccatctgtatgtcaaaagatggatctggattaggttctttctgctccattgctgaataccatcaggttttagctatgtttgcgttattctcagtacattaatccctcttgtcatttctttgatattcaatttctttatataatttaattataggattgcaaatgttgtccatgaatgctctgcttaaccataaatcattgacaactttggcctaaccttttcttgcagctcttctcatgtagtgctacagaccttcatggtgcttcttgttagagcagcattgaagaggtctagaaatcgatgtcggtgaaagatcatctgaaatgaggaaaaggagcatgcactgacaaaaaaaacttccattccttgtactaatcttcaagttttcattgaccaggctggccccctgttgctgtaattctgtcactgcttcagtaaattactgaaacagacaaaggcatctcctctatatcgatgtgattgctgttaggagcaagtttgtaactgtagatgtaactgatgcttgcggttcttgcaaaagaggagtttaactagtagaatatatacagtgttcatatcaaattaatcaatgtctccttgcttcagaaatgcaaggttttctgcctcatccaattaattttctccatacgtttaaatttctttttccattcctgctgattgtgtgatgcctgatgagagaattgcaaatgggattttcttgtgctattttcccaggcatatatgagtggccggttatttccacaggaattcgtcatccgccactagcaaactactattttagattgaacctagtccacttgagcttttattcctttctgtattgttgcccaaaagtcaagatccaaatctgaatttcacggcttgaagtaattacgtccttatcttgcatattgttgcagaccatttagtctcaactcccgagcttttggactgcatatctcagaaatttcaacaattactccctccgttcctatttactactccctgacgccgttgacttttcgatcaacgtttgactgtttgttttattcaaaagttttatgtaaatatgaaaatatttatgtccagcttaaagaatatttgatgacgaatcaagtcacaacgaaataaatgatagttacataaattttttaaataagacgaatggtcaaacgttggataaaaagtcaacggcgtcatacattaaaatatggagatagtactagtcactgttgaccaatatcgttgcaactttgataattaacaagttttttttttgttgaacgaaaattgtggtatggtcatgtttagcatgcaacatgcttggataatatcttatgttttcatatatatacaaatgtgttgcaaaaataagaatggccaaagtttacatatgaccaatgttgatgataattatatgggcatggagagagtaggatactgtataaagtagtaggaaaaaaaacatctccaaatattttctttccagcactgtatccatcctccattttattatcttctcttatttcaacgctgtttccttctctttgtttttttttttttgcggggatgttatgtttatttaattgttccatagagttgactgaaattgcatttttgaagtacaatttgcatcacatctgattaagtgattatctgtcctcttcgtcatatataactctcttgacgaactgaatccaactaatttcacattaaaaattagtatccacttgccaatactgtatttccaggaaaaaaaacaaaagccaataattagaacattttttcaataataataagaaaactagtcaaattcgtactaaaacgtgaacaacctgtattcccgcacacgagctgactttgcatttatttagatttaaaattgcaagcttgcctattttgtcccaaatgcatgctggccttgagtttaaaataaccatcacaaaaatgccacttcatgtaacacatggttgatttctttatccacactatgagatttgctacagtccaacaaaaagtacctcaaggtcccgatacatcacgctgatccaacgatcggaaacggacaatttggtaccatgaagtaccggtaccttgagatactttttattagattggagcaaatctcccacactattactcttaacctcatgtttgcataggaatatagtcttctagcttttgcttgtttaagagtattccatttccaaaattgtgtggtctggcctttctcttctctctcaagacagcgttttggccaattcaggatgtgatatgacatgagctaatcggagtgccttccttcttcttgtgccactctgaaagtctgaatcttctcccatgtataagttggtatagactgataagatatatacaagcagctttgctttccaagaaagccatgaaagggtggtgctagtgagccagtaatagcattaccgtacttccacatgtcgccggcgagaggtggcacgccggaggaggagggcggtggcgccgacgtcgagaaggcggcggcggagacgggaggtagaggcacgtggaggcacgcggcgttccacgtggcgacgacgatcgccacgccggcggcctatgctcccctcccgtttgctcttgcctcccttggctggcctcttggttggtgcttctttactcatcctgtttcatcctctccatggattctctgatatttgagcttctcctgctctgttgcctgaaatgccatgaacagaaagtttctcagttcatatgcatgcatgattttttcttctgtttgatttgagtaatttgtaattagctaactgttgtttgagcacaggtgtttgtagcttggtcacaggaacactagttacatggtgttctagcctggttgttgcctcactgtggcagtggaatggagacaagcacaccagctacaagcttcttgcaaagagcatctttggttagtactcatcaccattttttttgtcacgacaaaattgtacttttgatcttactgtactgtgtcacaagaagatttctgagtagcagcctagcaggaaaagagttgccaaacgatagtaaatgggattacagattcttcaccataaatatttacttttgatgatctacttgtaacagtaatatacttagcagtgcagaaattgttgcaaatttacctcaagtgatggtaaaaatctgtgcttttgtctgaaggtccctggggttactggtatgtgtcgttcttccagcaagtggcatcaattggaaacaacattgcaatccagattgcagctgggagcagcctcaaggctgtgtacaagcactaccacaccactgatgatggcgccatgaccctgcaacagttcatcattctcttcggcgcattcgagctgttactctcccagcttcctgacatccactcactccggtgggtcaatgctgcctgcaccgctagcaccattggatttgcagggacagccattggtgtcaccatttatgatggtaaaatctggtcatatcttcacttttcagactgaagatttctggaaattgaagatgtggaagaatgaacagaatgaatttcctaatgcagggcatcggattgatcggaaggaagttgattacagtctgcaaggaagcgctgcatcaaagatcttcagagccttcaatgcactgggcacaatagcattctcatttggggatgcaatgctgccagaaattcaggtgaatatctgatattatgctgagattcatgctgtcagtgtccactcaactccaaaacttcactgaaattcagagctctgtgcgagaaccggtgaggatgaacatgtacaaaggcgtgtcgacggcgtactcgatcatcgtcatgtcctactggaccctggcattcagtgggtactgggcatttggctcaggagtacagccctacatcctgtcctccctgacttttccaagatggacaattgtgatggcaaatctatttgcagtcattcagatcactggttgctttcaggtaacacaccagtaacctcttttttttttcacaattttcactctgacagactatccagtaactgtaaatcttcaccaagatatactgcaggccgacattcgcgcaatttgaacagcggattcaggcgaaagacgcaggctacagagcaaggatgtggaggctggtgtatacctctgcatacatggtggtgatcaccctcatctctgcagcaatgccattctttggggactttgtgtcagtctgtggagctgttggctttacccctctggactttgtgctacctgcactggcatttctgaaggccgggaagttacctgaaaacccaggattacgccatgctgtgaaggtgatcacctctgctgtcgctgtcttgttctccattgtcggagctctggcatgcatcggcgccgtcagagcgatcgcacttgatgtcaaaacctacaaattcttccatgacatgtgaatgcagttagttagtatcatgttggtgatgaaatgaatgtctctgccatctgtgccagtggtttatacctggtgatctgacatgtgctaagtattaagtatatttatgatttggaatagcggcaacagttgagggaaaatcaaaatttctcagatttcacggttttaacgctcttaagataaacattttaacactgtaagaaaacaaaatagatgctatagacggattacatcttaaacaagagaacttaactattcaggagatcaaattcttaggcctgattctctcagtgatttagtatactagtgccatcgaagttcataatttgaagagagaatgcaagtgctgcccataataacagtcaaaattgacctatacaaaccatgacagctacataaattccatatagagttgccgaactacggaggttacaaggggtaaaagaaacttaaaaaggctaaccaccacttggcagcagtcttttcaagggagcactaacttattttctgatgcaacatggctaagctcagctaaaatccttcagccttctcttcaacacatccaaggacttctttcgagcactttgcactgtacttcggcctgaaaggctcccaaataagctttccggagcatctctaaacttgtcacagatgatagacaccttcttatgatccaaggatccaaaattcttctccctgattacagggttcatgaagttctctggctggttgctgagcagaagatcggtgagctgcctaatttcgaccaggcaatctctgaaagttgtttcttttctcagctctgacaacccagtgctgtggaatttatcatctgcaaattcctctaactttttcaggtcaatgtcaatacctgcggcagcattagcattgaaccttttcacccgatcactaagaaaaactgtcattatcgagtccgagatgtggctgaatgccccacaaaccaccttgtacagggcttcccttggaaaaacattctgtgcagttgacactaacgtgtgaagatagatgacgacctcattcatgtagtcattcacatgttctggagtttcctctggtgtccaattgatgctagtcaaaagcaacataaattcgtcaatcttggaattggccaaggctattaacccattgtacgctgcattttgagaggctttgagcacagctctagcagtcaaaccggaatgaggcttgtcaagaagacgcctaggaacaccacaaagttgggcagcatgaaagaggaacatgtcacaggacttctcaagaatggcaatatttcctgcaatctgcaccatttgtgtaatctccaaacaaccaccatgtatcaaattcagaaggccatcatttagtacctcaatcaagagcttgtctaggtatcttttcaccacatcataggcgtccatcataggatcatatgacaagtagttcacagaatcatcaataaaagagcgcacgataaggcaagcatctggaactgaagaggaaaatggtgcaacatatggaaaatccggaactacaccaatgggttcaagttgaaatgctgaaacattcatgtggtactcattttccttcttaatgatcatctgctcatatgagtccttagtgaagatgccatctatctttttccggcaatcagaaagaagaagttgatagaatttgtccctattcttctcaagaatttcaagcaatgatgtggtttggtatccatacttcttcatggttgcacccagaagagtgacatagtcttttacgagtaggaggtggttggcagcatccatgcgagagaactgttcctctaagatagatgtgaccttagaaatagctgtcccccacattgtctcaacctgactatcagaaagaagcccatctgcagttcgaaggacacggtcctcaacaataaagaacccagctatctgagcaaggaagtgctgatgagactccatgaacggttgtgtcgtgggaatttgcaggtccaaattaagttgcataagcctgttattgtagtagtattctcggaatttttccccaagaccaaggcatgtgtgaatgtagtttgctcggtatactggtgtaagatcgaattccagtacttcctcctcacctatgagatccaaatccaaggcataagcatgctcgtcaaacccaatacggctgcagtcctctgcttccctctgttgggaatgtattccctcatttttctgacgagccaaggatgcctggcttatcgaaaccttaccaatttcctttgctgtccttctgatatacaccagccactcattaaactcattgcaaactttcttctcaatgtacagcttgacaattggtatttgcttctgaacagccttttttagaagctttagaggaatattttgcagaaaatccttctcaatcaactccaaacttttcaaagcagaatgaagcctggcttctgcaatgtccttgttgcacatctggcacagactggtgacttgcaaacagatcttcaacatccctagggcttcctcaacattcttattcactgaatacaactcaagaagctcatcaagcttcaacagcagggagctagcaacctcttgcaggcgcaggttttcgccggacagcatacccttaagctcatcggcgtcaaccaacacgccgcggagctcatcgactgcaaggatgaactcctcgtagtggaccctacagagctcctcaatctcaacctccttcattttcacgatgctcctgaggccttgcaggagggactcgggcttcccggactcgaacgcgtggcggacgatagggcccagatcctcgccgttggcgatgaaggcagcaaggcccaagccagcgccaccgttcccgctctccccgccacccctcttcttggtctgagcagtcattgttcaactgcaaaacacacacacacaaaaaaaaaaatggcatgctgcacacagtaagacatgcgtccaccttaagaaatcgggtaccccctaaatttagagtgctacaaatgattagcatatgaagaacgcagtaataattagtgaaaattaattagcaagccaagaaattagcacaagcgttgaagtgtaaaccaccaaatttgttaaaataaaccgacctaacgtggggcgtgggggttcagcattttttcaaaaaaaaaactactattatactaagaaatacggaagaaactgaatgggttaattggaggcaaagtagtcaatccaggtcgggatggatttccaaatccacgccacgacggctcatgaagcggcggggagggaggaagggagagagtgctacgggagaagaacgagtaccttgggggttcgattcgagccggggatggaggcgagtggaatgaggccggccgcgtcgcgtctccggaccttgctgcgccggccgtgcgcgcgaggaggccgcgcaggggtgggggagaaggggaggaggaggaggccgcacacgccgtgtgcctcaggggcagctcgccggcggcgcgcggcggggagggggaggaggcgaggcggggcttgcgggggagaatgccggcggtgcctctgcctccgccggcggagagagagagagaagagagagggatggagagtggagtggaggcgagtgatgagtgatgggaggagagagaagaaggggcaggggagtcatttctccatttcccctcaatttttcttaaactaaaattccaaagaacgatttttctccgaactaaaattcaaacttcctctatcccttcaatacaagagattttagctatgcaccgtctttcttttggcttatgagccgtagacaaaatttaaaattttaaaagtgattttagagttaatttagagatttattttttcgtagtttttttcgtgtgcttttaaattaaaggaaaaaatatgaatggcctcctgaactatagtggtcgattgaattacacccctaaaccacaaaccagacattcttcacctcccaactatataaatcggacaaataacccccggttcaattcgcggtggttttgatcctctcgcacgccacgtaggatcaaaactaccgcgcacgtaggattaaaaccaccatggattgagccgggggggttatttgtccagtttgcatagttatagatgaagaatgtctagttttgtgatttaagggtataattcgatcgaccgtgatagtttagggatagtaaggatataaatataaaagctcactcattaatctttttcctaattagctgtagtccaatggattaaagtgaatttgaaacataggaattttcgctagaaccggttcggctgttggaggagccgtgagcgatttcctcgttattatgctcctaggttttgacgactttgttgttgttgtcgccacgccacatgttgacgccagatcgacccagaatgaaacggaaacaccgaggtgacgatcccatcccaacgagtgtgcgtacgtatctgccgttggaagcatcgtgcagcaaggtgtcgtgttcaggtcacaaagaaaatcatggagaaatatcaatgcacgaacaaaagcgtcactttttaatcagcttaacaaggcaccttctaagcacctttgctgaccaggtcaccagaataagtccaacttcaaaccgcaccttgttttaggcctatttaagcttgttggtagctaagcttctaagaataaaaaaaactaggttttttagcttgtgacttctagtttatttcctagattctacaactatggcttcttaaaatctaaatcaaaagctagattgtttgaatgagtttctgattttgaaagaagctgcagcaaacatacccttactaatacatccttgaatgcaagctgttgcgaccaggagatcacaaagcagtaaagtagcatcaaaagcaggaacaaaaagcttagtgtgtaggaccacaccacgaatgaatgggttacaacttgcagtcacgatttacattcagaacggcacagtgatattatataatatacctctggatatctggaactggaagcaaaatagatggatgcttgatccacggatcacatgtacataaaccagtcaatagttcaggagaaggtactcaagaaatttgttgtttaatcaaaaaatttcatgcggcaatactatcaacatcctgaagcatttctttcttttttttgaccgggacctgaagcatttctttcagtaacatgttaggccaaaaaaataaaaggaacttgagctggtttctataataatgaacttataaaccatgcaatatacgagatagctagccatttgctgtaactcatctccgttcttcactggctgcaatcgtgggttggatttctctggtactgctcgaaataccgatatctgtctgttgtttccgcggttagaaatcgactggtcagactgcaacacaaactacatcatagttaggtagctcatggcaatagaactcaaactaaattctcagataattttggtggaaatttagaaagatttattttagtggtcctttgtaatgtttcagaagatgatgattgtggaccacaaacatctcaaaagaaaatcgcaaatatcaaaagatatgtctggacagttttgccatttgtctccaggatgtataatccaattcatgacttgtttaggtgctcatacaatgaccaaccgaaaataatcattctagttgcacaactgccaaagatgttaatgaagcagatggtgcaataaacagaaaaaaatcatcgtcaatttagcgattgtttcacaaaatttatcatccaaatttcaaaaagaaaaaacccttactccaaatgattacctcatttatgcagggcaggtgtatctacttctgacttgtggcctcatctttcattttggcctgaagttgaaaaggcaagaataaacataaggaaacaaactttatgaaccaggcagttctacagatgagcctatactttcagtatttctgtacactatgtaatatttatatcaaggagtatgtaactgtaaattatgggttcatcaaacctcatccacagcatctctccggaccttcctagtcgggcttctcattgtgacaagttcttctgcagtggttgggtggacacctatggtggcatcaaagttttgcttcatcaacccagcctttacagcaattgcaataccctgtcatagtaatgtacaccacaaatatattaggcaaacatgaacaaaatgatggctaaatattaaataaagaactcacaaacctgaataatctcgggtgcatcttcaccacacacgtgcactcctagaactttgttagtattagcacacacgataaccttcatgtatacacgatcaggtagaccagaaagagtggccctgagaggtctgaagtttgatgtgtagacatcaacatctccatacttttcgatcgcctacagaagtgtatagtttacttaaatttctcgtgtgtttttgcaagttaacaagtttgtaagtttacaataccttctcttcagtgagtccaacttgtccaattggaggttgggaaaacaccgcagatggcacagcactgtaaaaatgcatatcaaagagtttaatacaacagttatgccaaattacagtgtacatgattctactattgaattataatgttaaatagagaacttgacaaaaaaaaatcagatttgttagtcattttgaattgtgaagaaagaaagggatggggcagcggatgtgtttgaacttatgcactactgccacaagagataattaatgcataatgtgcacaaaatgacaactgtttacaaggtacacaatttagcatttcttgaattcttgttaatgctcaccaagaacaatcagtttgtatacacaaataagggaacatgaagcatcaaaatcgcaaggttcaagatcaatacaaatttatatggatgttatatatatatgtatatacacactaaaaatacatatacatgcatacctgtaatctggttttgtaggttcattgccaaaaatagtccttgctaatgccccaccttccattaatgcaaccggtgtcaagttcaccctgttagtaacatcacccacagcccatatagaatcaactgaggttcgagagaactcatcaacctaggataacatatatagaccaagaatttcagttatcacttaatgatcatctaataattgagaaaatgttagattatgtataatgtatagaatcataatgtatagaatctatgtagaatacacagaaccttgtttaaatacacataccacaatagcaccatgcttgtccattttgaccccaacctcttctagacccaaattctacaaaggtatggattgtatgaagatgtgtatccagaaaataaatgtatgcccccaaaacaaacttggttgagaaaagtggaaatgactggcataatattaacctttgtatttggttttcgtcctgttgcaaacattacatgtgagaacccatttatgcttcctttgtttgtcgtcagagtcagcaagccatcgtctgatttcattactgcttgaggagtctcttcggtatgaaatgtgatacccctcaaagacatctgatcggcaacaaaatccctgacctacaaatccacatggaatgagaaaataactcaaggcatgacgcattgacacacttcagttcaaaaacgaaattattgttctaatggatacttgctcacctcctcatcaaagcctctcagtactttcttctgtcggatgaaaacatgaacaccactttttaagccattgaaaatgccagcaaactccaaagcaatataccctcctcctactatcgcaatcttctcaggtcttgaaggcaggtccaatgctgcatctgaatcaataacatgctctatccctggaatgtctggcatggatggccgaccaccaactgcaatgagtatgttttttgcagtataaagctttccatcaacactgacagtatgtggatcaacaacctgcataatatgaacaggtagtatatcaacactgtcattgctgcattgatcctttcaacaaaactgtatatgcaaacttaacccaatttacaaatttgtcccaacctttccacggccttcaattatagtgaccccagaattctttagcatgtttgtctgaacccccaccaagcgctgcaactctaaattcttgttggtcatcagagtgctccagtcatgctttggctcagtgccatacctccacccaaagccatgactctcttcaaactcatgagagtatttggatgcatacaccagcagtttctttgggacacagccacgaagcacacatctgaagtatggaaaaactgaacatcttacttgcacatttttgcaattggatatgaaatggaagaaagatgctatccgcacattatagatactaagcatttcactctgcagacgctataagcaaattacagatatagaaggaagctggaaacgcgtaaggctaactggttgataacaaccagccatcgtgacagagctctctaacttttttgttacttgcgtatatggagagccattcatgtaagtatgtaaccctaatagtaaatctcatatcatcatctctacacatatattgaacaacattatagtgaataccacaaaagcctctgaaattaagcatgagctccaggaatggtgaataagaatctgttcttatagtcatagagtagactcctagtggtcgttgatcataacagagcactggatcgtgcgtgaaattgttcaatcctctcctcactactaaatcataatcctaaacaaacaatcagaagcaaaccatgcacaccatccgaattccaaacaaacattaccactgaacaatgtgtgcgacttgaactaggaagaagggtggcgaagttcactcacgttccgccgacgccgccgaggctgtcggacgcgacggtggcgaagggcatctcgcagacggcggcgcgggcgccgtagagggaggcggcgacgcgcgacgcccgcatcccgccgctcccggcgccgatggtgaagaggtcgtagtcgtagtcgcacccacccccatcgccgcccgcagcggccccgttatccccggcggaggcggaggcggagaacgggcggcgcgggccgaggcggaggagcgggccccggccccgggtggcggcagccgcagccgcgagggggtggcggcggaggtggaggaagcccccgccgccgcggcgggggaaggagaggacgcgggatatggtctggaccgcggcggcggcggaggaggaggaggaggggagggtcgccgccgtcgccatggctgctgctccgaggcttccgcggcggcgcgggggcgcgtgacgagacgagacgagacgaggcggaaatcaaatgcgttgcttcgaggcggggcgcgtggtgtggccgtgtgtggggctagccaggagacaaaaggcgaggctttgttgcttcggtgaggcatgacgtggcatcggcgggtataggtcataggtggcgctggcgcatagccgcggagccgcctgagccttgggccctcgaggtgccataagatacgctttgtaagttttaaagcgtatttttgtaactccctccgtaccaaattagatgtcattttgactctgtaaattaggtgtcgttttaactttttgctttcaattttcgatcattcgttttatttaaaaaattagtgtaaatataaagaaagtcatacttaaaatattattgataataaagtaagtcacaaataaaataaataataattatataatcttctaaacaagataattggtaataaaaactcaaaaataagtattttgggacggcggtaatgggccggatggcctgcaaacgtctactgtgtaccatcattagcttagtttagctttgtgctaggtgtgtactatgtagcctagaacggcccattcctaatagacgtggacagatggggtatcatcatttggtgacccatttcagtactccaacatgcgggaagagagggataggtggaaccgtggatgttcacttaggccattcacggtgcataactgtatacatgtaccattcaatcctaacattccacgtcatggattccataccacatctgctactcccgtaacaaagtgaagtccggagagccaaagttagccacgagttcctcgtcagatttgttagagtgttggggagggaggggaatagcttgggctatgcatccgggggaggaaccgggggaaagaggggagacaggagtggcaccgtcgtggggctcgtcgccgcccccggctccgcaggtcgccggcactaccgttgttccccgctcttccccgatgccaccatcaccaccacaggggaaagaggggagagaggagcagcgctagagaggggagaggccaccgacggagagagaggtagcgccgccacagctgcccgctaccctccagctccactcgactcgacgcctgagatggctgccgcgcttttcctcgtccttactcgatccaccgccaccagagaggagagggtaaggcaaggggggagggaagaagccgccgccggagatgggagaagccggcatggcgagaggagaggggcagcctcaaccgaggaggggtggatctagtcgcccctctctggcaccgtcgcgccgccaacgccgccgctgcttcgggggaggagaggaagggtggatctagccgccccgccgccgttgtcgccctagtgccggtgccgccccagtgccacctcgcccgccgttttctgcgcgatggggaaaggaggaagctgtgcaatggggaaaggaggaaaggagagagaaagggagataaaaagtgaaaaaaagatactagtggaacccactataggtaacttgcattgtaaagtagtatgtggctaatgcggttcttcatctaggtggcatgtgaagttcgccaaaatcacagggcgcactgctactgcccttactaggatgccacatgtggaccccacatgttttgttttactaggatgtcacgtcagtcaagacaaccatctatactaccataggatcttatttaacctggttgtaaaagatgaaggtttaatattttcagtattacgatttgaggatgtaattcaaactcgatgtcaatataagatgtaaagtgaacttattcctctatgcttggccttaaccccacccaaagaagaaagactgttacccaatttgaatttcttggtgcaaccaaggacatcatttttttttcaattttggtatatatatgttgacaaatattctggagaaaatttgtcaaattttgggacatcaatttttttcgattttgctatatatatgttgacaaatattctagagaaaaattgtcaaattttgagacattagatttactctaagattcgggtaagatggggaaggaaaaaaatcagagtgcacgcagttgagggaccacttcatgcgagcaacatgctaccccttgctaatgtttttttttttttaaaaaagaaacagttacatacacgttacttctttttgttaaaaaaaaagctcaacctaagatatgatatgacatattctatgacaagtaatctagacacactcctatctggacaatctagattggtttttttagatggagggagtatgtagtttacatgtaatttattataatataataatacaattatgttatgattatattgtatttgtgaaatttttatcgatagatatatagtttcatatgtaaacaggataaaaatgatcacggaaattaatatggataccgagcagtttaaataatagatatgatcaattacagatagatcaagctttgtttctagagatgctatcgattacaaccgttttcacccccagtaaaccttactacgttttctactgctaaaattgatccacacgcaagggcagtaggatctaaaccaacatcatcactatacttctaacggatttaagtgcttctccagctaaggacatcatctgatggagcaaccatgccaaactcaccgtgacaaccgacgaggcaccagtcacaactcacaaggtagtatatcatgcaaagcaacagagcaatctgccggtgaaacggcatacaagaaacacgtaggagtccacatatcctgtcaggtgtcaggttacaaaaattccagtgccgtccttttcgccagtggcagagcaagtgaatcagatcttattactactagagcagtgcaggtgacagtatggatggacctttgcagcaaagacaagcagaacagacgcaggcaggaggccgagattgagacgagatccatggcaaaagtgagaaacccaactagtgggaaacaagatgcattgtgtagtacagtggtacttagcctgtaaggctgtaacaactccatggggcaaccctgtggaatatgaaaataatagagactgtaactaccccatgtctccattgtgcaaccctgagtcaaatattactctaaaatataggcaaaataatgcctggaatggatggaacaacacaatggtgccaaatgatgttaggaagggatgaataataaggccactttatccagcaattccagtttataaacagcactatggccaccgaaagaggctatagtgcccccatctcaagggcaatatcaaaaattggcaggcacgaggtgtcacatggggatcagatcagcaaatcaattagcacttcaagtacagttcattcggcaaatactgcaaccttgcaatcacaatgcaatgcaccatccaaaacaaaaggcacagcaaaaccaagccggttaatggaggcgaaaataggatggtcctatgaggtgagaaactatatgctaaatatatatagttaggtatcaccagtgctatcccatgaaggaaaaaaacaccgatgagttcaaccgcgtttggcaggagaacggtttgcaggagtggtcgatgggcacgtgcagaacaaggaacccctcttacgagggtttaccgagctggggcttgggttgggagggcatagatgggcaattcatggtggtgaggcctgggaggctcgcagtgtagttaaggatccaccacatctttgcaacaagagggcctctagtttgcctttcactacaatagccaaccttgattccacccaccaatggcaatgcattgccctgcaataacagaatgcgacaatgtcaaaccttgcagagagattgcaacaaattcaagtaccaaagtgaaaaaaacatttatcatgataaatatgcataatgaagttgactgtgacaagcaaagaaatagtagcatctcttgaagaaaaaataatagtgatctggtgtcatcatctaggcagtaactctaggattatataagcatatccaagatcaatttggataaacatgtagggaccagtagacactattggttggcgtccaagataaacaaactatgacagagatctggaggcctcttctgctggcagaaaggaggaaacagtcaaaaaaggctatgtattaggttggactgcaggacaacctattaggaaaatgtcttgtatccaatgcaaataaccaaatgcactaaaacaactaataacatgtgcaagtgccagccaagtttgacagtacagagaattcctggctactgttgcaatgctctacaatgtctatatatatggcatcaacctcaggctaagtactggggagaaaggtacagccctgctccttctcttttacctttgcctcaacaagctcatcacatgttatcaaaatgttgatatacaagtaccgatctaaggttgtaccatagaagatcagcacgctgtcaatcaggttagtgtatcaaatgcaattgcatattgttgctcacattgcaatggtaagattcatgtatatcatggatccttgctttagatcaatacagattatctgctatttttagttatttccgtgatatcaaaaattgaacaatgttgtctgatcatccgattaatcgtgattaatcatcctgatcgctcccctacctccgatcaggcacaggtaagtcgatcagccgatcagaaagctgatcgtccgattaatcgacgattagtcacgattaatcgtcttatcagggtggaaaacgatcagttcatgggctgcctccctgagaaaaatataattttgggcctgccagcccagcccatgttccattttgggcagatgatgggcagcaaatgatgcttcttcttctttgaccaaatgatgcttgctttttaccgtatactacagactatagagtatttagtacataatatatagcatatatggcctgctgaacactcctatatactaaccgatcagcctcgattaatcgccctgattgtcctgattggtgcctaggcgatagggctgatcgcccaatgagagaacattgaaattgaacaatggaagtggaaatgcaatgcaaggaaaaagatcaccccaggcacggcggtaataactgctcaagagcacatataaattaacaatgaatctactatattagtataaccacaatagttgcatgaaccaatcataaaacaaaatcatgatcagccattgcatccgttctttttgttgtaatagtgatatggctctagtaggaagattggactttaagggttatgtaagatctccaacacatatcaatttatatcagttttagctgtttgcattcttaacagatattggagcttgaagctggaggtcaagatcagacgaaaaacaagggggcaactaatggaggcatgtagattaataaaccctacatttacgtaggatgcatacaattaataaaaattctcagatcatctgcacacaaaattggagtaaatcaaattggtctattgattgtttctatcttttatgttagtgggactagtaaacatatgaaaggaacttaaacacgaaatgtgacagtcaaatctcaaaatgttgactatcatgagtgcactcgattgctttgttagagcttacaattacactgttaagttctgcagtacttctgcagtaaatgagtaaatgtcttggcatttggtaatagaagaacattgacttactaactttatcgtgtctagcatgaaataaccttgaaaatgagcaggcaataagcatactattgcttgtagttgataaagaagtcataaacttatgcataggctaatgccatctattttgcaaagaaataacacagttgcttgctataaagaagttataaacttgtgcctagaatagaacatgtgtagacagattatcatacgaagttctggaaaaggtttactaacttatgattaaagattccgtaaacagatagagctaagatggcgcagaatcttctttcaggaaattggtcaaagcattaacatgagtatacaccatcagtacatgagagaagtgaactgtactactccctccgttccaaaatataaggatttctaggattcaaatcttgtaccacaatacaaggatccctgcactaattcccatcatttcaatgattccaaagcattgccaatcacatgcttggaaagggaatctaagcaattcaaaattcaaaaattgacaactgaaatgactaaaaaggtttcttttgacctaatcttagcatttgccaacccagaaacccttacattttggaacggagggagtaaaattttgatctgacatctttattttcagaagcttatattggtttgcattgcggaatacctatactcatatcagaattaagaatacacatgatagtaatatagtatgcccagtaacatttgagaggcaaaaatcatgaaattaatgccaactgagtgactgaccaagcaagtcctagaattgaagtaaaagctggcctgaccagcaagatggacataagaaatgcaagggaatcacttcaagcttcacctactcatgatgtcctccaaacaaggcagggaggcatcattcctcaaccatttatgcattggaatcctattcagctttacctgctgaaattaacaactagcagcatctgcaatcatggttgctaaatgctagtaggaaaatcatccaaatgtaaagggcaactaagctcactgctagacataaacaggaagcagctttcgtcctgtgaattgccttttcaccagaagaaagaagaaagttgtttctattatccagatagatactcaaaatatcctaattcctaaatttaccataagtattagtgagctgtctgtttcaatagcaagaacactgaacttcagagatagctgccttatttagcatatgttctgccctttttcattcttacgatcagattcaagattattaaattaaaatcagaggtctgcaatgtattttgtagctttaggcttttttggaacttacctgagctgtcagaattacaaacataacactataaaatggaacaaccaaagaaaagaaacatgcatgctaaaacatcatgaaactccactacccaactccaatgtgaaatgtaaaaatgctactatatgcctatatcctaacaattcacagataccactagctaaaacatattttccagaggtggtttgttatgaatacctttgctggtccaagagcagcgatggattcctcccatgacactatatttgatatacatgtggcaaacatagctagaaactgcaaaagtgaatggaaaactctgtaaattatgataagatgtagagaaccgaactcaaaataaattatcttctagcttctgagagaaaaaccaatgttcagagattctgtctgaaagtgaggatagaaacatgaactcactaacaaagatactacggaaaaggatggccaggaaagctaagtgcaagcaatcatactgagttgataataggaatctgatatcaaacaatatctgatacacgagacactacacaaggtactgccactatacacataacttccatgaccatgcagaggtcaagtctcccaaggatctgaaaccaatccttatataggaagacaaccaggcttcatgatctactagtagcttgtacagccccaccactatgaaacaatgacgcaaccgatcttgctagtggagttggttgtcgtatgcatttaatttggacctatacaaagaaatggatcttgcattgcttaacaattaaacaccctgtttttaagtaaaaattactaccaaatggagttagagtgaacttgtcagtcatgatgactaatgcaagactacgatgacgaagaactccgatgagaacacatgcaggtcaatacaaagcaggtgaaagttgttgaggcggtaggtgtgtgttgatcaaatcatatggtaattgaaactgacataatttgcaatttggagcatgttttcaattgttagcatataggagtagaacaactcaaagcaaagaaactataatgaataaaaaaaactaatgatttgatgccatgacataagctgcaacaagcgtagctgtctagcacacactctctgcaaaatatactaactaacaactattgatgaaagagatttgtgtttgaacatctgtatagtattgtgggattcaagacatattacatatgttagttttttttacatgatgatagagatattgtagagatttttttttgtgagcatttgaaatttgaacacagatcaaagaaacaatccaaaatgagtgcacagcttatgtggtctagagaaattagttagaagtgcaatgtgtaaacaaaatttaatgcccatcgatgtttctatgtatgacatgaaggtgtgattgaactaaatttctcatgatttatggtagttggatacaatgtgaaccatctacattcagaattcagtgaacagggaatcatggctgaaaagaaaaaaaaaggcataatacatatagtgtaattagcaaaagattaggacaaatcgagtccatgacattacattacaatacagcataaccagtcaatccatgtgttgcacaaatccaagaaagatgactaagactaccacagttcagggagaatcggaaccttgctcggcaaaggtccaatatatttaatttttcccaatctttcatggaccccaatatcacaactaaagttgattcatttacctaatccccaaagctgggtgacaaatgaaaatcagtgttgatgtgcttttgaataaagcaacacttttatataagaaatttctggataattatgaaatggcaagcatttggtagccatattttcgatgacatgttaggcttttagagagtaaacatattcaagaacaaattcatatttcagtaacacgacctttacaaagtaaatacaagttgatcatttccaggtaataagaccccttgcaaacttgctcatgatcctgatagaagtttcatacagtggttgttttgtaagctatggatttgtgtcaaaatagggggggaaatatagggaatacatccataaattacacttcaataggcatatgtaccgtttatctggctatcctaaaccagatctgttactaaggtgtaacacattttccccaatttgtcatcccaaccaaccacaaatcctgaacgcagactcattgcactgtaacaaggtcctaaaacaaaatctcattgataatgtgaaccacacatgacaaaactccttaattagcaccggaaggcccaagggtttgcttaatccatattgatccatgggctattgctagagaacaaacattgctaccgaagaacgcatcaaaagcacaatcaagaatagacgccatcaacccatttgctatgactcatgagagcaaccacggcccagcctgagtcatccaccacaccacagcaacaattgggtgtgtttggttgcttgcattttcctagcctggctcatctctttcatcctggttgagtctagcccagatgaagagatacacatgcaactgttttggttgtttgcatcggtttagcccggctgagatgagattttgtttggttgagtgcatgagagatgcggtttggaaaatattttgtttggttggttggatagatttgagtctggttacctcttcatttaattgggtgaggttacctctataatatcccatacaaaaatttcaaatctagacaataggtataaacaatttttcacatacaaagaataatattggtattaaaaatcagccagcattctttgcaccaaagcgaaatttgttgagttctcaaaaaaaaaaagtcaccaaaatttccccaccatttgactgcaaagcgctggaaaaaaaaagaaaagaaagatagaagcgtttgtcctcctcattgtcgtcgaggagaggagttcttgcctcatcgctgccagccgttcccggctcctctgccgccggccggccagtaccacgctcctccgtcgctggcctctcatacggatctgccacgcgcgctcctccgctcttctctcaattgaaaatagaaaagagaaaacaaaaaaaaatcccctcaatctcatcgttgacttgcttcaccggcgctcccagctgctcctagctgctcaacgccaccatggtcgccggatctggtggcctggcggtcggagaaggcgattgtggcgacagaaaagagaggcggcgccggcaatggcgaggaagccggcgatggagatggcaagggatgtaatagcggctgcagcttctccaccggggtcggccgagggagctcgaggtcggccgccagtccaccatcggagaagacgccgaacgagtggtggtgaccgtaggggatttggtggaggcggcggcggcaagggagagagggaagaggagagcagttgagaatgggaagatgaaaatgagagggaggaggtgagcggacgccagacccctgccacgcgcgtgcacccactgatgcaacgcttgcatccaccttgcatcgagtgagccaggctgaggagcgaagaaagccatccggccttccattcaacccagacgccatagggccaatgcatccagcaaaacgttgcctcgatccccagaaactaggccccaagacggaggaacaccccccaacatacatacatacatcgaaattcctaaatccatctctcctaaactttatagccacaccttccgagcaggcggggaggggaaacctagccccaccacgcccctcggcttgcggtatacggggggaggaagagagagaggcgcgcgcgagggaggggaaggggaagggaaaccgtgggtgcgcgggctctgctgctccgggtttcccgcgcgaaatcggcggcgcgagtttactcttttgcccctgactcactacccccaacccgaaacgggacgaaacggacactgctctcctcactcaccttggggggcgcggacggcggagagcggcgcctcctcctccgatccgtcgccggcggagtgagaggcggcgggattggagattttggcgaggagaggcgatttgtggggagaagcgggggtggcgactggcgaggtgatgacgggggcagtgtcgcagtgaggagcagaagcaagcaatgtaggttagtcagctcgacgtgccacgtggggtctcctattcgttaagaggagtatactagtaccgatttgcaatacgctagaaaattacctatattatacaatactacctccgtcccaaaatgtaacaacttttgctatgaatatggatatatagttgttcaaattcatagctaaaaatgcttatattttaggacagagagagtatatattaaggatggaaaacgaaaccgctttgccatatttggtttttattttctactaatatttttttataggattagtttcagaaaagaagcacaggatagagtggaggacgactcgtattttaaagcgagattgctaatatgcactcagacgtgtgatgacaaaggcgtgcgtcgtgtgtggctgatgccacgtggtgtgcaggagaggccaagggtgaggacacgtcatagcttttttatatatgtacgtatttttatccgttaaaagtgtatgtgtatacatatgtataaattttatatacgtgtatacaaagtttttattacttatataggataagtagtagactagagggggtgtgcatcgctagggggaggcacgcgcacaggcaccaattagggctcccttttaaagtactccctctataaaaaaaatctagttttaggtttaaatctgaatacacatatccaaatttaaatctagagttagtttttttaagagaggggtagcagagagaacacatcgacactgttaggctagtttaatgcatgcgttagatgtagcgtaacataagttataagttgtttgatttattggtattttaatattttgataatactaaaattactatgaaaaaattggcgagatgtggttgtttgatttggttacaaatctttgtaggtatttgggactttttttttagactcctttgaatcactggaatgaaaaaacggagaaataaaaaaaacataggattctgattagaacgtaagtgtaaaacagatgattgcaaaacataggaaaatatataggaatgactgtttaattgggccgcataaaaaacacataaatttaaggagagataaagattcaaaggattcttttcatgagattctatcccaacctcatgttaaattttcttcaaaacttgtatgagaagagtcatttcataggaatttcataaaattcattccttcgattcaaaagaccatataggaaaaatttctataggaatgaaatcctctaaaatttctatgaatttcttttgattcaaagagagccttaaaaaaatggcaatgacatttttttgttagcaaaacaaatgctatccaactctattagcattatgtttttctttcctgcaagttttggcatcaaacatgcttatagacctgctcttaatttggacaaggaattagactaactttcttttagaatcggatggtttaattttgaaagaaaagcgaggttaattggaacaatgctaaattgagccaaccagaatgagctttccttcgaagtttgaaatcatgagcgttgcactactggtagttccaagttctgtagataaatttagataaaccgagatttaattcttagagcatcgatctgcaatctacccatacaaaaggaatcaaatgctttatacgcacgtgtgatcaagattgtcagtgtcacgaacatatcatatgctccctccgttttaaaatgtttgacaccgttgatctttttaatacatgtttgaccattcgtcttattcaaaaaatttaagtaattatttattcttttcatatcatttaatttattgttaaatatactttcatgtacacatatagttttacatatttcacaattttttttaataagacgaacggtcgaacatgtgctaaaaagtcaacggtgtcaaacattttgaaacggagggagtagtattgtatgatcatagtatcatagcaatcctggctaaatgatatgcgttgaactacaaatcatttttaggcaggattgccgctgtcgatgtttgatgtcgcaattctggtatttgtatagtatagggatcgtcggtgctaggatatacgcgagactgaggtaaaagagatggagacagggatttttatacaggtttgggcccctgagttgtcaggtaataaccctacatcctgttggccggagccggagttgcttttattcaccataatcacaccagtacaatatgtggggtagcctatctaactatcgtcgacatggcggtctgaaggtctgactcgtagtcgacgtcgacgacaaggtagtcttcctcctcgaatccgtgcccagcgagatcagagatagcgctttcgtctctcctgacagtatccggagacaccgtaggggactagccgtgcctatccctgaagtcgatatccggcgtcttgtcttggcgtatgttggcttgtatgttgtcccgtgtattgtgtctcctctcctcctatgggccttgtatttatacccataggtgtccccttgtccaagtagaactagggaaaccaatatggatacaatccgagtagttcttgtcatttctatatagaactctggttgtctttccttatccggaactccctccatatctgaagtcagtttccgtataagacatggtatgtggtgggtcctgccgagatgtagtcgactactattaggtatgtggtatccataaccctaacagtagcccccgacttcaatgcaaatgaacgaattcatattctcaaccgtagaccctggagtaactgttgtcgtgctcatgtgaccgttctcggcgagttcagagataacgttagacttcccttatcagcctcgtgcgggcacctatagggtttgtctgagtcaatctccgatgtcaaccaaggaagtacggagtagacgactaagtctcccgtcttgccgtaatcgagaatttggattgaaatcaagaaattctatctcggctggtacaccatctctttatttcgtattccttgtcgagatccagcaaccattctcgagcgatcgagaaggtgtagagtctgcgacggagccttgtcgacatttgtcgtactcgccttagtcgatcttggtgtagaaccatagagacatggagtcttcgtcaatgtcgaatagaattttcctgaaatcaatactcagaagagaatatcaaatagaaatagcccccgagcgaacgctcaaagagtgacatgttataatatatatggaaaactaaaaatgaattaaatttaccgaccaatgttttgtgtatgagcttcttctctcttaccgactttgatcagtcagtttgtagagtcatacactctccctagaccctagccttgtcgttggagaatcgttctcggaggagaaggctcttggacccttgacctgccttggttgaacaagcactgatcctagcccccagccgtgaagttggaaaactcaatttccgattacatgacttggttaatacgcacggcgagaactcttacatgaccagatcttacatggtcttttgtctctacaggatccgacaaggccttatcggctctgggcgtccccagccgaagttcccttaggttcctcggaggccttgtcaagatggcgtaaagggacagtaggataggtttcaacgctaggtgtcgtcgtggtaaggaatctctgggtaaaacacttggcgatagtgtgtacctgataccaactttgttggagtagaggtagtaggagaatcgctacaccgctggtcgaggaccaggtagtagtcgtaactcgaccacttgaagtaaaggtagtgggagaatcgctacaccactggtcgaggaccaggtagtagtcgtaactcgaccactggaagcaaatgtacgagagatcactacgatcaactggttgagaaccagtgagtaggtgtctctcgatcatttggagtcgtggtacgaggaccgctacgctgccggtcgaagactagttgtagctgttcctcaaccatctaaagtcatggtgcgaggaccgctacgctgccgtagtcatacctcgaccatctgaagttaaggtgcgagagattactacgtactggttcgagaaccagcgagcgagtagaattatctctcgaacaccaatggaagttgcggtgcgagagattgctatgtactggtgcgagaaccagcgagcgagtagaattatctctcgagcaccaatggaagttgcagtgtgagagattgctacgtactggtgtgagaaccagcgaacgtgtagaattatctctcgaacaccaatggaagtcgtggtgtgagagattgctacgtactggtgtgagaaccagcgaacgtgtagaattatctctcgaacaccaatagaagttgtggtgtgagagattgctacatactggtgtgagaaccagcgaacgtgtagaattatctctcgaacaccaatgaaagtgctagagttggtttattacatgtgtatctcatgtggccagcatgactcacatacccaacttatagcatatccggatatccgttcgcaatcatgtcgggtgatcaagccgacggcgttcgtgaggaattatccgttaacaaccttttcttgagtagtccagcgatggccggtgctatgagatagatcgtcggtcttcgttggtaggttgggtgcgataactccgcatttgtcgataatgttctcgataatagagtgtactcgaccataacctactcgagtgctcaattgttcctaaaaaatattttctagaaggcaagatatatagcagataatatcgagtatgtacttaaaaaaactgcatggatcttctagcattatcaggatataacatgcagatgtaaatatcatgcattatgtaaaccgtaaacaagcatgatttatacagaagaaaacagagcgagcccccagcgttaggccgtagttggcctaacatcggggacgcttgcacaatagatattgtataaaaaatatgctctaggtaaacataataaattatagatctgataatgctgtatgatctgaataggtacgataaattacatataaaatattacgtacttttgtagatacatgccggatatatctacgaaattagtagattaatttaaaaattcaatctgctaattacctctgttgatgtagttggataatctgcacatgtacaagtgaagcaaccgtggatgagtactgtggtggttactcctgtatacacgtggctctttggctttgtgcccacgcatgtagacaaattgacagcaagaccaaaatatacacgctgtaacagcgtgacgttaggtcctctgccatggtttgtattccgagtagaaatcaaggagattaatggatgcccgctagttagcctggtgcatgcgagtggagcggcatacagggcagtttcgctgtccttttcgtcatgtgcttgtgtgtcatcgagaatcaacacgaagccgacgaggacagggctcaagcgggagcactctcctgattagatttttggcggcgacgtggtctcaaagtaatcaatcgggccgaggcctcacgatcgacaacattgaaccgttgttctccgcagcggcgacatcttgaagcttggtcgatctcgccggatcgaatagttaatgatgatggttccgatcttgtcggggcacgtactctggtcagattagatctccctctcaaccgaagtcgtcgagtaggttgttgttggagaatccatctcttaaactcatctcgtcgaaaccctgaagcaccaaaatccccctacctggcgcgctactgtcgacgtttgatgtcgcaattctggtatttacatagtatggggatcgtcggtgctaggatatacgcgagactgaggtaaaagagacggagacagggatttttatacaggttcgggtccctgagttgtcaggtaataaccctacatcctgttggccggagccggagttgcttttattcaccataatcacaccagtacaatatgtggggtagcctatctaaccgtcgtcgacatggcggtttgaatgtctgactcgtagtcgatgacagggtagtcttcctcctcgaatccgtgcccggcgagatcagagatagcgctttcgtctctcctgacagtatctggagacaccgtatgggactagccgtgcctttctctgaagtcgatatccggcgtcttgtcttggcgtatgttggcttgtatgttgtcccgtgtattgtgtcccctcttcttctaggggccttgtatttatacccatataggtgtccccttgtctaagtagaactagggaaaccaatatggatacaatccgagtagcccttgtcgtttccatgtagaactctggttgtctttccttatccggaactccctccatatctgaagttagtttccgtataagacatggtacgtggtgcgtcctgccgagatgtagtcgactactattaggtatgtggtatccataaccttgacagccgcggtatcgagatactagatattgtaatcagacaatgtttgaatctagaaattagaaccatctgaattggtttatgttcatctatgaaattatgtagtagtgaataataataataataataataataataataataataataataataataataataataataataataacaacaacaacaataataataatagcagcagcagcaggagactgttcgatacgtgaccttaaatacattcttgaattgtttttggggaggaggacagataaatatcactgagggttgatggataggatcttctagggtaaggaagagagagggtgaatcctatctccatcatcatggctttggacagatgtccgcttcagactgaaggaagctgctctatttaagccgtacgtgatcctacagctcttgtctcatgagtagtacttttccctgcgctggctgtggcaaggtccatgagttgagtgattagagctagtagaagccttcccggtaattaatgtatggaacattgtcctttggtttttgtgagtacatggctagaataaacacctgatgtctagctatagaatagatagattagtgtaaaaaatatactaatatattagtgaaaagactaatactctggctaacagcagctacatgcatgcatggaagcacctactagtacttgttggttctgtccctttagcatagtcacatcaactagctatcttctattagtagctgtcatgcatgaaaatttatatattgaggctgtgtttagttcgtgtgctaattttttttttaaatttacgaacacacatttgaagtattaaacatagactaataacaaaacaaattacagattccgcctgtaaactgcgagacgaatttattaagcctaattaatccatcattagcaaatgtttactgtagcatcacattgtcaaatcatggcgtaattaggctcaaaagatatcgcaatttacagtcggactgtgcaattgatttttttcgtccacatttgatgttccatacatgtgtccaaatatttgatgtgacagaaaagttagaagtttgaagaaaaaagttggaatctaaacacggcctaattaatatcaaagatttgcatatttggctaggcgaaacgcacgggtagaacgatagaaaactaggcaagactacgcccatcaactattttacttaatcatctctaactaaatttgcttaccattattacattgagatggtgatactaacaatctaacagtaaatattattaatacacgaataatggattgatgattttatcagtgagaataataacgtgatagtgatacttagcctgagacggccgatacctgaaacaacgatatcgagtcggctgatatcagtgtgagatgaggaatgcctcacacaactagggaattcagcggcgtgattctcagattagggtatcactaattgggggagaaaatggattgaaggaacgatattatgacgattattttaatacctctgcagtgtatttttaactcatttactatgttaaatgtcttctattatttatcggttgttaatatctaagggtagtagtattttctgtctttaaaaacatctatatagctatatgtactaatcttgctgagtatgtgtaatatactcatatatttactatttgatgtgcgcagaaactagtcaagacgagatgtccgagggaaatgatgacatgcaaacctaatggggagcgtggtctacttagtctttagaagcatacaagaggacataccatcatgctaggtatagggtatcgtcttggtaataataagttggtaagcgaatcaaccgatgtattatgcaatgtagctggtgaaaaataaatggaaccattgttgaaagtgtccaagctctagttgtgatagttagatattacatcttgccttatatccttatggacttatatatatatatatatatatatatatatatatatatatatatatatatatatatatatatatatatatatataaggatacgacagactgtcaaaaaaaatatttgggtcgtgacaaattatgaatacaaactcggtagtttattgtcaggacctaagttaaatgaaacattatctctagtgtgtagttttctcttgataaatatttgtatgccacatattattattactctattcttgttctgaacggttacatataattgatacaaatacggattaatggtgtagggggtgatcgcaaacgcgcgccccaagcggcaatgaggaagaattgcatttgcgtgcgatagcgggtcacagttaaggtacgaatttccccactagcatgaactctgtggggtcttcaaatataagaggcaaccatttcttcttgatacacaagcacaagcccttttgagaaacccttgtagattgctcgatggggagggaggcagtgctgctaggatataaattaatagccgaccaattcggcttcgtcattccatctctcctgtagaagtaaatagtgcggtttcttgcaaaaacctctctctcggccagttatctttcggaaatgctaatgggcgggtgatcnctcccccacccgcctagcgatcacccgcccaccctctcccctatactactagatgtactcctccctcttctcccccttcctccttcccttctcctctttctactacagtaaaccatacaattttttttaaaaaacaaaagttagaaaaatttatgtatagaaataccatatataaaaaaaatttgaattcaaatttaaatttgaatcgggtatgtaaacttttgacttataaactttgggtctataaactttaggtgtataaattttagatgtatagaaatactacatagagaaaatatttgaattcagattcaaatttgaatcagatataatttaaattcaaatttgaatcgggtatataaactttaggtatataaactttaggtgtatagaaatacttatatatgaaaaatatttgaatttaaattcaaatttgaaatgggtatataaacttttgacttataaattttaggtctataaacttgaggtgtataaactttagatgtatagaaatactatatataaaaaaatatttgaattcaaattcaaatttgaatcggatatataaacttttgacttataaacttttagtctctaaactttagatgtgtaaactttaggtgtataaactttagctgtataaatttactaaaatatgaaagtaatgcggtgccaaaaaagaaaaccagaggagggaggaaggggggaggtggggagcgaatctgatcgctatcccatccccacggtgatcgattgcccattaggcgtacccgttatctttcacgacagagctatcctttgttgacgggtcgtgccactagattactatcgtctatggcccgcaaactgacccaaatataatttgttttctctatgaaatccgagatattagagcccatcgtgtctgtcctgggatcataatagccaatttcaatctaatctatcgagaccaagaaaaacaacaccaaccttaaccggcgaatgatgggccgcttccgtctcattcttaatgatctagctctgcaggagctagtacatcttaacggtcgttccatacttccatcatgtggtcgaatgcccgggattcccgagcgcctagatagactgttcgtctatgtggatggggaagagtttgtttccctcgttaccttttgaaaccctcttctctccatgttgccggccctgccagagaaaaggagattctaattcgaatccttctggtgtcgtctccctgctccatccatgacctgatcaaattgatgcaaggagaacgctcctgaggaagcatcgaaggcaaaacagtgaggtattttcccaaaccattagatttacaaaatgatctttccgtttgcttattatgtatcaatcttccataggataatcagatggataatttgcatgtttattatgtaaagaaacctagaaccaccgtccaccactaggccgtcgtctcccacggttatccccctaagcccagcgatttctcctctcttccatctatcccaaccctcctcctatccccacccaacccgggaccctaaaggcttaaaccctaactcatcgagtcaccgccggtcgccagagttagagtagaaggagtgcatcacgaatcgggacataatagaaggttagcaattccgatatttaaaacatactacctccatctcataatacaactattctagcatttaaattttatccataatagagctgctgctctatctatttcctcatcataatcaatggcaactcccttttatttagtctcatcctattctttgattattatttttaaaaaaaagtgtatcagtaaaacggagggagtacttagtgtctatgtgatgagtttaaaattttgagaaacaactggttagtaactagcttatgagagtctggaaaacccagcttctagcttatagttcattttctagattttataactacatcttcttataatttggatgagaaactggactatttaaaaaagttttaaattttataagaagttgtagctgttagaagctttctaaacatgtaagaaagcaagaggaatgtgttactccctccatctcataatactgtaatatagcaatttagtaccggttgaaatatattctagtattatgatgaatctaaacaagttactaggttactatattatggacggagagagtatatgtgattttcctaatagtgtatttcctccgtccattaaaaaaacaaacctagcacatattaagacacatcctctccatctcatagtactgtaatatagcaatttagtaccggttgaaatatatcataatagtatgatgaatctaaataagttactaggttactatattatggacggagatagtatatgtgattttcctaatagtgtatttcctccgtccattaaaaaaacaaacctagtacatattaagacacatcctgatactacgaatctagatattgtgttatattccgtactactccttccgtctcgtaaaaattaacctagtattaaatatgacacattctattactatgaatctggatatacatatgtccagatttattgtcctggtatgtatcgcattcaattttgtttttttatagagagagtagatttgtattttatttgaccgagagaatgcatggcttaatctttgagacaagcatatgaaaaggataagaatctgcacccccataaaaaagtagaggcccgaaaagagcccaatacccaaaggaatccacccaagccgatggtggttttagccacgggtctcagtctcactcccagattctactcccgctcctccatcgtcgtcgccgcgagtttgctcctctcggcggcgccctcctcgtcgtccccgcgcgctcgtgccgctgctccggccagcgggtactccccgtggcgaggcaggtgagcggggctcttcgagttcacgaggtgtcgtttttttttttcggggggatttctccaggaggattagtagagatcaggtgtgtcctcctttggatcgcttttatctgttcgagcgattgcttggtccggtagcgattcgggtgtgagactgagccatctgcgcctctgttactgtttctgttttttcctttaatggggatggttttctgaaaattaggatggcacccagcggtatgagattgttgtggattgtttgatttcctggtggttggtgaagtcagaaattgagcagtactctctgtcataagacgttttaactttggtcaaagttaaactactctgaatttgactaactctgtagaaaaaaaagtagtaatatttacaacacaagcatagtttcattaaatttatatgatgctatcaactgtgaagaggcttcgaggcaagatctacaaacgtctgcctcggctcgctaccaaactcgtaagcaaacagcgggacgtgaagcaagccagctacaggtgctagacggctttctcgtcaaagcaataccaaagtgtttcaaagaaggattaccttgacttaggtctgcctccggcctaaattaaatcaacctaagttaaatggagtctctatcgttctgctgcaccccttctcaaacaacgcgtttgatttccttccttataccaaaggaattccttctttctcttgccgatcacatccaagggtcgaatacatcctgtctttgaacctttgtagtcctatgcatagtcagtactatagcctcactgtcctcgtcgaggatagttattcattaaggttaatttgattcaatgaccagaattctgcgaggatatatagctcggagacgacgggcaaaaatgcgttcatttgcctcaaacttttcggggtagaagaactcgttagttgtagttgttccgaagggacaagtcgctcccctctgctgaccggaggaagcactttggaaaataaaaactcgatctatacctccgggcagcagagcagagggaacggagccctcgtcccgaggcctttctatgaaggcgagcagcccagcccccttgttgaaattttgatattaaggaagccgtatttcgcaatagcagctccgagaagctgggcttagggtgcgcctcctgcggtcgtttcagtgattcaattggctggcttcccccagctcagactgatgccgccacctctcccaggaccggaatgattatccctgcccgatgggtctacattcatcctagaatgtcgtcggcatccaagctttgaacaatactaaaagctgcaactcgtctgctattccgatcttcctctgatccaagtgctaccagttccttcttcaactccaggccaggcaagagccgagaagggcttcccaaatttttcccgcggaggaaggagaatccgcgagtccacgacctcctactcccgagcggcctctgactgaaaaggatcgaatttatttgagtttggttttacatgcggatctggaaatgcaagaggacctagaagaacgttgctccttagatgtatgcagctgaggcatcctaacgaatgaacgatttgaaccagttccccaacctgctttctccccgagaaagccttcctgagattaaaagaaaaaggtttgaaggttctgggatcagtgatagttcggaaccagcaaagggaggctgaaaagccgtagtgctaacgcacgccctgtagttttgaagcaggcttcgacagcagcgagctccgcgtcgaaaagcgaagcgagccgcgctagcgcgctacgattattccaaaattgccccttcgctttatcaacttccagttataagttgtaacttacttcaaacgatttgagacctcttgatatccaacattgttcttaccagaaccaaaggccacaggttattgctaatgccttccactatactcaacctgcatggcaattacttaatcaaagtcaagatgcctatccacataggaaaaacccaaagtcaaaagagcaattggcctgcaaaaataaaggatttgttctcttttgtaattagaacaaacataaacaaattggatagaaaaggagcggaaaccgattgattgtacacttgctgttctcaactgggcctctgaatctcctctggtttcacctttgcgagtcgaagtaatttccggaaagacacagaggagctctcatgcgtggaccaacagtagccctgtcctctcctctttgttggaagatgagtacacatcgggtaatccgcccacgagagcccaatcacaagaggctcatatagaaagcaatcagcccatagcccaatatcgagaccacagcctattattcaaaccacaaaggatccgtctttcatcgtccaatcttctcgatcgaacatattgacatcaatactcctttccatggccattcacggcccgcgaagatcaaccactcgtgcccgagatcactatccaatcaaaaaccagacttccaagatccatctcactcagacccttttgaatgtagcggataacaacggagcggggctatcgaattgatatgtattcgaatcttaggagctggtaatcactgatatgctcatattggtgacgttattgttgctgtaatcaaagaagcagtgcccaaaatgcctctagaaagatcagacagaagtaagacgagctgtaattgtacgtacatgtaaagaactcaaacgaatgtcaaaacaaaggaaagatgattatcttataggaagactgccaacactgactggggttgttcaatcttaagtggagtgagttaaatgacttggcttgctcaattccttcccggtgtaatttcataaaaggaatagcactcaaagcttgaagataagttttgtactcaattaatttctcagtccctctaatcgggtgggcaccggccggccggatccccctgaaaaccgtacgtgcgggtctcctttttgggtataaagataaaggagtcgagtttacaattgaataaattttcataatacatttgtcttgggttaaaaatattactattttttctataaaattagtcaaacttagagtagtttgactttgaccaaagtctaaacgtcttataacctgaaacggagggagtaatatgaatcactagctagctggggatgtaatttactaatttacataacatgtgattgaccattgctgcagataatatgtcttgtccacttcggctagttcttagtttgctgtattaatgtaaaatcagttttattcagtggacagtgatctattagcctcagtgccgtggttgctttattgggttcaaaagaattaattgaattgttgcaaagaggcaatagttttgatagtgctaagacaatgacttgtattgtaaaaaaaaaaagtgccacatgatggggacagcgcgatgaaaagaaatcagttgtaatgacgcacaattgttttgttcttagaatatgtattgttttatttttatttttatgttgaggacctagtagcaagtcttatgctcgaaattcttggtctgctttatgtagtgatcacttgacccatcttttctggcaatgctgatttaacctcattgactccatctggcagcattagtagaatatcatcgcacccaacagctatggctaccacacaagcctcagaagcagccactgagaaaggattgcctttggggatggatgtctccatggtggatgaatatgcttcccagtccaagctgctgcaggaattcgttaaaattcccactattggcaacgcttggatcttcaattccaagactggtatgtgctgttattgctatctggttttactgaacttaggtttcttactcttcttctcgtgttgtgcagaaaacacatctagggcgatagtttctgttggccaaacagatctgttggcaaacaaaaagaggagcttcctattaaattcccacatctcaaaaaattcctcaaattctgtggatttccagtggtctcccttcccaatcgaaatgagtggagtttcagcagtaattccatcgccatctgggagaaaacttttactaatacggaattctgaggatgattcccctacaaaactagaagtttggggcccctgtcagttggagaacgagattcacattgcacaatctgttcatggatcactctatgtcgacgaatggtaaactatcctgcctcttttagaacaactttcttagttttttgtgtggtagtgggtttttttttggaagaaagacagaggtaattagggacgagagattgctccattcgccactttttgtacttcatgtttcttaaatgcaggtttgaagggatatcgtggaatcaagaagagactttagtagcttacgttgctgaggagcctcctcaaccgaagccagaattcaatgattcaggatacaagaaggctggctcgtctgaaaaagactgcaagagctggaagggaaaaggggattgggaagaaacttggggagaaacgtattccaagaaaaggatacctgcattgttcgtggtcaacatttcaaggtgtgtttctggttgttctgaaggttgaatccaaaatagctttaaaagtactgcaattttgtgaggaatagtttcattgcagcggtgaagtgcgagctgtgaagggcataccgagaacattaagtgttggccaagtgatttgggctccatcatcatcacatagcctggtttttgtggcgtggtcatctgataatggttaccaaaagacaccaaggaaacttggaattaaatactgctttaacagaccttgtgctctgtatgctgttcctgatcctttcatggaagaagctgataagccatcacttaagtgagaacacctgtccttgatgacaatatttattcagttctatttcaactatgcaccattgtaggcttcctgttctaacatattaaggtattaattgtcacattttagttattttctagtgatcgtgtgacactgtaaattcttctctcagaataattgtagcagcatatttttttcaaggaaaaaaaatcttccatatatattttcactcttttttcctcattaatcctagtcctgagcagacaaatgctaaatggattgtatgcatcatgtctcaaaaaatagaaagtttatttctgatgtcatttctgtttattgtacagtgtcagtaagggtgaaactgcacctacaaccaagttaacatcagagttgagcagtgcttttttcccacgattcaggtaggactgcattcagttttctttgctcagtactgttattcagtttaggccatatgtctcaactattatattggaagaagtacaagctacacatcctagccgtatttctttaattatgcattataattgttaggcgtaatttttcttctatggtttaaaatattttaatcaaattcccttaaagcatgtcaattgattgttcatgcttgttatcatgtattttaacctaaatatttgaacaatcataattcaaatgggagtgaatttggaaagtggagcattttgggctgatgagtaggtgtctttattatttccttgttcctgtaatcctgtggattgactcagtagatattaatttactgcaacaccaatacattttatttgcacatctacaattgaagttttcatgtctagattataacttagtactggtagctgatgcatgtagatgaatgttaacaatgcgtcgcaaaaatgatatggaatctttattgtacagtccagatggaaagtatcttgtgtttatctcagcaaagagtgctatagatagtggaacacacaatgcgacaaattcaatgcataagattgactggcctgcagatgggaaattggagggcctcagtgttgctgatgtggtacaacaatgcctttcctttacttgttaattttttaatcgatcattttgtttagatggcttccttttatatatagcttcaaagtcatggcttggaaaaatacataaatctaaccagtgtttatttgagcacattgtttgcctgttggctatacttgattaaagatatgtatttctggactttgtgaagtggaacttcaattatttttttaattattgaagtatctaaattcaatttcagttaaaagaacgaagttcagagggtaaaatttataatggtgtgtttctttttataggtgctctgcatatccgatatcaagttcttaatgtcttagctgttatgtaggtacctattgtgatgtgccctcaggatggttgttttcctggtctgtactgctctggcatacttaggaatccatggcttactgatggacaaactatgattttatcttctatttggggaagtaaggaagtaatactttctgtaaatgttgtgaggtgattacaagcatttttatccatcagttagaatgatatggctataaagtttatttatttatgaaattacctattttcttcacagccgtgaagtttcaagagttagtcctcaggattcggattattcatggaatgttcttgcactagacaaggataatattcttgcaggtaattccgtaccgaagttacagttgtatcccatagttcctttggataagatttcatattcatgtgcctttcccaccttttccagtttcaagcagccttattacagttcctcaaatatactatgggtctgaggtttgtcagactggaaaaccaaaccaatgggagtggcaagaaattgcaactccttttccgagtccttctgataaggtataactgaaaaaatgcgttgcttgttcaacttttccccaaaaacactgacaaaaattttggcagtgtaaagtactaacagtttctgtgatgtatgtttggcagatcagtgcaatattagcagaccataagttcagtatactcaaaatcccgattagcaactcttctaacaaactcgctgatggtatgtgtacaacccaaagctcctttctttaatgaaatgacagacagctctcctgcattcgaggaaaaaaaaagcctctgactgtttttttttcctggaattggtactctttggtgccttgtgttttgaatacttctgttactgcattcttcagttgacgctatgtttttcttgagatcagctgtactgtctagtacttgtaggctgatatattctgaactgcgacaaaatctaaccatgttgcatttactcaaggcaacactaaaatgcatttgtaagaaagttctcaaagctcatggtagaatactcttcttggttgtttgcatccttaaggatgcatgctaagcttcatttgcattttaatgtttgaaaatgtactttagtagaatactcacatcctctccccttcctaaatttttatattttataaaattgattcaggtgctaagctgccctttgaggctatttttgtgtcctggaaggattctgcaacaagaccaacaattgttgttcttcatggtggaccacacactgtttacccatcaagctattcaaaatcgttagcatttctttattcacagggatataaccttcttgttgtgaactataggtgagctttatttttttttcttccagtagttcttctgttgaactaggttaaaataccctgtcctttctgaattctgctttggaaatatatcatattaaacactaacattaatgtccacgtacacaccattctgttgcctagaggttcactaggctttggtgaagaagcactacaatctcttcctggaaatattggttctcaggtgcactgttgttgatttatttccatgttttaagattattttcttaagttgccagaaattttatatgaactgtcattacgtacaattgtttaatactcatgaacaggatgtgaatgatgtattgacggctttggactttgttataaagaaaggattaatagatgcatctaaagtagctgttgttggaggttcacacggtggtttcctgacaactcatttgattggccaggttcttagcatgcctttgttattctgaattctttatctatgcaattattcattacatttgcagtttatatttcctttagggattcaattatttgtgcctaatcgtttgcacaaataatctagcacaattcttgttgtaaactgtatatactcatttggacataattgggaacagtgtcttttgataatgtgtattggtctatatgaaactcttatatttgagaaatgtgctgtaaacttataattttgggagggaggttgtaatttgtaaaagagagtagtaagtttaatataagtacccaagcacactaagttatggtcagtgaacttaaaggctcaaagctaaacttggatatttcaggagctctgtagcagtgcacagctaaaaattcttttaaaaaaatgatgacaccaatttatattagctattaaattatatattacattgcaacgcttaagtccagaataatatcctagaaaaacattcttacaagagttaggatcagcatttgtttccttttcttggaagtaaagcttcactgcagtgtaagccgagctgtttttaccttttcatgattaagaagttcacatgtgatattctcaagaatatttcctgattttagaatataattatttccttgacaaaaatagtgagaaactactgctgcatgtgggaactaggtctatacagtttctttatgactatacatgcaagacaataagagttcatgataggtctatacagtttctttatgactatacatacaagacaataagagttcatgatgcacaggcaatagcacatggattcttctatttatcaggtcttcttggattctgttgaccttatgtttcatggactgcaggctccaggcacttttgttgcagcagctgctcgaaacccagtatgtaatttatcattgatggtaggaacaactgacatacctgagtggtgttttgtggagatttatgggaaagaagggaaaaactgcttctcagagtatccttcatttgatgatctttgtcaatttcaccagaaatcaccaatatcacatatatcaaaggtatgtagattctgcatacttaaccttttacaaaatctatgcttgaggaagaaagtgtagttccctcatgcaaatttgctccttgaggactttgagtaatcttttcttgacagtttaagaaaatctgcaggtgagcacgccaacactttttctccttggagcacaagatctcagagttcctgtttctaatggcttacaggtaatttcttatgcacttctgtttcatttttatatgatgaaagggttgtgaaatgattactagtagcaatgttgcattcatgttattgtttgcgtagacaagttcagtcaattttcctgaaaaccattagtgaaagcatatgattcatattgttccactatatactgcttgtatctatttatttattttcacttttacaaatgctggtttatgcctaatcataatcgcaacatatgcagtatgcaaggaccttgaaggagatgggagttgaaaccaaaattattgtctttccagaagatatgcatggccttgacaagttagttgtactttttaatcattttacctttgttaccccgatcagtgtcttctgtgttgcaacatttgactaagtcaaccttgcgtcccctgtgcaggccacagtctgattttgaaagcttcctcaatataggtgtttggttcaagaagcacatgagcaaataaacaacatgcctctgttaccacactctcaccttgcttaataaatgcttgtaatttgggtcaaagcagcccaaggaaacgtggttctgttggcattctaataaattaagcctgctgtaacatttctgtactgggataattcttgaaaatgtaaatgcatttggttataaaattttaccctcgtggtacggaactatggattacaaatatgtgatgttagattatgctttactttgaactttgaagtacttctagttcacgggatgctgtcctgtagcctgttgggcttgggcattccttttatttttatctttttttaggaaacaatgggatcataatttcttttgaatttcagtgagaaaaaaatacatgaaagttcagttcaagttaggcacatggaaatgctgattgagaccactgtaacttctgcttctttgcatcaagatcccttgaagttgccttctggataatctcattttcatcagatggtacaaagagctttgttgtttcatacgattttaaaaaggacaacaatataagttattgcaaaggcttcttgtgctgttcgatgctttcttcgtggatgcggacctgacgcaaccttttgtccttattgctgggttcctcttgtctcattgtctatggtggtatgtacgatcattagtaactttttaagattccttttgttattttgggcccattctttgagacctgacacaaaaagaaaaccaaaatttgatgccatctgatcctcaccaattgtttgttgttaggtttgttgggatcgttgctaaggactgatgatgttttaaagctcaactgcagtcttggatcaaccactctgccactagactccatttgcacttcactgcaaaagcagaaaaatatatgtaagtattctcctttccttcgtctcctgaaaggctaatacgatttataatctgattttattgttttgaggcttctaacttgctgaattttgttggtcctaagttgtttcctcctgcactcagtctggtcctcttgattattgctgtagttccagaagaatctgattttgttagtagaactagtcccagacttaacatccaggatttaatattttttagtgttcatcgtattttttagttatgtttatacttttgtactacatgaaaatcaaagcatttagtgtcagagttctccagaaaaggattttggtgggaaggaagaatgaaagatacttcattttattaatcttaggtagccattatagaagtttccatgttttgtttgtctaagtgattcaatattttttcttgaattggtgcattgacaacgtcaaatctgtccatggattgcaagatgaacaattgggactgttgttcttgagttgttaatggaatttatgaagtataaattaaaaaatagtttgtgtctgaactacattaaagtgtatgaaatctgagtcttagtacggtagtacctgaaatttttcacgggtaactgcaatttgaattatgaaagagttaaggtgatataggttgagtggtgtgctctaacctctaggctcttttggcattgaaatgtatacccatacatcatgaagttgaagtcaggaattcaggtttctcagttttcatcttatcagtggaattgacaacaaaatatacttgagcttccctgcagcttgtttaacatactatattcttgagtttcccttcagcttcctcagcatattaacctttgtgacaatgcagatttagcttaacccagtagattgtgtctttccaaccgaccttacaagtgatttgaatcttctttgagaaagacaatccattgggaatggatgcactggcatctgaagaatacgcttcacagtcgaaactacttcaagagttcaccaatgctcccagcattgacggtgcttgggttttccagaccaacaatggtagggatgattttcgattatacctcattagtaatcatcattttactattttccagaagtggcgtaaagcaactcttgtgtcatgtttgcagaagacagatccacagcaatgtattcgattagccaaacaaacctactggcaaacaacaagagaaaatatattttgttttctcatattatgagaaatggtactaaccttctggactttcaatggtctcctttccctattcaaatggatggagtgtcggctgtcgtaccatctccatcgggatcaaagcttcttgtggtgcggaatggagagaaaggttcccctacaaagcttgaaattgttgatcaatcacatgtggagaaagagatacatgtagctcagtctgtccatggtccactttatactgatgagtggtaaaagtacagcataatacctgcacttttcagtccattcaacctatctgtacaatattctggatcatgatactatttttgttggcacaggtttcatgggatttcctggaaccaagaagagaccttaatagcatatattgctgaagattcacctgaaccaaaaccagtttttgatgatactggatatagaaaagaaggttcttctgagaaagactgcaataactggaaagggcaaggggattgggaagaggattggggtgaaacttactccaaaaaagggagaccttcattgtttgtccttgacattaataggtctctcagcaccttctaattaatacataatgttgacctgaccatagatctgacaatacgacttactgaaaccgtttatttgttgtattcagtggagaagtacgagctgcaaaaggcatttcaagatcattgagcgttggccaagttgtgtgggctccaccatcttcatgtggaaggcagaagtatctgatttttgttggatggttagagcacaatgggtttcagaatactcctagaaaactaggcatcaagtactgttctaataggccatgttctctatactcaactctttgccctttcgaagaatcagatgttgataatgcaccagctaggtaagtaactgagcacccatcttcagatcatgctgtaactttgtaaagtttacaaatttactttatttatcactagtttgttgaaataagaaaatgtaaagctctgaataactatgcttatggggcagttgtaagttgatatttccatgacatttttccagtgattctaaattagagcctgcttcagtagcaatcaacttaactccaagcataagcagtgctttctttccgcggttcaggtatgcccgcattagtatttgcgtattttcttgaaggaccttaaaccatgctagaaaaattcttcacggaaaatctctaattattttcaacagcaaggatggaaaacttctggtgtttctatctgcaaatcgtgctgtagacagtggagcgcacaatgcaacagattcactgcataagatcaactggccttctgactggaaaatggatcaatacctcgaaatcactgatgtggtatgtcctcagatttgtcttgaccggtacttatctgctgtctgcagtcaatttatttaacttctgaactgtgccagattccaattgtaatgtgtcctcaagatggttgttttcctggtttgtattgttcttccatgctatcgaatccttggctttctgatcgatgtacaatgattctgacatctgcttggagaagcactgaagtgatattatcaatcgatgtgttgaggtaaacaaggttgctcacatatgcctttctactgcttcaaaaatcattgcaatatcccatgctatttccttaattcctcctgcagtggaaaagcaacaagaataagcccagaaaattcagagtactcatggagtgctcttgcagtagatggccacaatgttcttgctggtaattctaggtgcacataatcagttaacttatgcatcaaattttattattttgggtgtaataattttattttatttttgtttgttttctagtgtcaagcagtcccatcgacccacctcaaattaagtatggccatcaagtgtcattgaaggatcagacatgtacatgggtctgggacgaagttaataataatccattgatggcagctaacaataaggttagatggtgtacaatttgaagtatacttaggtgttctttgatgctttgaacaatgtaatttactaaatcaggcttttttttttcattctcacattaccatctgctgcaggtaaaggctttgttgtcacatcaccaattcagcatactaaaaattccagtcactaacccctctgatgacctctctgatggtatagtcatggacacaaatattttagactatcatatgtggcttatcatcattcaccaagcaaatgttttttatatcctgcaggcagtaagcttccatttgaagctatctttgtgtcctgcaaggacagttcgcacaaaccaactattctagtccttcatggtggcccacactcagtatctgtatcaagctattcgaaaacatcggcgttcctcgcatcacttggatttaacctacttattgtaaattatcggtaagtttgctgaaacatttctacagttctgatcaattaagcttatggcatcatctcactatcatctgaaaaaaaaagagggacaccgggttttggagaggaggctttgcagtcacttcctggaaaggttggatctcaggtatgtaatccagctaaactctgagtctttgtttctcatgaaccaacctaatttctgatgtgtgtcaaactgtcaagcaggatgtccaagactgccttacagctctagactatgtcattgagggaggacttatagacgcatctaaagtagctgtcatcggaatttcgcacggtggattcttgactacacatctgattggtcaggttagcatcctaacagattttagcctctcaaaggaaaagaagaagaagaacaaaatcctaatagaagttagtatatgtttcttgttcagcttgtaatttgttgttattttgtttcaggctccagatagatttatggtggcagctgctcgtaatccagtctgcaacctatcactgatgattggcaccactgacattccagattggtgttatgcagtggcctgtgggagtgaagggaggcaacatgcctctgaatctccttcacctgatcatcttcgcctcttctatcagaaatcaccaattgcccatatttcgaaggtgcatttctgttctcgccttcattcaaagagcaaaaaagaaatgttcttactgatcaagtcattgttcttaaaaacaaatgaaccagagaaatcaagtgattagctactcaaaaaggctcactgaactttgctgattttttttttctaaaaaaaaaaactttgctgatttcaacaggtgaaagcgcccctgcttatgcttcttggaggagcagatcttcgagtccccatttctaatggcctacaggtacatcaatagccgtttaaatttgcctcagtagtttccactttcaattcgttgtagaaatagtccataacaaaaaggctagatcctgaaacaacctaacaatcccgtgaaaagaaaatcaatcgacgggctacatcaaacagacattctttaaattcatctacactcgattaataacctaacaatcctgcatttgcttcactcatttgtcggatttggttaaactattcctgctcggatgatttcagtacgcaagagctctgagagaaagaggcggcgagatcaggatcatgatgttcccagacgacatacatgaaatccacatgtaagcaagtactgatccgaatttcagctcatctgctttatataaaatgtcggcagcagccgttcgaaaaaaaaaaagacattcagatgccattgtactattgcttttgtgcctaattttctccctcatactggaatccatgcttttgttcagaccacaatcggattttgagagcttcctcaacattggtgtctggttcaagaagcatcttagcatatcagcatcagatgcatctgcatgaagtcaacttgaagaaggggaggaagaaattacgtggtttaatctagtccaacaggtagatgccattgtaagccttgttcatggagctcgtccgtagacgagtgctccaaaatattagagacttccctattgaaaaaagtaaatggagactttaattggtttgagttctttccttttcccttcaattcacatgcttgatgattggatgcaaattcagtcggatttactaattactactagctactgctctgaccgtgattgatgatcagtccaacaacaatacttgcaaaatagtgcaatccaggagggtgttgttctttatgcacgttggcccatgatttttttttttcaaacaaagtcaacagccgcgcgagcaagtacaaacctgattcattaagtaaagtgtggttttgtgaattttactcttgcccggcgaaaaatttactgccccctgtgaattttcctcttcattctgaaatactttgcacaagccaactcacccatcaacatgccaacttaatgtaagcaattaaattggtgaaaaattaaacacgccatcagattgctacgttaaaactacaaagctggaaagcacaacaaggggggcgagagctataacaattttacaacaacaattgactatatcagatgtaccaaagaccatgtcagttcttcgttgaggcttgggcaagctgagatgctactttgtttgagaagaagctctcgagcctgcacaaaaagaaggaataaaaccaaatcaattagacaaccaggtgactgagatgctactttctttgaactctcgagtatgcaaaaaaggaacaaaaccaatcacttagttagacaaccaagtgactatggccttgtttagtacgcgaaaaaaaaatttttgggtgtcacatcggacgtttgaccggatgtcggaaggggtttccggacacgaatgaaaaaagctaatttcataactcgataggaaacagcgagacgaatttattaagcctaattaatccatcattagcacatgtgggttactgtagcacttatggctaatcatggactaattaggctcaaaagattcgtctcgcaatttccatgcaaactgtgcaattagtttttttgtttatctatatttaatgctccatgcatgtatccaaagatttgatgtgatgtttttgggaaaaaaaattgggaactaaataaggcctacgtttcaaacacggacgataaataattaatgccagatttcccccaaggtgaatcttctactggttatgatagaaagacattattgagtgcacataaatccaacatgagatgtaaccacccacgtttctattaatggttaggctaaatattttcaaagaaacattgacagatgcctgacttacaggtagatgaatatgcaaacacaagattga

SEQ ID NO: 4777 - DNA, 35690 bp, Oryza sativa
tgactattttttcatttcccaaataagtctttatatttgtgagcacaaaatatagagctgctgtataataatttattttattagtcataacacattttcggatagtaaatgatttcaaatcgaaatatggtcaacaacaaaattgtagaggttatcaagatctacaacttttattttggtcatttgtctatataactttgtttccaacagcttgaaattgattttgacaatatgacaaatgtaaacagcatttataaatattacatgactttaaatgggaaagccataaacagctaacttgtacagctaatcaagatctacaacttttattttggtcacttcttcatctgacaaagtgatagtaccaatgtttacaaaattgacatatctgtgttgatatttataaaccagatgagagaaatgtgatttttgtgaataatataactatcactttgtcggatgaagaagtaaccaaaataaaagttgtagatcttgatgagaggatcaactttgttgttgaccatatttccatttgaaatcatttagtatttacaaatgttgattatatttgtcatattgtcaaaatcaatttcaagctgttagaaacaaagttatatagataaatgaccgaaataaaagttgtagatcttgataacctctacaattttgttgttgaccatatttcgatttgaaatcatttactatccgaaagtgtgttatgactaataaaatgaattattatacagcagctatatattttgtactcacaaatataaagacttatctgggaaatggaaaaatagtcatcggtgacgggccttagttcaagcccgatagagattaatctatctctatcgggcattatcttagggcccgtcacagatgagtcatccgtgacgggcctgaatgtcatctcaatcggacattagtatggagcccgtcaccgatgagtcatctgtgacgggctctacgacaaagcccgattgagatgactcatcactctaatataactagggtttctcagatcggatcgaaaatttttctaagtcccgctacagtttcccacctccttagaaccctagcgccaccgtcatcctccctcgccaagcccgccaccgtcgccaccgagcccgccgccgccgcagtcgtcctccctcgccaagcctgccgccgtcaccaccgagcctcctcggccctccattcggacctccaccgccgagcctcctcaccgacgaccccccccccccgagcccgccgccgccgccaccgaggctttacaccgaccggaccggtgttggccttcctcgtcgtcgccgctcgcgtcctcaccgacccatgtcgccgacccccaccgagcatgacgccgcccgcccggtgccgacctgcccaatcggcgtctccaccgaccggcgccgccctccaccgagcccgggcgccgccgccaccgagccccaccggccatcctcaggtgagtcctccatcgcgccgccctctgctaactgtgaatgacatgtcattgaaatgtggatgtggatgatatgtgattgaactgtgagtgagacatgtcgatgttgggatgaaatgtggtgcatttatgaattttgtgatagatgattgtagtgattgatgaaatgtggttcatttaactttatttatatgcaatgcggttcatgttgggatgaaatgtggtttatttatgttgggatgaaatgtggtttattcatgttgggatgaaatgtggtttattcatgttgggatgaaatgtggtttatttatgttgggatgaaatgtggtgcattaatgaaattattgtgaaatatggttaatagattgtaatagattgtagcactcaattgtgttttttttgtttttttggaaaaaagtagacaatgtctcagcaaggcgaaccaatgtcgacgacaactagtgggtcctcaagggcacgtactcctaggacagggaacaaaattcctaaggaacggttccgcataacaacggtggacgccgtagggttgccgacatctccaaggaaaatattgagccgatttatgtctatctgcggggtcatagggaggcagaaattcagtattctgcaagacgacttcaagctcgtgccggccgcagagaaggacattgcttggctaacgttcaaggagagctttgattatcctgcggagcatgaggaccgtctcaggcgggctgctttcaaggttatgggcactgcttggaagaacttcaagactaagctagtcagcgagttcgtctacaacccggcaaatccagatccaagagagaaatttccttggatcacggaacaggtctgggaggaattccatgcgaagaagtcgagccccgagtccagagctagaagcgaggcatatcgcttgctccagaccaggaaccagcatccgcaccggcttggtaccgccggatatgccggtaaggaagaggaatggcagcgtgaggatgaagaagcggaggaatcgtgcaccggcttggtaccgctcgtgtttggcgatatcccacaccctcgggctaggaactgggccagggctaggtaccagaaacatgatgatggcacgatcttcatgccaaatgcagaagatcaacgagtatacgaagctatagtaagtgtctagtcaaactagatgttcgcattgtttcccatcgtgcagtttatttgaccccactaaattgtaatgcagaaggagttggttgccgagcaacaagcctcgcaagaggcctgctctcaaagacgcgaggacgacctcctcacgaaaacgttgggcaacaaggaacaccgtggacggacacggggcgttgggtcttctgttctctggaaatatggatttccagactacgcgtggcagtacaagaagcggacttccaacaaggtggagaaagatgcacgccttgaagccaagatccgggagtcgatacgagctgagctgacatctgaattcgacgaaaagctcgagtcgatgagggccaagattaggcaagagatccgagaagagcaacagatcccccaggccgccgctgctgctgcgcacaaagagttaggaagtcccaccgaaaaacacagcagttgcgcatcaactgagttggtggaaaatccaacatcggtcgacatcgccgtcgaccacataacggtaaccgtgaacttactcaatacatgaaagatgtaacgaatccatatgatatataatattctaaaaaaattgattaatctatcgcaggaaccaacgagctgcacctcacagttagggtgatgccgaccttcactgttccagcagccgagggacttgcgtacaagccgaccccagagacaagagtgcatggagcgcaactcagggccgactgtgcaaaagttcaagtcgacttggtgaagcccgaatacgagctgttccctctgaagtatccaccgaacgacgaggtcctctcactaggaaatgcccgtggtaccttcatccaatggcccaaggacctcattgagatcagggttacagcgaggccaaccactgcaccaggcggtcgtccaccaaagagactgtcacgccccgaactagtcccgagcggaactagcccgtgacgctccaaattaacctgttaatcgataccaatcccaggaaacagtgctggtatcacaggaagacagaatatcacagcaacagaggtctctttattatagagtaggagtacagtcatgttgggctgcggacagatcccgagctcacaactgcattacaaaagggaagcggaagccaagacttggaccaaacatcacaggcacgacttgggaactaggccgaaaccctaaaactcatcgtagccggcttgctcctggaagaactcctcgtcagcgggatccgcttcatcttcttcagcaactaggggggattatttatatagagcaagggtgagtacgggagtactcagcaagccatgggaaataagtgtttaatgcaggcttcaaagaaaggctgttgtttttgcaattgattttatttgaactcttttctgaaacaactaagtgagtgcttctcaaacgacacggatgagatagtgcgtctcgtccggtcggagtatgtgcaatgtatcagtcttttgaattgatcaagattggcacccggccaacagctttcaaacggccacccgggcctggctgatcccattagccgcagattttccaaacatcaaacccattccacaacagcaaatttcacaaggcagtagtcaaacaaaactacgctaggaatcacctcacatccgcccatgaccgtgggcacggctgttcgaacagttttaataacctctgcagaggggtacactttacccacacgacattactaacccggatcatccagcccgtgcagaacggccacgactagagaccttaaggctttcatgacaaggcatttcgaaagccgacacaggttcaccatatgccaacgagagggtcccagaccaacaccagattaggtcccagaccatactgtgccaggaagcccaggggtcctccccgacaccaccccggcgaatccacatgtctcttagcatcatggctcccccgataagctagttactcagccaggggtgtcccattccacccatgtggtcgtacttgtcatgtgttcggatgaaattccaaggaaacggtccttaagtgcaagagcgggaaaccgtacacccgatacgttccccggtccgcgattttggaaattcatttagttcgcaagcaccgactcaggtgtcgggttttccaagtcttttgtaaaacccaagttttacccaagatgtttctcagattttaagtttgaaggcgaccgtcgatacccgtgcagagtgcacgattaccgaggcgcaactaggtgggtacaagggaacatggtataacaattacaatggaagggtcaaatgcaacaaattaggtaggtccaccaatctgccttgcagacaggacaagcagattaagtgcgatcctatcaatgcataatatttttcaagcaacataattaagttcaaatataggctcaagatgttcaaaggtggcttgcctcgctcgagatcttgagtttgatcctcgaaatcctcgcactgcgggtcttcgagctccgaaactacacgcgaaacgggacaactcagcaaacggcgaaaataaagccctattattgacctctaagcgtgccattagatagatctcgagatttgagaaattttggaagttgaacggagtcaaacggacttacggttgggaagatattgaatttctaagattattggatttttggtctaaaggaaaaggatttatttaaatcctttttgaaaaagaaaagaaaagaaaagaaggagggagggaaattagacttccctcgggcggctagggcacggcccgagagaaaggggcggctcggctgagcttaatgggccggccggcccaagaaggcggcccaaggcgcgcgcgcgggcggggaggggagagagaaagccggtgggccgggtccatcccgcgtggtcccgggtgggacccgcttgtcggcgactcggctcaccgtgagcgaggtgcacgcggggcatgctagggtttggggagggaggcgcggcgcatgcgcgcggttcgcggaggacacggtgcggcgggcccacgcgcagcctcacggctcgcggtggaccgcgcgcgcgagggggcggagggaagcagcggaccggggtctgcttgacccggtcgcggccgaggtggcgccgacgtggcgcctacgtggctgccacgcgggccggcgggaggtagacgatgacgccggccggaacggacggcggacgacggcggcgagcggcggagcgaaccatggcaatacaggcgaagacgagcacaccgggatgttgcacaggacgaggggagacgagccaatggctcggattcgccgggggacgctcgacggcggcggattgcggcggcggcaactggcggcgggaggagggggaaacggcgatgaggttacgatgggccgattcccggcggcgagagcatctacgcggctacgggaacccaccccttgcgccggattaggaggaatcgcatcgagggaggccggcgacgagaggcgctttcgagctcgggcggcgacggcggcgagcacacggcgagcgatggcagcagtcggggcggcgtcggctagctacggggaggctacacatgctactaccgaaaactaaggggaagagatggattgaggagggagaacggggagatgcactaccgtgcggacggggagcagtgacgacgggccgacggcacgggagcgatctctccggcctcgggccggggaagaggaaggagagggtgcgtccggagtccccttccgcgtcctaacgcgcaccgactccttcggcacacgtgacggcggcggtcggcgatcggcgagacaaaggggacggcaatggcgcgggcgaaaaacggggaagattgggaggggaaaaggaagggagggcgcctgggtttatagggtggcgatgtcggtttggaaaccgaccttgggcggtcaagggagggagctcgcgctcggcggtcgcggccaaagcggcgacagggggggaaggatgacgccggcgggagggaaaagggaaaaagggggagagaaagggggcttgcctccttgccactttggggaaaaggaggagggagagggggcgatgcggcagagggggggctcagcctccgtcccttggaagccagcgcgcggcggtggcggggctgggttgatgacgacggcgatgacggcggaccggtttggagtggagcggcgacacgggcggcagacgaggggcaggtgcggcaggagctgacggcggcggcgactggccggtcggccaccacggcgcgcgcgcatgcgggcggctcggcgatttgggcggcatcgacgggaatggcagcgagagcgggagggagggctcggcgcggctcacggcagagcagggagagagagagagagagagagagagagagccggggagggagggggagatgggccgagagagattcggcccatcgaacccgagggaggcaaaatagacttttgtggagggatttgatttgggaaggatttggattcgggattgaactcgacgatagatcggggatttgagatctgagatggcacggacactagacaacaagcaaagaaacagatttcgcaactagggtttttaagagatagttttcccgctaggcaccacgacggaacgggcgctacagagacccgcctctgctccttcagcccctcctgctcaagatcgtcatgcacaatcttacgatgtgcagttgcagtacgacacggattttggggaggatcgaacggaggccgacagcaaggcgattcatgaacccccaccgatgaagaagagcaggaaagcacactcttcccctcagagaattactctcgataaacccgaagcaaaggggagaggaaggggaggaaaggtgcaggcctcgcttctagctccaagaaagctagatctaggcaaggaccaggaagagactaagggcaaagaggtcaagaagaaatatgtcgctccacaggagttccaactaggcatgccattggttggagatgacgtgcttgccgctatgggcaccgcttgcaaggaccttcacttatactacatggagaaatctaacgccaggaagccaagtaaagctaccgatatccttggacagcacgatggaaagccattccttggtccaataaattatatcgtggtcgacttcaaggatcttttcgacctctacaggctctgagcggtggacacaagcctccttaagtgctactccttgtaagtattgtcgcccaactcattctggtaataacaatcggtttaacttgcttacaagatcattgatcctgtgtgtaggttaagttggcaatggtgtcagaagcatgcaccggaagttgccttccttgatccacaagtggtcactgtcacaaatctccagaatgaccgtcaaggaatggtcaactacatctacgacaccttgtggtcccgccgagacaaggagtacattatgtgtgcctataatcaatagtaagtgtgttaactaaatatacacaacagcatgacacattccttgagtacttaattaactttcactatattaatgccgcagtgcccattggatccttctggtcataacacctaaatggagtacatgtcattacctgaactccagaattgataagaacgcatatgattagaccccaattcaactagcgatagatgaagcgtgggcccaatacgtgcaaagaggaggcctcaggaagacaggacatgacaccctcatccacaaaaaagacttcccggtgaagcaacaaataggtgaccagtgcggattccatgtgtgccacaacatgcgacttctgtattgagaaaaggtgaagactttggctgagtttgaggtcagtggtctcaattgtgatagactaactacattttagtacttatatatgatcgatcaactaatctggaattatgacaatgtagggcacaataaccaagtctctgactaccagctttgaggaggttcgcgaggagataaccagcttcatcctccgcgaaataattaaccccaaaggaatgtttaggcttaaactaaaatgatgaacaatgttgaacttctatgtttaggcaatgatgaacacttattatgcaactgtgatgatgtaactgtgatgcttatatttatgtatatatttcatatgtttatgttaagacttgctaaataaatatttgatccaattaactcggttttgcaggtgaaatatgataaatatttgaatggatgtgaaatatgtgaatggatgtgaaatatgagatggctgtgaatgtgtggttgtgtgaaatatgttgatgtctgtgtatgtgaatgcatatgtatgaatgggtgatgctggggagctggggatattggatatctgtgtttgtttctgtcatttttgcagcgggcatggctagcaaaggcctgaggctagccaaaaaacaaaatttattttttttgtggattatagtcatctgtgacggaccataactaaatgcccgattgagatgaggtcatctgtgacgggctctagcttaggcccgattgaggtcagcagtcatctgtgacgggctctagtttaggcccgattgaggtcagcagtcatctgtgacgggctctagtttaggtccgattgaggtcagcagtcatctgtgacgggctctagtttaggcccgattgaggtcatcagtcatctatgacaggctatagtttaggcccgattgagatgagtatcatctgtgacgggctctagtttaggcccgataaaggttagtagtcatctgtgacgggcgctagttgtggcccgatagagataggtcatctgtgacgggctatagtttgactggtcgtctgggtcaaagctatcggtgacgggctttacttagggcccgattgagatatattcattcgtgacggccgtttgcccgattgagttaactcttcacatcagtgacttctagcctgtgacggacgctgtgcccgattgagatggggcttaccgcccgattgagatgagggtatccgttctagtgagccaaaattgagtgatggtgaaaacaatgaacattaaacctataaatcagttttaaaattcagaattagctgcaacttgtaagcctcaggttaaacaagccctcaagttttataaacaatagatcagatgaggaagaaagctccgaagttaattattaagttaaagtagatcttagcatcacaaaaaattgaggcttttggaatacatgttaggaaaaacgtagagacatttaaaaaaaaacaagaattgaaatcatatccaagacgttgaactccttgtttatttttccatgaaatcgagctataggaacgtgcaatcctacaactttttttcctttcctttcccacgagctactgggatcagtaggaaaattctttcgaaagttgaatcctataaaaaaatttatgccaatcctctattcacttgaggctccgtggacagaagatatatactcccttcgattgcataggtaagggcatccacaatgtgcatttaaagtgggtagtaagcaataaaatactactactaacaggttgtatatattgtaagagtagtaagtaactaataccaggtaatatgcttactacctagtcataaggaataaacaaataatttctctcatctttctctcatggctagtgatggtggggtccagcttactacccacttttgttctttcaccattgtggctacaacaacagctaatacccactgatgcagggctcactcttatacacaaagtaggtagtaaacattggtgatgccctaagtcgtattaggagtttaggacttatacacctgtagatgcaagcatacagtacagaaacgacacagctggtgattctcagcctaatagctcgcttgcacgtgtgtcggtgcctgtacggagaggctgtgctgttccatcgtacgtacggaaacgtactgccggtgccagctcgactaggcccagtttgaagattattcactattactggtacattattatggccgattggcgattatctatctatctaattatgtggataaattaaattcttttttttagtaatggaatagaatccgcggcctttgcttaacgtgttacagccaattattataacaattcatccaaacacaaacatacctcaacaagtcataaagaacacgctttaataaacagaagcacacaccaactcctaaacaccaacacaagagcaagaccacattattattgaatcctatttttaacctccatccaaagttggcgagaaactgcatagctgttgactcaagattataacatgcagctttaagaaaatattttagaaaatggtaacaaacagttaagaaaaatggtttaaacaatactccctttgtccctaataaaatcaaaccctagaatctcaagaaactattaaggaaagaaacaaaaaaccaaattacccttaattaatgtaaaatttgtattggttgatgagcaggtgaggggtattgaagtaataaaatttctcgatttgcatattagtggcaggtaagaaggtaggagttggtttattttgggacaaatcaaaccgtagaagttggtttattttgggacagagggagtatagtagaagatttttttagggatgctatataacgcgggatgataccagttaggtatcaagtccggtattgggtgatacctattaggtatcaagtgattctaccacgtttcaggtgatacttgcgaggtatcaggtgatacctatcagttatcatgcaattcttgccacatagaaggtgatacttgtgaggtatcaggtgatacctatcaggtattaggcgatacctatcaggtgatacttgcgatgtatcattaggtatcacgcgttacatacctgacatcgacgccgacgaccactgccgccccagcgccccttcctccctagctccggccaccgccgccgatccctcctccgccggctccggcgccgcaccaccgccaccccctccttcccccggatccggctccggccaccgtcgctgctcccttcactggctccggccaccgtcgccgctccctcccctgtctccggccaccggcgcgctccctccctcggctcgggccaccgccgccgttctctccctcggctccggcaaccaccaccgccctcttcctcgactctctggctccggccaccgccgccgccccatccccctactctctagctccagccactggcgcctcagctccggccactgccgtcgctctctccctcagctccggctaccaccaccgccccctcccccagctctctggcttcggccaccgccgccactctccccccgccaccggctcggccattgtgccacgtgctcttgcggctgatggaggtgaaggggaagctatcctgttggggcaacggtatcctgtccccttgcatttcagtttttttttaagaaaacgtacttttagaaatgtcgagtaaataaaccgtggtaataatctagtgaagtggtcgaaaacaacaccttaattagtagctagccggcaagctggcggtgctaattgaatatagcccatcacctcctctgtgtccccttgaccaacagcaccatgcatcatcatcaccttctctgtatttttcaactcaaacaagatcgagttgtaaaaccgcaaagtctggactattaatgttatattagggaggcaacaggaagaaattaatacacacagagagagagatcatgccatgtcttatctagggatcttgtgtttttcagatgtcaccatccaattgttatggacaaaagctttgatgggacaaatcaaaatggtgtcataaatcactttcaagagatcatcttgtacctcaaggttaactggctgataatatatagtagtatgaagaaatggtcatggagagagaggaggaagagttgttgttgttgcaaccttttcttgatctcctttattacctaagctaagctaggagttcttctagcttgcacatggcaagagattgttgcccttggccctacacaaaagattcaaccgccaacagatggtgatctctccttctgtcaccgatgcagacctggataaaataatgttggggatcagacgatctcggttagcccaaatgcctctccttgatgtgaagtgtcggcaaaatgcttttgcaagagtgtttgataacataaaacttttgcaagcaacagtgtgcaaaaaatgccagctaggtaaaagaaaacatagatttcaaacataaataattcctttaacgtaatatgtgtggatggcaggatgggattagttccaataggacagtaaagagcacatattggaaacacccgtaatttttttattaagcatgggattagttaccgggcaatattggagaatactatcgcaaagatttttaagttggaaaataccattgcatatgttaatgacacgtgggtccaacttatacatctttgcgatggtacttttaaatttttttaccacctgaagagggaataaacaaactagaggcaaaagtcagaatagaccagccatcggttggcaccacatctctctctctctaagggcctgttcactttgatgccaaaaaaaaccttaccaaattttggcattgccaaaatttcgacaagttgccaaaattttgacaactataccaaaattttagcaggatttcttattaagttaccaaaatttgatagcaaactaaatgtagccacttttttagcaactttaccaaaatttgataaggttgaaaatggcatcaaagtgaacaggccctaaattccttcggaatgcttcaaggatgactagtgtgaattgtgaaagcttcttaatccatgcttgcatgtcataagctcatagctagtaatctaaatgttgttatatataaatacaatttttaactcaccgaaattgtcagtgaccttttttttccatttgacaccactgggatggccccaagttttgctttgttatttataggcttgaggagatttgaggcaagctgccctcagctcttgcaacctttccttccttctattctatggctatggccctatttatgtttggctgctcctgaatctcctcctattgcccttctgtctcacatccctgtctcataattaaagtcataattaaggagcttctctaaggtgattgggacttgttgcagggatcaggaggaaaacaacaaggtagagctctctgttcttgattcttgttgtcttttgtttttctgttcatatgttgtgcagattataacattctatatgttgagggggaaaaaagaagggaaagagatgattggtgcattttgggaacaggtttggtgctttcatgaagaaacaagaaattggatgtgtgaatgtgttcttgcttagtttttttatgctctctttcccttgattttcttcagttcttgcatgattgcatcttgttatgttgctcatttgtcctatcatgggatgttttcttgaacaaatatatactatcaagaaagaatgaaaaggtgttcttcaaaaaaaaaatgaatgaacaaggaacatgaaatttgttctgaaaatgtcaaattctttccctggaacttacatttgatgcccattaaaaattagctttgatctgcacaggataacttaaattttggattaacaacaagaggaagtggatcaaccagacaagaggaaaacgtgcaaacaagacaggcttgcaacatcaccttgagtccaaagccaagaaagatggggctgtcaatctcatacccaccagacgactacctgccagcaatggaggacaacatgggcaggctgttcatccggtccctcagcttcgacgacgacatggaggccgccgccgatgactcgccgtcgacatcaccgatgccatcaccgtcggcgacattgctgccggcattcggctccggggggaagctgatcatagagggctccctgagcttcaagagaagagaggctgacccggttcagatggagaccatgatatccatcaggagtcccaagtctgacaaggagagctgcagcagcaagccaaatgctactgctggtgcatcgagatttgcgcttgccggagaccagacaccggaggattctccggtgatcgccggagttgccagccccaagcaccaggcagcggctgtcaggctgcagaaggtgtacaagagcttcaggacaagaaggcagctcgcagattgcgccgttcttgtcgagcagagctggtatgattctcatgcaaaatgcaaatatttgtgcatttttgtcgtagaatattactagcggagatcaccgtaaaagtattctttgtcttttgggtcatagtgtttgaattgtttgatgcttgaattcaggtggaaattgctcgatttcgcactgctcaagcggaattcggtgtcgttcttcgacattgagaagcccgaaacggccatctcgagatggtctcgggcaagaatgagggctgccaaggtagagttcattggcatcatcccttatccaccaccctatgtctcactgacatgtgggcctataaccctggacccacctcgtcggtgagacgaggtgggggatttgcaaaatcagtggcataggagggattaatctctgaactttttaacagagccaccattgttctttcagtaagcatggaatttatactgcattactgacataggtgtagtgttgctatcaccttaggttggcaaaggtctgtccaaagatgagaaggcccagaaacttgctctacagcattggcttgaggcggtacatgcttcaaacattgatctcaacagtattttcatgattgaaatgtgcaatgaaaactgagatttcatctcatgtctgattatcagatcgatcctcgacatcggtatgggcacaatctgcactactactaccaccgttggctccattgtgagatcaaccagccattcttctactggtgcgaatgcgcgaatctccgaagaccgtttcacatctccgaacccagttgacagacaaggcttactgacaaatatgtgattctgaaacacaggttggatgttggtgaagggaaagatgtcaacttggaagagcattgccctagatggaagctgcataagcaatgcatcaagtaccttggccctgtaagttccatcactattcttctgatctgaaaatctgaaccaaccatttagaaactgctcagttgtagaaattgcatctgattaacagcatatgtttgttcttgttctgggattgtagaaagagagggaatcctatgaagtgatcgtcgaggattcgaggctgatatacaaactgagccgtcagatcgtcaacacgaccaaaagccgaaagggctcaaaatggatctttgtgctgagcacatgcaagactctgtatattggtcaggtagatgactactctgcatccatggcacttcttcattggcaaattgctgctacatcttttcatcttgcaaacattctgggaactgatgagatgctggtttttcaacacgattacagaaacagaagggcacattccagcactccagcttccttgcagggggagctacatcagctgcagggagactgattgtagaggatggaattttgaaggtatgttggggatgtgtcgatttctacgagcaacactggatttgctctctctgactcttgaaatttgtttgtttcaggcagtctggcctcacagtgggcattaccggccaacagagcagaactttcaggagttcatgaatttcctgaaggagagaaatgtggatctgactgatgttatggtgagaaccgaagtgtgaataatatcacaattcatctgcaggaaattatagatactgaatagagttttcctttgaactgattggtgtgccgtgtttcggttttgctacagttgaacccttcggaaggtgaagatgatgccgaattcagcctcaagagcagccattctaggcaggacttgaccgaactctgtgaacctgacatgcaagaacatgaggaacaagtcacacaacaccatggcgctgacgaaaccaagaccagcagtgatgcacccaccatgacatccaccgaaaccatggcgagcacaccggcaatcaggaaatccacctcagccaacaagctgcaagggaagcggcctccgaggctgctgatcagttccaacaacacagaactacccgcaacacattgcaacggaaggccatcaccggttcacaaggacatcgacgaggattccaccatgttcggagagtgcctcgccttctgcaagaagaacctgtttgcagaggaaggcaatgaagaagatgagctggtggaagtaccagaggagatgatcatgaaccgtatcaactgcaagaaggccacgaagtcataccagctggggaagcaactgtccttccaatggagcactggagcaggtcctcggatcgggtgcgttcgcgactacccatcggagctccagttccgagcattggaggaggtcagcctgtcaccccggggaactaggtcgacgaggttttcgtcgccgaggcgaaagcccttgacaccaaatagcattccagttgcaagatttggttgtagccctacagcccaaggtgacaacatggggctgaagccaaggcagaggtgtgctacttggactgctttctaatgttgatatggcatgcaaattgcaaaggcaatgctgcttttcttctccttaactggaggacgatgcaaagtgtatagtgagtgagggaaacatgagaatgtcattctttggttttgtagatgtgtagagcaaacacaccatggcttccaaggaacaagcaataagatgtaccttccgaagaagtaataacaagtaataagatgtatttttagatatgacacatttgacactcgcaaggtgcaagcaaaaatagagattacaggttttcagggaggaaaagaaacagatgccagaatttgtaccacaaaagatgatcaagctaaggaatttgatgtctccaatcaataatctgtagtatgagcaagcatttgatgtgtcatgcaggttcatcacatgcacatgcatttatcgatcactttacaaacctaaagcaacaaagccagagagcgacgtagaagggaatcaggcaatcacaaactcaaacaaataaggacatttaccaagcagatttgtgctgatttgtaacattgacagccatgtcacactcgtagtaaattgaagatagcattcatctaatcagttcatgttgcccaaagccagtagagcataaccatgtctcacaacaatggaactttagttataggcaacagaccaaaactgcaaccagacaagtacccattacatttccattgctcttaactcataacatataaggcctactcagaaagacaaaccattgttcaagaactggaccggaaaagcagtacacgaaataaggcgacaatatggcattttactttcaaaaggcaggaaccacgaaataacacaaccgccacagcttcagcgcagcctcctggcctccctctcagactcgagcagggtgaggatgtcgccctcacggaccgggcccttgacgttcctcatgatgagacggttctggtcgtcgaggaacttcactctgacctgggtcacctgacccctggagccggtgcggcccatcaccttcaccacgacggcaagtttgacctgggtatccatgctgcacaagcaggaagcatatacagtcaggcaaaactgatgttctatacaaaccagcagcaggtaattcaatcgcagtcatttcaatattacagttcgtgaatttatgtatcagatcagatttcaatattgctttcaaaggataaaaatgttcaggcagtttatctacaactcaaaattacagtaacaaatgttaacatctggaattcaaacaaaaacagttcctaaatatcagctattgttaatttcagtcacagcaactacttaccccaaataatcacggtcatagtcatactactctacccaagcaaaagataatttaagaatcgatgcaaatatttcagtcacaacggatcagaaatttcatgaagacgtatatatctattaacgattcactcatcctagaaacaaatccgacgaatcgattaacaaaacaataaaccgaaccacgaccacaagaccaatccatctatctaccggctttgctacccaacgcggatggatcatcgcgacgccgctgacgcaacgatctagcatgccgttacccccgcacagcgcggcgacgcggatggatcatcgcgacgccgctgacgcaacgatctagcatgccgttacccccgcacagcgccgccgcgcgcgtcccaaggatcacggtgaatacatcgcgaaggaagcaaagagggaaggggggaggaagcacgacgacgcaccttctcttctccggctgctagcgacggcggacggcgaaggagggcacggatgcggcggcggcgacggcgcgaggaggaaggagtggaggcgagggtgaaaaccctagggttcgtctcgggtggtttatatagagggagctgagctgagtgggttggtggcctgttaggccgggccaggccggctgactcggcccatcagataagctacttttctttagtttcattttctttttacctatcgatctttcgataaatttatagtttcaaatcttgcgaaaatttcaaagaatggatataacaaattataagtaaaataaaaaagaaaagagacaaacatgtctaaaatcgtaaatctagaaaaaaaacatgtttctaaaattttttttgatgcactgtaactaagtgtaagtgcaaaacaactgaatgtaaggcggagtttctttgcatgagttccctactcactcttctcgtttttatgggcacgcttttcaaactactaaacagtctattttttgcaaaaaattttccatacgaaagttgcttaaaaatcattttgatccatttttcaaaaagaattagctaatatttaattaagagtaaattgcatcgtcggtacacgaacatgtcagatgggtgcaatctagtgcacgaacttgtaaaatgctcgttttggtgcatgaacttgtttaatgcatgcggatgaaggcgaaaaggacattatatggctaatcttattgattcatggactaattaggatactatgtaaacatatatctgagaagattgctattagacatacacctctccaataaaaaatagaatatgacatagtgatagtagaaaaaagatgaaaaaaaaacgagcaatgatattttggtcctcgttcgcacgaactaggcaagttcgtatactaaaacgggcattttacaagtttatatactaaattgtaccattctaacaagtttgtgtaccagcaatgcaatttactctttaattaatcatgctctaatggatcgctccattttccgtgcaagagggatttgatcccaacaagaagtagcgaaagtgtaagttggatatacagcaacatgaatcttgatgcaagatcctacaaagtaaaaataaaatctgtcacaagtaaaatagcaaaacctttgaaaaaggggagtacctattgatctttggataaattggagcttcaaatcttacagaacttttaatcaatggatataacccattttgaatgaaaaatgacaaaaatgtaaaaaaaaaccgtatatctagagataaaaaaaaacacttgtaaaatctaattttagtaaattgtaactaagtacaaattctctatagccaagtataagtgctctgtaatcgagggtaactataaattggatatacatgagcatgaatctggatgcaagatcttactgacgaaaaatcgaaagacgggaaccaaaaatctatcacaagtgaaatagcaaaaccgtttgaaaaaatcattaagtgatggaaaacctgcagtctaaatgtctgaattctggttagcattggatgaacaccacatttctatttgataacttctcgatttagcatgatcactgtttggatgggtttagataggttagtttgggtttgcagtcgaaaatgttttagggttaatcctctgtcctgattccgactcagtttcaactccaagcttttgatggtctaaatcaacggtaaacatttcatttttcttaaaaaaaaattctattggatttgatagtaaaatcgtcgatgctaaagaggcttcaaccatgttaacccacgctaattattaatatattggtgttgcagatttaaattctaaaccccaactcttagcttccttgaagcgagcatgtcacacaatatacaagtctgctagtctgaaatcatccgtagtattcatcattagtgtcatattgttgaagagatctgacacaatggaatacacagcgcagtgagttcttgcatgtcccaactacccatcactagctagatatcacaaatttgaagttgaaaaaacaaaaaccaaaatgcagcacccaatcttccttctgacctttaggggctaactggacttaacatgctatacagacaagaaatcaatcggctgtgagcagaggaggtcatgagctgcgatgctgggcattggagatttgcagactcagcgccatgccaccagagggaagcccagttgtaattcagggctgtttttgtgactcaaggttcggattcacataatcaattcaccgtcctggagatgaattatcctgtaaataacaagtgaagtgaacacacataaggaccaacttcagggcatagcagtagacaacgaaggagtgtgttttgtgtttttaccatgtcaatatcttcggatccatgtaggcagtcagctgtttcggcatttgcatttgctggctctggagacggcaaagcagaatgctgcattcatgtggagaaatcacttaagactatgaaaatgggagaatagtagcattgccagaaaatcgatataatcatatgtatacttgccataagggatgactggctttgtacttgttttctgcctgggtcaatttccgactgaccttctatgttcggagtagttgctgttgatgatatacaaactcagtgatcgagaagatttatgttcacaaacagaaacctcaaaaatgagaggttaatggaagatgtgacaatggtacagtggtatatatttgactaaagaaataaccatgttattgttatctccaaggataatgcacaaagtaatcgagtaactaactatgtaattgaaaaaaaaaatagtaaacattgaaggaacagagttcagaaattctggaaggaaatataaaattaacagacatgccagaacaggttattaatatcttatattcttacgacaatggagccaccaaggaacttgtaagaaatattaaaaagctctctaagaaatgatagtacctgcttcatcaaaaacaggtatcacggtatgctcattagctggttcacactgactacctggaatgctgtttgcacatgataaattaatagcattaagactgtaattcatataactttcttgatgagaattgaaagtattgaatggagcatcacctttctagtttttctctattcacatcttctgttacatcctgactattagaaacaggtgagcttctttttattacctggtatacagatagtttagagagatacttggttttaaataaaagaagccaaacaaattatatattaggaagaacaatcctgcaagcaggacttgtaccaagaaatgcacacaggagataatgcaaatatgcaattgaagctttcaatatttgcatctcatatggtctcacctcatgcccaatactgtcaaatatgtcttgaaatttatgtaaagcaatctccatgttgtgaagctccataagcattgcctaaataaagaaaaacagtaaatatcaacttagatttttggagtttcagagaaattggaaaggcgttatgctataactgaataacctgcttctctgaagtcagtctctcaataatctcatccttcaccaataaagatttcctaaggtaacatcgttaaggagacgcaaccaaccaaatgagatcaatagaaactaagattgactgcaatgacttttaactcagtagaaatggatatttcttctagtttgggctgaaatttggtgttgagtttctcagcctcaaggcgttccctcaattcatatatcaacctcgccctattccggagttcaagctggtaatcattaattttttcttcgaaaaacctaagtttttctgcataagtgaaaaatcacatttagaacagcagattttaatgaaaaatcacatttagaacagcagattttaatgaaaaatcacatttagaacagcagatcttaaaaaggatatcaacttatatatggtcatcattatcaacatatggaaattgcaatctgactacaagaagcaacataccaacaaaatctttctcaagcacagaaatcttctctactttacccttcaagtcagaaactgaaattgcaacataacacagataagtatctaaagaatgcacattagtgcaataaaaaataaaaagacaatcatttggtaaaacaatagtagaataagatgtttcagccatttgcatacctacattttccttgtcgccaactagacatttcacattaccgagtacttgtttcaccgcagcgacttcctttcctactgaactaaataaagccagatgagcattcagcttttctgaaatcacagcaatctgtttatccttcatctggatagtccattgcagagaacaagcagagtcctgcctatcaaacatggtatcatgagccgataatcagtttgattccacatacaggtaattcataattaatgcaaatgtcagaagcaagaacagggcagaattatatgacagattagacaatgtacaataaagcagactccagatacactctagtcttacaaatgcatagcaattgttaaggaaaaactatgatattaatggcaagtagcctcacataaatatgcaattattacaaagaccaaaagtttagcatggagagaaaacataaaaaatgagttcagctccatataaactactacagaaggaagggggaaaataaaggtaaacacctgcctcgtaatgttttatgaaagcctcctttgattgaagcagtccctccatgttatcttttaactccttttcgtttttctccagctgctcattttcattttcaaggcattttatctgtaaaaaaaggtattgcaatgaacctctgttgaataggtacaaaccaagcactaggggaagaatgaagcatccacggtgtgatgtgacataacatgcatatcaaaaatcaagtgctgcttctacctaatcaaccaagcaccaggactagtcattgttacgattcggtagtaaaagtacaaatctacactatgatagacaactggcccaaacagccccaaatgttggtataatcgccacgaaacacaacatggcaaacaccagcatgatcacaatgtgtttaagttagggactgtaatttagttaggcattaaactgtaacataatccaacacatgagctctacccaaatccatgagacgagaacacaagctacttggcgaaattgagagttgtgaaggggctaagcagaacgaaccctggactcgagccgacggagcgcgtcgtccctcgccgccacctccgcacgcagctcccgcgtctcccgacggtgcccctcctccgcctccttccatctctgctcaaattccacaccaaaacccccaccacgcatcagcaaattcgacccaaaaccctaatccccagcaaacagagaatccaatcacagtccgtagagtaagagagagagagacttggctggcggcgtggagctcctcgcgcgccgcacgctcccgctcctgcgaaaccgtaaaatggaagaggaatcagcactacgagaggaagaggaagatccgacaaggcattggatgatcggcaagcaaagctcacgcggaggagccggtgctcggagacgagcgagagaagctgcagctgcagctgcggcagcgccgccgcctccgcctccgccgccatcgccgccgcgccggtgagctcccgcttcctcttcctctccactcgacgagccaaaaaaaaaaaaaactcccacggggccatatactgggccttgccagcccaaacccttccggcccaaaaggcccatccgcggaagccgaatctccatcgaacgaactcgaccgtcgattcagatccgacggctgagatcccacccaaaccctagcccccactccgccgcctcccttataaatagctcctctctccctcctcccccaaaacctctgccctaatccaccctcgccgccgccgccgccgcaagtagccacccgcgccgccgccgccgccgtcgccggagaaggagaggagcagccatgggtcgcgtgcggaccaagacggtgaagaagacctcgaggcaggtgatcgagaagtactactcgcggatgacgctcgacttccacaccaacaagaaggtgctcgaggaggtgtccatcctgccgtcgaagcggctgcgcaacaaggtggccgggttcaccacccacctgatgcgccgcatccagcgcgggcccgtgcggggcatctcgctgaagctgcaggaggaggagcgcgagcgccgcatggacttcgtcccggagaagtcggcgctcgaggtggaggagatccgcgtcgacaaggagaccatggagatgctcgccgcgctcggcatggccgacctccccggcgtcgagcgccagcaagaggtctccgcgccgacctactcccgcccgccgtacggtggcccccgccgcgaccgcgtctagatcgtcgtcgcctcttcgccgccgtcgtcgccatggctcgcctagctctgcgtactactgagttctatgttttgtctttagatctatggttgctttcaagattttgaacttagccgtgatgatgatgctttaagttaccatgtgttttggtggacatgattatctttttctatcgcactggtgaaatcttgagtgattcgatatattaccatgaaattcccatatgctccttgtgttgtaattgcttgttcatgtgttcttcaaattgatgtcttggtatgagttatataccttgctctgtatatcgcgtagaaaatgtttgattggtttgttaaagttgttgataattagtgttactatagactatataacccaatgaaccttaacataggatttcgtttcattgagtgtaacatatgggagagcttagagttggttttattgtctgtggaatagggtagaattctattaactcaatgaaccttaatataggagaattggtttcattgttgtctctagaatagggtagaaattggtgaacaattatgcaggttgtgattctttgatcatttgagttggtacagtgctatccatctatgactgcaattgccttgcgaaattctatactctgatgttcttgattttcctgatctaaaatgcttttggatttggagtagctaggtctccttagtttgcacctatcatacttatattttccttctttggaggaactaaactgtcatatctgttgaattctcgtgccaaaatctgtagaattctaagagcatttttgttctgaattgctggtctttggtatggtagggtctgtttggttccattgcccagctagcctagctgggtaagggcaagccaactcgttgccagcttgccaggcttgccatataccctttgtttggttggtgtgctttctatggcaagaattagtggctagccgtttggttgcttcaacgaatcatctttctctttagagtattttgtgccgcttcttttcatattgagcaaaataatattgcacacagatcaaatttttttaacttatggctttgtcacaagaacactatagattcttccacagttaacttggccacaagaataatacggatagaagtagtaaaaagggcaaagctatatgctaaaagaattccttgaaacaatcaaacatctttttgaactactttattacaagttcgaactaaagcatatcaattatttaaataatatctaaagtgcatgtttcattcttaaactatttagcttgaatgcatagtaattattcaaacatctcagcaaagaaattacatagcagctggatagttttgtattatccattgggtcacatattccttaatagaatccagtggcctacccttcaacatggcagctatattctcatgggtcgcgagataagtctgcagctcaagtcgaaccatgacagggtattccgtcatctcatcaattatcttgaatagggattcatttggatgtgttatatgtgtgaaacacatggtttcagacatattatctgtagcccctgttatctcataaaccacattatcatcagttctaactcttttacctttatcagattttctaccttttgcacgcctagaagatgagctacttccagtattgttctcttgatctggaagacaatctgagtcataatttgatgaagggtcaacatcaccaggactgccatttttatcaccaataaaatcatcatcttcagtcattggatggtcatatggtgtttgcagaacattaaattcccctgttgcatgcttgtcttgaaaaataaactccatttcatcataccaacgtatggggacgttaatgaatttagcccttttatctttggcctacacatgacaagaaaaatgtcagaaaaatagacatccatattatatgtaaacacgatagttatttgcaaggaaagaatagttagaacactcacattagtcattcgaacaacttcaatctcatcatataggattttttttctcaacatcatcaaagttggccccgctcaaattctttgcctccataatcaccttccactgagccttcaacttgtgataaacttgtcgacttgtgaagtttgtgtgatacttgccattaatttgctttgcacattcctcatgatggacttctttaaatacaagttgtcttccatcatgcttggtgccgacggccagaaagttcctagctactacagcccataccatcgacaatccccattaatgcaaaatcagaatccagcaccaaaggcccaaagcaagattactggatgtggaaatagtacatgaagcaacatagacagctcgtatacatccatccatggcaggaagatggagagctttaataaaagaaaaaaagtcctcgtacctgcaaatctagatagacgaggcgccatcggcggaagaaatcaaatctgggagcttctcagttctcaccacgagcaatcttgtgtccagtagcaatcttctgcaagaacatgctctcctcaaatcgagttggccttgctctccgatttactgcgtggaggccggaggctctactgcatttatatatgggcacgggattactgcagatgaatcgaggatgcttgaaagttcggcaaggggaggagggtgattgcaaattgaccggatctatgagccctatagttcagccaagagtgggggaagagagcgacgagatctgcaagcccgattctttggcgaagagtggaggagtaggacgaaattggggggctggttgttgaagaaggtaacaacttttgagaaaaatcgcttcatccttatcaacaacttttttcacgcgaggagcttgccgtcggaggcgagccgattcggctctcccttgtgagctatccttttctcgctcctatgggctagctcgcccccatgggctaggatttttttctgattccaaacgactgtccttgccaggccaggctaggcccctgctagccttggatccaaacgcacccttgataaccagaggggaaaaaaggggagcataccttgtaaaccactccatacccacccctgccaagctcttgttcctttgagaagtcacatgtaatggttttcaagaattccattggcagatacattggcgtcgcagttggatcttgtatgttgttctccagtataccaaaatccacatgtttttgcaccagggaatcatgtttactagttgatccttccattcctgattacataaaaggaacccttagagataacaagaaaaatcctcaaaaccccatacaccaaattaaacacaagttgcttgggtatcctgtgtgggttcggccggttttccttcaattagccgtgtaactgtatggtatttatgctcggtttctctcttctcaatgaaaaacaagaactcactaccactaccctttcggaggtttgcttcggaaaataataataataataataaagaactgctttcacaatgcaaacggggaactgacagtgagccctgcaagagaagcagatcaagtcggcttttccacaaacaccttgcatgcacgatgcacatttgataccgtcgtaatcccaaggaattgattcatccattgtctaaaacgtcatttagaccggaggtagcaatgtgttccctgctcctaagaactaatcgtgcatgcaaagaaagagagagagagaggactcacaggatgatccgatgaacaacaaaaaagaaaatgaaaaaagaaaggcaagagagctgcaggaggaggtagtcagatggtagctcgcacgcagaaagaaacatcgacgaactaaccggcgcgagttcgctgacggccggcgcttggtatatataaagccatcgatcggctagctcaggaacctactgtcaattatctactctctcgcgtatcaaaatataagaacctatgttatgtgtgatgtagtactgttaatttggacggagatatttgaagtattaggatatgtcctatccaggactacgttctcataatttaggtgctgtgccccaacacacaattactcacacgctatatgatatactacctgtcctaaattataagaacatatgatcggcatagctagattcgtaatactatgaaatttgctccatccgataataagttcaactagaaaataggcgtgccagttgacacgccgattaataaagcctgtggtggtattgttggtcctagtcgagatacatatgatcatttttattttttatttttggagattcgaagactctgtacaaacggaagcaaagagaccaataaaaaagaaaatattagaatgaaaaaaattcacctcgagaacacatattgatagtacccacatggatagttagacatattccacaaagtcaagttagaaagtcaagttagagggagtagtgtaagataagtcaattggtcacatggatagaccaatgtacgtgaaattcatatacttaagagctagggagatcaaatgtacggggttatctaaaaaatagttttatttttattgattaattctaaaagatatatgaaatggaatatttgtgatattcctatttgaaaaaataatatggaaatgtataattctcaacaatatatatgttataaagtggcaacaaatcctaagtggtttctacagttggatcactcttccaaataaaaacagcttagggtctataagtaaatacctctatatgcaaattttaagtggatcagcatatgtgggagtacatccttttgatcacatctaatcgaactgttctagatgttgtatcgttaagttactactttttctttaaaaaactgttaaggtactacatgcttctagaattatcacataacacttttgttctctatttttcttgatcttctgcattttttttccttagacgaaatccatgatttatttgataagccaggggcgccatggggaatcgtataatattatggtatgtttgagagaaggggaaaataaaaagatcttaaaagatatgaaaagatactaaaataaggtgagtcattacaacatgattaattaagtactatttttttaaattttagaaaataaattaatatgaatttttaagcaactttcttttagagtttttttttattgtttagcacttcaaaaaacgtacatatgagcggagaacaagcatctatagcatgaaattattttagaatactcggtccataattgtccactcatgccgaacagaagcctgtccataattaatttatataaagacataacagcatctatagcatgaaattaattttattaaatttatcatagaatactcggtatattttaaaatgcacttatttgattttacattttctataaacttattagggtgtgttctttgtcacctcttcccaacttctactctctatttttcatggtacactttccaaaatgctaaatgatgtgttttttcaaaaaaaaaagaaagttgtttataaatatcatattaatctattttttaagtttattttagctaaagcttaattaatcatactctaggatcatgccttagagtatattgtgacaaaagtacccatacactaatctagctacgaatttaagattgtgtcatgaaactacacaattaatatcaaatttatcataaaagtatataccacaaaattagtcatgcggttatcaaacaactacattaaaagcttcaagaaaatattcatcccattttaatgaaagggagacagtgaatcatatttttttcaatgttagaaagctgtagtttttgataaaagatgtaaatatatcgaaaattagtagttttaggatacattgagcaaaacatacatagcctagcgcgatttacttaacttattacagacattatatttatgcatatatgtttgataacttgtgtcctattaaaaatttagtgtagataataagtcatttttcaagtgataaaacaatcaagtcgtgacaaaagtaaataatatttacgtcaaattttgaaacaagataattataaaaatgcaatagatatgtttaaaaactactacctccatatttcaatgtatgacgccattgactttttgtctaacatttgaccattcgtcttatttaaaaagttatgtaattattatttattttattatgacttgattcgttatcaaatgttctttaagcatgacataaatatttttatatttgcacaaaaattttgaataaaacgaatggtcaaatattggttgaaaaatcaacggcgtcatacattcaaatacggagggagtagtagcgttattatattatttgaagacggagagagcatagcaaattaagaaaataccgtcgctagcttctcggcgtgaagtacggtgtctctgggtgacggggttttaattgctgcggcagcgaaggctcaaacaaagaacaaaaactacttgaagttgtagtggtagaacgaggctgaagttgccacgtaggagtacagaaagtcaggagtggggcccaccggaataatctgtctcgtcactagaatgttgtttggagaaaaataactgaggaagatagcactagaaaaataatctgtctcgtcactagaatgttgtttggagtggtccggcaggattcaaccgattcttttgccaaaagagagtatataatctgtaacttgtattgtatttggatcacaatctgcattcataatatcgttgtaattagtctctaatttgtgttgtgaacattttctcgattgttgctgggtgaacccattttttccgaaggaagatcgccggctgattttattaacgaaaaacaaatggatagcactccactgctccaattttaggtggagctaaaattgtttgactgggctcgagctgcaaccgtgcaaaacataccctacaacaactatagcaactactttctgtcttaaataagtttatttttttacctattccacacatattaataaaaaatagaaaaatagaatacatccactttatccaataccaatatagttattcctcagtttatatattgctaatacatttactcctattttcataaactcagatatataattattgaaaattgaatttaatttgagataaatgggaggaaaaaaatgaatttattttaaacggaaggagtaaaaatgaaaatatgggataccaaaaaagaaatacaaggagtaacttagtatttatgatagtataaataattttaaactaattaaagatgcacgaattatactcgtggatatcataatttgaaaactagtgatgaagccgtgtatctactgctccacaccgcacattgatggtgcttcctcgtaaacttcgacacgaatattagggaatgacgtaatatcaaataattagaaagagtggggctttaaacccaggtcatctagtccaccacattgtgaagctagctggaaaatccctaggagtttctcggttcctcgttaacttagtactgaatcccgaagttaataagaaagacctgattatgtttctttctagaactagaatgttaaagctgaagcgaaatgagcgtagttcaactggttagattttatatggtggaccaaattcctctaggtgtaagttctagatttgatacgggtgttcacatttatagttaattattctttcagtgatatgcagtaaacctatcgacagcgagatgtccgtgtgagcgtgtcaagggagcaacgcgaatcgagcaccatgatggatgttctagccatctgtgtttatctttgttatgggttagcaattagaactactcacttcgtcccaaaatataaaaccctaggaccgagtgtgacatttcctagtgctgtacagattcgtagtactaggaaatatcacatccggtcgtaggttcttatattttggaatggctgtccagattcatagaattaggaaatgtcacatccggtcctatgttcttatattttggaacagagtgagtatttgtttgggatgcttagggtcatgatccatgagttggacaattagggcttgtttggcacagctccagatccacctcttctggaactggagctcagcctaacagttttagcttcacctaaaatgggagcagagctgggtagagctctctcacaaaatgaactagagaggtagagctgggtttaggcaactccacactccattccagacccaactcctggagctaaatttaggagttggggctctacccaaacaggccctaaacaggagttggagctatcattttctcactcttatgggctagctcgcccccatgggctaggatttttttctgattccaaacgactgtccttgccaggccaggctaggcccctgctagccttggatccaaacgcacccgtagttcacaatttgttttagaattatcataggtagttaacaatttccttgatcttctatttgtagtgggaatcgttgtgcttcggtaatgttgcttcacattgtatttgtacgtttatgagtttaattctttgatctgggcgtgtttgatctttataactattctacatttgatagacacaggacgatcttatgaagtactcgtaattcttcctccactattcagtgcgagtgttttgtacaacttatgttcaagtgctagtgttagaacttgtgataattgagtttgccaggctaggataattcgatacattgcgttgtagaatattgtcaatattcaggattgatgaaggcaaaccaggctcctacatttgccgaatctcccgggtcggaatcaaacctagcttatgcaatatccgaatcacctgtagaatggcaactcataaggctgaaaagttgccctctttaatttctcttgtcttaactgaattggatttctcaaaaattggtacaattacttcttgagttatgaaaaagttgattgggtcatgtagaagaagtaaatactagctacgaacctgaacaagcattgttgacttttttttattgggacagaggaggtaagtttcaaaccctaaattttgatcaatagattaaaaatcaaaccaatttcttggattatgaatgtctactcccttcaatcctaaccataaatcttaatatgaatgtgtccaaatccgtcgctagtattggatcctataaaaagtctaatcctaattactatatcttataaaaagtctaatcctaactactaacctctatacgtatatgtccagattcgtagttaggattgagttttctattgaacggatggtgtaagttttaaaccctaaatttaggattgagttttctattgaacggatggtgtaagttttaaaccctaaattttgatcaacgattggtttgatttttttctcccacctgcagaaaagtgaagcataggatcgaatagatcgaataggtagtttttgtaagaaaaaaatagtctctctctctctctcttcattcagataacggaaagagaaaaaggaaccgtgtaacagatatgccggtatataatatagaaactcacaggggtgtaaggtgtgcatgtgtatttttggtggatgctcatagaggtgtaatacgtgtgtttgctcatagagttaaatgtacatgaaataaacggagtaagagagaaccgtactcattccattgatatatttcattctatttctattgctccaagcaaaagcttctacgaccacgccaaatataactgtactagtacatgtattcatcaaaacattgtgatttaaaaagtaaatttcacaaaactacatatacttccgatcaagttatcacaaaactacgtatttaaaggcatgtattataaaactatagatttagcattaaattttttacagaactatagatttaaagcatcgtatcacaaaactatatatttagtgatgaagttatcacataactacaaactttaaagtttatatccatagaatattgaggttacaaaagttgtatttttatgataaaactaatgttaaatctgtagtttttctgatacgacacttcaatatgtagtcttgtgcaaaatacgatgttaactctgtagttttgtgttacagttcttaacaaatcctatggctcgccaagtacatgtaattttgtaaaatttcccctaatttaaaagatttgctcatcaatgataaaatctaaaatcacattagccaccaatattaattattagtaaaagggaacaaagggagtataaattatttagggcttattcggtgaaaag

SEQ ID NO: 4778 - DNA, 20493 bp, Oryza sativa
ttgtatgtaatcaatggctgccatgccttccaagcaccctagaagatctctttagaaacatagggcatgagttatgcttacatctctcttgggaaaaagttcttttttttttacaggatagcctgacagttggtagatgtgagaaatatctgaacagtcaaaatccatttgattttggctagaggattgcctagcaactttagccaaagtgtctgccaccttgttcatttccctagaaatccgttgtattttgatctcccttccctgcaaaatagcatgaattttggacagagttgggtctcaaagaccagtgccttggagtaaatgcatggagtatctgcttctttgttgctgcagcaagaacatctattcagccagtggctctgcagctagtcaccattcccaattcgcacctcgcaagacaggggccaaggaagaaatccactccaggaaggagaagcagtgcggttgccggcagagccttccagttggcttgtggctgtggcaaagcaatgccctatcgctccgtatgtataacttgaatttcagttccctttgcctccaattcctgttgcacttcaccggttcaaaccatgaatacaagacaatagtgatattttgagaaagggcatggttaattactagcagctaaaatttttatcataccgctggctttgctacatatgtgtagcctagatggtcaggaacacacatttgtatcatttgtcactggagcacagacaagtcatcaactatatactgtatacctagctagatgtcctctccaagctttatagggggggggggggggggtttcaaattaatctcgtcatacttggtcatagactctgagactcataattcaatattcagttattttttcattatagaaaaccaaaattattgcacttggcagtctgaccaaaccaaaaatattattttcccttggcagtctgacttgtattactctgtcatgacattcactttactgattgcaaaaaataattaagcggtttatttatttttagacaatgaaataaattccaacctttgctcgagtagctacagccaattattaaaaaaatatgttcaacgacgagcacaaaccactaagtccaaactagcataataaaaagaagcgatgcacaaactaatgaccattaacactagacaaagatcccgtaattacggtatcctacttgtaaatcttaatccgtagttggcaaaattttacacaactgttgcctctaggtaacaacatgcagtatacataagtttgttgtcctcatcacacatttatggttgtgctgcttaaaactagagccaacacgttgccctgaaaagtactacctttgtcctataaaatttgaaattctagctaatttaggacaaattaggaggatagataaatgaccgcaataaccttatttaatgaacctcatatatgcatacattccatatcgaaaattgattaaaaggaattttgagataattaaccccacataattagcattcttaaattacttgttggatcccacgtgattagaaatacattttttttggacaaagcctcaaagctagaatttcaatttttatgggacggaggtagtacctgcgagatttatatggtgatttgttaaaaaccaaatcatttctactaaatcatagagcccaacattagcagatgctactacaaggataagtttcttagtttttacatcaatacccacaagccaatttccaaagatatgaaatatactatgtggagtatttagaccaaaagaaatttgtatcgatctccagagattcacatgcttgttgtggccaatttgaaacttaaatacttaatacttttgttactctaatatgtttatgtcacttcagaatagatgctgaagccacagagttgttggaaaaactaaatgagaaggagacctgtagagttcatgctcaagaccatgcaaaaattatagaaaggacttctgctgcaaaccgttgaggtgttacttctattgaattgtattcaaattgagtaattgatttgttttgctcattaattttaccaatgagatgttcacatagactttctcgacttagctcagtcatttacatacagtctcatgcacatataagattgttcaggcttaatttcaattattttatttgcagctttgttgatcctagtcttattaagcaaatgctgagttgctgaccatgatagttcacgaatctgaacacaacattttagtacgaaggaagtagatatcctaaaaagaaaaaaaattctttcacacatcctaacaacaacaagattagtgcaataccatctaatcctcctgccatgtcttcctttacaatctgctcaggaattggaaacatgttcatctttcgtgctgcttcaaactcaaatgaggattccaggctcaaatgttcaatccgtcacagctactaacccagctccatgggtagccttggacgacaacgccaccaaggttagatcattcatgctgcgagagaaaacacacatttttcactactgcatcaacatgattgcgtgtacgtacagaatcggatcgaggtgttactgcgtgtgtctcgattgatttctcatgtctcccaatagctcgtgttccttgcatttgattcggtccatgtattaaaaaagaaaaaataataagaaaaaattgttctttttggtcgcattttgatctatacgtgaaaataaactaaaattattatttccggtcacgttttgatctgtacgtggaaaaaaaagttgaccgttttcttaatgattttaatacggtatcgattaattgttctctcacgtgtgagcctggcctgccgcgtgcaactactatggaaggccatttgagacattttttatcactgtttgtttttctatagaattcacgtcgtcctttttctgtttttatgttctcgagaaatatacacacgcttagatttttctgtttctcgcgtatgttctttatcgtgaaaataatgtttacttttataaaaaaataaactgtacacgttaaaaggtgaaacggttgattttcgacctatagtgtttgggacttttttcccccagatcatagttttcataaaatattttagaaagaaaattatgaaccactattttagttttgacaaatggacacatatgatattaaaaaacatttatatatgtatgtataaatgatttatttattatgtagaaaaacatatttgtttaaaaaatataaaacctttatgccatgttaagtaaaagtataaaatttaatgtgtcattttatacataattttttaaaaaatccaaacaagtaaagtaaattttgagatttatcaaaattaattagtttaaatatattttcttttggatttgaatatttgaaagatcaattatttagtatatttagagttgtttttaacatatcatgtgtaacaaaaatataattttggctcaggaggtattaatgatcctattccatgacataagaaagcaaggtttctttctttatttctttgttttggattttctttgtataatagtttcagatttactgtatattctagagttataggagtagtactgagtagcgtggtatatttaaagaaggaaaataaatgcaaattcgttgttttagatttattttttgcttaacaattttgggtttactatatactctagttataaaagtagtaccgagtaggcgtggtatatttatagaaggcaaatgagtagaagttcgtgtgattggaaaaggaagatagttttggaaacctctagaatccatatgtgatatttttctctagatttttcctcacatatgattgttaggttttttttctctagtataaatttatgatttccttcaaaataagaggtaccacgtgtaccaattgaaagctagcaaaagagccagttttagattattagataggacgtgctaatgagcgttattgggctaggtcgctaggaggacagatcttgggttttctttcttttggctcttttttttcgccacgtggccacttctagtcacctctactaagccacatattttctctaccattataaaagttgaagtttatctcactttggaacgttcgactcctacatggtgttcgcctcttcccattcctatatacgtgcatcgtcttccatcacctccgttcgttgtcgccctttgcgattctgaaaccggacggtattgtaacgttatgatggcaatgtctccgcgaagtttcccatgtcccattgcatgtccgacgtcttctccagtactcccacttccccaacaaccaccctcactcctatccaatcgatcgaacccacgagcttagtatagggagatcactaccatagtagagctgatttcatgtcgaacccggtaaacataaacacggggtaccgcatcttgacaaaggggaaggtggcgtgcacacaaccctgccgggtgggggcaatgatgaccatccctctttcctttcacattgtcttcccactcagtcatttactggtcatactttctcttcctctttaccttttttacagccagagaaagtgcatgtgcgttgcaacggaaagaaaaactaatttgaaattgtaccaccatgcataaataaataatattcggtcacaacgaattgtgacgccgacttgtgtagctggctattacatcacccatcacccgatcatagaaattgttagtttcacgcttcatgattgaaaaaaaatcctaaattagaatcacatcactttatgatagggaaaataatgacacgaaatcataacccactttggtccaagcaaggatattaggattttacttttcctccttgatttcagcccgacactaagcctggcagacactccggccggtgagagatgacacgctcctccctcgtcggcggctccatcgtcgtgtggccaggaaccatggctccgcacatccccttgcggctgtcgcgaccgagaaaatttgcattttcctgaacgctagtatattaatctccgtcctagaaaaagctagggtacaccacacaaacatgatataaaagacacatctttattatatcgataatacttacattattacaaaggcgcttcaggcctgacaataaaaaaaaataaaaaaataaacagcagcggactagcgggcctacggctccatcttcacaggcgctcaactggggtataagccagggctccacctaagacttcttctccaaagcttctcttactgaaggggggaaagatagagcaagaatgagtacaaccacagtactcagcaagccacaccggcagatgcatgattaatgcaagagggtacaaggggaaataatataggggttaagctttgtagaaaacagcatttaaaagtcacttagttgcccaaagctattttataaagacgatcctagagctacacaatattattaatcaaggccgtgaacccacacgaacctgccttaacccaaggcctacgatgattcagaccgaacttgcaacccgacctgggccccagctcgtcccaagccaatcaggccaaccattccacattttagttgttaaacaagttttaagaattaaaccactaacttaggtacattgctaggcttgcccaaatccgagggcgcggctattcgaatagattgtactctgatcagaggtgtacatctttacccacaagacacatctttactccgcattccatggccgtggaacccgtcgtaaaggatgtgacataacccctttacccatcctagccgtgacaaaagcaccgacccaacctcgcctacggccggaatcccgagacaggtaggtaagattgagcccctagcagcaggacaccggccctgtgccatgacatctcgactaccgagccgcagcccgtgtagccttcatttgccctagagatgtccatctagccccgacttcgtccatctccatctgtgtactcttgccaggactagactgagcaccgggttaagccttacccattagacatgtggttagtacggtagtgctttgcaacagaggcccgaagactggtccttatagtggccgaggtgctactagcagaacaatgcacctcgagcccagcctaaaaccattttgagagttttgaatagagggggggaggtgtgtgttcaattccatcacaagccaaccattccacagtgtccaaatgatatgagaactcccacagtctaaagttataaaaccacctagtgttgcctaattaatcagcgaagcatctatctaaattcatactagtggaaccattaatagagtacccactagttggggttttgtttatcctagggtggagaaggtaataataacaatagcaataataataaggtcataacaaaggtaaataggcatagctaaataaaacaatgataacgcgggaatttaagtaaagcggtaatgcaataatttaaattaaaataattttataaactaggattcaatatgctcaagagtgatgcgacttgcctttctcagagagaacggccttccgaaccttcggcgatcaccgcgaaccacgcttcgagaacctccagaacgacagaagctacgcgaagtacacaagcaaagttacaagcctataaagaagcaataaaaatacataaaaaaataagcacatggttctttagattataacaaacattaagagacttgaacgggtcgattcgggattcgtatgaccaagacatggtcattcgaagtttaatgctgtcacgtggagatttacggattattgtaattaggttttgcaattataaaacatgtgtaagcgcttgcctggaaaagacaggaaggctgcgcttgttgacatgcggaccccacatgtcaacctaagggaccacggtacaccgagtacacagagacggtccacgggtcgacggaagcggaccccgtgtgtcaaccgaggcgagtggccgacaaacggactccactagacaccacgcggactacacacgtggacaccacgtggctaccgagcgggcacacaaacacggtcaccacacgcacccacgaacgactaccgacaccggtacacgggcaccggggtcgacaaccgcacaacgggcgcggggcgacaccgaaaggacgaggacgggggcagcgagaggaggcacccttaccaccacgcaacgaggcgtgggaacaacgacgacgaacgggcgcggcggagacggcttggggacgacggaggcgaacggcgagggaacgacttcggcggcgatccttggacgaaggcgagacgcggccagcacaacgcttgacgacgcggagccaaggacgaagacgacgacggggctgcagcaaccttgacgaaaggcgggcgacgaacagcacggcttgacggagggacgaacaccacgactaccgggaatgacgggaggacgacgatgggaaccggcgaggaggcgacgatgaacgccggcgggttcagctgaaggggaggcgaagccaaagacgacatcgccggctcgccgctgtgatgccggaggtggtggtggcgcggccgacggcgcacgggtggaggaagggccgaccggggaaattccgacgaggcggatggagaggccagcgcggcacggcggtgttccggcgaaattcgggcaacgtggtggcctggccggggaagaggatggcgctgttgtgccgggagaggaggcgacgacgacagccgacgcactggcgaggtggcacaggcggctggggcggtacagtgccggcaacgccaccaaacgtcgacgaggacaccgatccggcgagtttccggcgaggatacggggaggccggggaggaggatggcgtcgcagtgccggggaaggcgatggcgacatcagacgccgcacgggcgaggcggcacaggcggctggagggtggctggcaccgaggaaagagaaggaggaggcggggagaggtggtgtggccacgggggagctcgggaaggggctaaaacgatagaacggagcgagggggttccattttataggatggtggagggagccgggcatgggagaggtgggaacggcggcagaaaagttggccggcggccatggaaagcggccaagattggcgcgggcgttccgggtgattaaaagcacgaatcaagaggtaattaagggggaaagagaggggagggaaaggggattaattccccctaatcaattttggaattagtcatttgaatcgagcggatttgagggagaagaaactagggttcacgggagagagagaggagctgtgcgggaggaggacgacgacccgggtggtggggcccacgcaggcgcgccgtcagcgcgcgtgcgacgcgcgtgcgcacggctggctcggctcggcctggtttgggccgggcggctgggccgagagggaaggagggaggggaggggcaacccacaaagaggaggagaggaaggaatgggccgggaggggaagggtaagcccaagagaaggagggagagaaagagagggagagaaagagagggaaaaagggaggacttttggccgcggcccggagagagtgggaggacttcggactcggcccaaaggaggaaggaggatttatttttatgttttctttttagtaaactctgataattgtttttgttgcttaataatattttcggtgctctgaaaattcaagtaaaatttgagggctctttttagaccacgggaatttaacaaaaaatctccggacaacattcgaatttttcttgtacgtattttagtgtttgccaatttcttttcgaattttaattaattctattatttcttttagagaatgatttttatttcaggatgaatttatcacgggcatgacagcggcttctgtctgctgaaaaaaatttagaaatatacattttttccgtggaatttgtaagaaagtactgaacatgagaagatttgtgaaaatataccaccgtcgcggtttggtttagcgagagcgcggcgtcgcacgcgggatgcgtgagaacgagagcggtatcgctgtttagataagcgaggacgaagtgccggccgtctcgcggcttggagtaacgagagcgtcagcactctcgcagtatgcgttagcgagtgcgatggggcccagcgttgctaccagtttcctggcgccgaaacgtgagagcggcggcggtctcgcgcctgggaagtgcgagagcgagcgggtgccgcgggtctaggaaagcagcgacgggacgcgcagtcttgcacgaaggtaatgcgagagcgccgggcggtctcgcgcggtgggaatgcgatagcgccacacggcggtctcgcggagtgggaatgcgatagtgcacagcacaggctcgccactgcgccgaacacgagcgatgtgacagcgctgtcgcttgtctgatttgcgagaccgcgctttgctttccaaattagccagacggaaacagtaatgtactgattattaagttaattacttgtatatttgcatgaattaacaacatgtgataatagcattagtttttaaggctcattagtaaatatatatgagaaaccttctgtatatgtactacaaatagaacttccattatttaaactttgttatatcaaataaaaaatcacattagctacaaattaattgtaacatacaattagtacaaattaattgtaacttaaaattactacaaattaattgtaactttaatttaattttttaccgtataaaataattatgtctatctaatttttaaacccgaactgactctaagtcatataacagaaactacctccattatcattatcctacttaataataatatactatacattattaatattttatatttattaacttcatatttttatatttattgtttgccctaaggaccatgtagctttgcttcacggaagaggctgttgtcttgttcgaaatataaaatttaccggtctcgcaattctaacaaacgagatcgccggtcccatgcacgctgtcgcattgctaatgtgcgataccgtgtcggactaagcgccaaccagaaaatcaccatgggacccactccacagttgctcttgctctatgaaagcgcggtaccgagtccactctcgcgcttcaggtgtgcgagaccgcgggtcccacgcacatctcccgctcgccagtaatgccacaccacgggccccacaacactacggctctcgcgcgttgaaaaagcgataccgattccggtctcgcgagggcaatcagtgagaccgatgggcccattcctgctctgtctcccaaatcgcaagaccggattgggtcatctctacgtggcgctctcgctcaacggaaaaacgataccgatgcggtatcgcttacccaataagtgataccggagctgacgtcacgcttttgcttattgatattgcgataccgtgtcgatttcgctcagtcccgttgcgaacctcggtatcgcgctttcctcccgcgatttcgatagtatatttgtgcaaatcgatcggcatcaggtatatttatgaaaaaaatattcatgaacagtatattttcaaaattttttctctgtctgccgtccacttcccgaggtgtgcatcggagggccggcgcactggctgacggcgaaggcatcccacctccctaagacagccaccgcagtggcgtcccgagtcgacgacaacgacgtcactgaggtcatcttaacaagaccatgatcgattggtgctgtaacttaatttgttcctccatgcaggtatactcccttcgtactcatattaaaagtgagtcggttagaataatatttaagtcaaatcttgggaaaatgtaaaattatatgaacagatttgtcttgaaaaatactttcataaaagtatacatatataactttttaataaatatttttatagaaacaagaagtcaaagttatgttttagagaccgtgttgctgtccaaaacgacttcctttactagtacggagggagtatacatctgtatgaaaacttgctctctttttgtttggatatataaattccatgttatacccagttttagctgacatgacactgtgttagggtgaacccacatgtgagcagccggtctacctactcctctctcctcttgctctctattcgccatccctcccaggcttctcactaggtgacggtgggtggtgagcaacagggagaagagtgatagctgacaggacaggagctaggtggtagcacgtcaccgagttggaccagtcgccgaactggaaggtgacggatggcaaacaagaatgggcggcaggcttttggggtggaccatctcaccctcctcccccttcccctcccacggcaccttcggttccccatctctcttaggaaacaagcggcggccaaaaagagaggagcaaagcgcccctctttgccatgactcatcatctttgccgcctttgggtggatcattagtgcaaagacaaatggtggttcgtcgacatggtgagcggtgccatccgcgcgaaccaacgctcttctatgcccaacaaccactagttcacctcctctatgtccacatgccgacaggcaacgtagccaccggtgcctcctcggcgcaaagggtagagatggctgtctgccacctaggtggaagccgacgactagggtaaggatcactgcaacgggagctcgccttcgacgcctcttcccatgggaactacgtctccattgctgcttcaagacaacggtgggcgtcacaccggcttatgccgcaccctcgccttcctctgtgctcgagcccacgcttcggcctcgttggctccccgtctagacaatctttcctgatgtctagggatgggtaattcaatggttttgacatcctttaagtaacctatacaacattcgaattctttagtagtgtattcctctattatcgatctctataggtgagcacgattccgtacatagccattcataatagacatgtagcgctcgtatcccatatttgatgtaagtataaaggaccaagttcaataatctgagagacaatctaaacaattagatgcactatcatattgaaaaataatggagcaaaatacatctcaagctggcatacggtctctttcacaaatttctacaatggccccaactccaaagtatcaaataatttctgtgaaattcaatttaaaaagtaacatatatttgtgatcaccaccttaatctaaggtggtttgattgcccttatagtattagggagaaagacctgttagcatcacatgacagtcatgaaagttgtatctggatatggtcaaatctttcatcaagactagcttcctaatgtttgatgagaaaccagtagacaatatcaccgcatgtaaccatttgcataatgcattcttctcttctgatgttgtaaatggcaggaggagctcaatctttgcatcaggtagttcattaggttgaagttctattcttatagccaatttcgtcacagtctatctttcgtcttaccatgttaatctttactactataattcatgaacctgtttccgcagaattttggacagtcatacatgttcgtcttaccatgttaatctctactactataattctgcatgggtccaaactttcctgaataagacaatattttccaaccttttcttcactattgttgtttgagcctcctcgattctactaactgagctgactaagcttgatgcattgatcactgtagcacgtaccatcctcctgatgctttccaagctcaaatccaccatcatgagaaacaaaatcaattctaggtaattctttgttttggagaattgtgatgcatgcctactatgactgtaatagaatggaaaaggcacaaatggcgagacatatatatatatatatatatatatatatatatatatatatatatatatatatatatatatatatatatatatatatatatatatatatatatatatacacatatatatgtatgtatatatatatatataatatatgtatacatatatgtgtatatacatatacatatatatatacatatacatatacatacatatacatatacatatacatatatatacatatattcgcaggcggacgttggctagtccggtccgcctacgaaaataggaatcggccgcctgcaaaaaaaaatatccgcctgcgaagataggtagaaatttttgaaatttaataataatttgcccgtaaatttaataataatttgcccgttaatagaaattcttgcaggtagattattatgtacatatattggaagattatcaagcattaggtactgagaaatctacatatattgcataactcaaaagtgttgccaatatatatatatatatatatatatatatatatatatatatatatatatatatatatatatatatatatatattactatatttttttatattgtcacttcaaatacgccatctagttacattatggcatagaagtgttccactcccgaagatccttgaattcgtcacttgtcactagggcaccctctgggtcaaagaaatctcctttcacatgacagcactcatggtggatgaagtggcacagatcacgctggacatttgtgatgcctgtatcgtcaaagcttgttcgacgttttaatcttggcaactgcatgcattgaagataaacaatatattagtatcataaatatgtgaagctgtctagtacatagtacagggacttacatcctctgcgttaaccctgtacctcttattaaccctaaggaattcgcacgggtaatacccgcaaaggaccgttcctcgcggttgcttgtgacacttcaggacatatcatacaaaaaaatagttaaaatttgcaattagtgaaacaattggaatacattaagtgagtggagtattaccggccaataggtacgtactagtagcttctcccttgttcgggtctgttctccacccttgaacttgtagtattggtacgcactgtacggatgtcgtacgtttcacattaagaaggatatttatttataatacattcatataaaaatgcaagagtcataatcacttactactgtaagattgttagaaattctttgtatgactggtgtctgttatcgagagggtccaagactaccacagttccgtctttaaggtagatgagtaaacagatataatgatcgctacatattaacaatatcatagttagttagtaccagctaaaataagacatatgtgtagaagataaatgtaccgaacttacttaaaattataagtggctatgactactctcttatttggaaagtgcaagaaggcttgtccaatatactgtgcgacaataatcaatttctccttgtgcaagcccttcttgtattcagctatctcttttggagtcttgcccttcagctggtctgaccctggtgctagcctcacggtatgctgtggttgacagatccgagttggatccaagaagccgataggttcttttttcttcttagcatccatgtattgcatcctacagaagaagtttgttagtaacaatcacatggatttgtattgtacatatttttcatataattaattaaaactcatactcacatgcacaaaacaccgacatagttgacgtccatcttatcccgacgatatatggcgtggagatctgagaaatctagccatacgtaaccttcggcgccgaagcaatctaccggtgatcgagctgttatatttcccaaccctttcttgctgacctccatgtagaaggtatgtaaccttctcatctcccatggtccttcatttagtgcccaatccggtaagagtgctttcccatgttcgtacttttccgggcaatcatcagttgccaagtttgttggcccggctagttcagtggccttctggggggtcatcatctctgagtttggcacgttccttaccacctctgaagacggttaccatgaacttctctttgttctcatctttggacttgaagtcgtggctcctaagcactctaggcacctcagaactggtagtggccttctcagggacaatggtctcttgcacctcggcgtcttttgtaggaaaagggtcttcaaatatttctggctctgtagtttgtccctcaggtaagtataggtctcgcaaccaatctatgaagagatgcttgtgttctttcattatccactcggtggtgtgacccttattgttagctcgtagtagttcgatatgttgatcgatgtagggctcaacgatagcaaactgatgaagtacgctgaagtgagcttcttgaaatgatttgtgatcatgggcgatgaatctcttctttcctatcgttcccctgccactctatctgccctcgtgtcggggcacaggtactccaattgcatatccatctttgagctaatcgatacagcactcgacaacctcttcagtactataaccctcaaccattgatccctctggatgtgtacgatttcggacgtaacccttcaaaaccgccatgtaacgctcgtatgaccacatttgatggaggtacaatgggccaagcacaaccatttgcggcactatgtgaacaatgaggtgctccatcatatcaaaaaatgacggagggaaacacatctcaagttggcactgtgtctcatgtgcgaatgtatggagatttcctaactcttcgagactaatgaccttctgtgacactgcgttgaaaaagtagcacaaccttgtgataacaacctttaaatgctccggttttatggcccttattgcaattgcaagaaacacggtgagcaagacatgacagtcgtgtgaattataaccagataccgagaaatctttcatggaaactagtcgactgttgtttgatgagaaacctatgggcactctgacatcacggagtgacttgcaaaatgacttcttctcctcagatgtcagtgtgaaacaggctggtggaagatatactttgccattcttctctccttcttgagggtgtaactcttccctgattcccatctcgactaggttcatccttgattgcagaccatctttagtcttcttcggcatgtccaacaatgtttcaactatattgtcaaacacattcttctccagatgcatgatgtctatggcatgccgaacctccagatctttccagtacgggaggtacttaaagaatatagaatgcttcttgaatgggggagggagtttatcatctggcttcgaactatcatcttgcttcttactatcctctggtttcgtagtcttctcgggtttcttgcactttgtcccctttgatagtttcttagtcacttttccaaactcgcaaacaattttctgtcattgcacacactttttcccccgatgtaggttttggtgtaggatcagtctcttcagttccatcgaactctgccttcatcttgtggtacttgtgatttgtgcgtaggaaccgccggtgccgcatgtacacaagcttgttggaacccgggagatacctatagtacgttccattcgagcagatcacacatcctgttttacctttaatttgatctaaaactgaaaacattgctggataatcgttaatggtcacgaagatgatggccttcactgtgaagtattctcttaagtactcgtcccacactttcaatccctctttccataaatcagccatatcttccaacaatggttcaagaaatacgtcaatatcaataccagactgacggggtccctgtatgaggatacagagtagtacgtattttcacttttgacaaagccaggtaggaagattatatatggtgagaagcactggccaagtaatatgtgagctgctcatgtctctaaaaggattaactccatcagtactcagggcaaatctaatgttccgtgggtctttagcaaactctctatactgagcatcaaagtttatccactgacgagcatctgtcgggtgtcgaatcatcccatccttcttgcgcccttcttcatgccagcgcattagttccgcatctcgcggatttgagtatatccgtttaatgcggtctttgacaggaaggtaccacatcacaagtgtcagacggttctaggcccgtattgctattcgatttgtaccagctagcatcgcatgttggacattcatctaaacaagcatactctttcctgtacagtatgcagtgattaacgcacgcatgaatcttttccacaccaagtgaaaggggacatatgagtttcttcgcttgatatgtgctggatggtagtgagttaggcatcgggagcattttctgcagaagttctaacagacagtcgaaactggtatcagactatcaatgtctcgcctttaacctcataagttcaagaactgaccgtagtgttgtgaactcactgtcacagcccttcgactcatcatacaaaacttccttagctgcctttagtaaagcttcaaagttatttaaacctctagccgaccccatcagcacctcgggttctgcatgacgtaacatttcctctagatcgattttgtcctcaacagaaccatcgtcgtgcaccaggtcttcaacttgtgtcggaactacatttttaggcccgtccacttgttcttcgccatgacgtgtccatatttcgtacttgtccataaatccacgagttactaagtgctccttcactttagaagcatcttcctaggctatttcattcttacagtcagcacatggacaaattatcttcctcatattgttcttctcagcgtgtgccttcgcaataccaataaatttagacacttcatttctacatggagacaaaaacctcggccaatgatacatccattcccgactttccatatctctaaaaaaaatgaacataaaatatttgcactattaatactaaaattgtagggtttattgaaaaaaaacatatcgccattaaagcaaagtttattttaatttttttacacagacatgccaaattaatatattaggaaaatctaacaaaatcatatcatcggcatattacaaactaatataattattttttgattgcaccaaataaatagacattaaaaattttattctctctctatatgtatgacaagatctagatctagatctagaactaggaggtgaatatgatagcaaaataaaaaaaattgagaatttatgttaccacactaaatcactacaacaagagtcatcaaatattacacatacatctagcatcaacatatcaaaagaaagtaaattaaaaaacatggagcttttccttcacaattttgcatgcataaatacatcacaaattgaggtctaaaagcttaaaaaatgtatacctagggtggaaatgagtagatctaagcaccgtagaaaacctcccccctatatttaagacactttaggagagagaaacttctgggagaatgaacggggctcaggaaggaataagactacataggggcatctttgcagacgggccatataagcgacgcctgcgaagatcgcctgcaaagatcgatcttcataggcggaccaccccctccaccccgggtatcgtcttcgccggtggggttttggctccgaagaccatacccgcctgtgaaaatggaacccctacgacatcgaaaatgtgttttctagaagtgcattctactaccaagaaatgatcctactcaccaatttaaaagggggaaatagtattttccttatattttacgtgccgcatttttatcattaatttacatgtttgtagcatctgcttgtccccaccattgtcgtgcacacgtccctgccaacgcagtccttcaacggccgccgcgtttcaattaaacttttactccctctgtctcaggttaagatattctgattttcgtcaatgtcaaactgttttaagtttgaataagtttgtagaaaaaagtaataatattttcaacccaatgcaaaattattatgaaaatatattcaattattaatttgatgaaagtaatttagtattataaatattattatatttataatctataaacatagtcaaatttgaaacagtttgactttaaccaaagataaaacgtcttgtaacatgaaacagagggagtaatatatttcctttgaatgtatagcacagtccgacgacgaccatattagtaaaacaaaagatgagggaaattttttttgtttctaatagttgcgtaaattataattttaccgcttcatgtcatcacttccttgtatgattataccctcctattttcagattttttttaaatatactttacttttgaacattttacaattatccacatatttttaaaagatttgcggaaatatacacgtacagtgggtaggcgcgcgcgatcgatttgtcagcgcggcgttgacgcgtgggaccgacgactgggataaccccgtgccacgatagcccgccaccgtatcgctcccgcggcccatttgcgtccaccaccgcgtggtcgtgcggtctggctgcacgccacagcgtgctgcgcgccttcataccttctaggtgcatgcgtgcatgcggatgccaccggtggctcgctgcagggccgcgggaccggaacggtggcgcgggattgttccggtcatcggtcccacgtgtccgcgctgcgtgaatgaatcggtcgcgcgccctcacaccacagtatatgtatatttttaaaaatctttcaaaaacaagtgtatagaaaaatgaatattatatgatcatttttgctattctactataccattacagattatagtaaaaggtctctaacaaaatgaatattatacgatcattttcacaatattttaatatatttatccataatttttataatacttaaaacatatacctgtcattatattacgcatcaaagtacatatatcatttgtttattccatcattagttccactgccaataaaccatgatttttttcgatctccttcttgagatgcaaatcttgtccaacaatctaatatttcatatactttcttctataaaatttactgaacttatttccctctaagcatggattggtaaaccagtttaatatgttattaataactaatatcatttttactccgagctagattgttgaaaacaatattgaagattgatttataattcctacagcaaagcgcggagaatcacctagtctataaagttcatccctactaagtataattaatgctaattctctctcctctcattaagccacattatcttaattgtttttagcacttggataatttatcaaggatgcaaattgcatctcatcccttgaaaagtcacaccatataaccaaatgatttgtaacctttgtataactgatcgaggtatgaaatatataagtacgtacatgaaagaaaatcaaaaaaattgtacagtaaataagaaataaaattttataacttatatttttattttgttacataattcttccatagtaacacgggaggtacatatctagttagctagtctagcgaccgagcacctgcagaaaaataaaccatttttacttgatcatgctctaggactctacttttgtatattctgagtacgtgtag

SEQ ID NO: 4779 - DNA, 43203 bp, Oryza sativa
  unsure (1)..(43203): unsure at all n locations
ccagccgccgcctccccacgtccgcccgtcgctgccgagctcaccgccgtcccgcctgtgggctgtggagaaggaggcagctgaagaagaaggtgagagaaagagagaggaaaatgagtggaggagaaggaaggtgagaagataagggagagagagaggagagaaggggccacggggagagagacggaaattttgaataggatgggagggacggctatttttcggtgcgggtggattaggaggcccgcacatgaaaatagggttattttcgcgtgcgggcctgttaagtcacccgcacacaaaaattgattttcgtgtgcgggcgacgctcccaccatttttccatgcggtctgacttacggacccacatggaaacaaaacgggggtggcgtccagcgtaatcaatcctgtagcagtgttatcactaatattcaagattttttccgggtggactcgcacaaacacaatgagcaagagcataggaagattttggcgatgcagctatcacagctcacgacatttttcttctcctcttattaacttaagccaagcatgcaagtgcatatttatacaacgacaacgcactcacatgaataccggataacttgctccactaagctcatgcatgcacaggatcctatacaagctagtagagctgaccatgtaaaatgctactcccctgtttcatattataagtcattttgattttgatcaaattcaaactactttaagtttgactaagtttataaataaatatagtaatatttacaataccaaattagctttattaaatcaataattgaatatattttcataatatatttgtcttgagttgaaaatgttactacttttttctataaatttagtcaaacttgaagctatttggctttgactaaagtcaaaacaatttataagctgaaatggaggggggaactaacttgcatgcaagctaacaaactctaaacgtgcttgcgtgcacatgcagccactaatcactagcttggtcccatgaaaatgcttcctttttgcacgtggctgatattggcgccactctccagccgcttcgcacgacccggctgcattccggcggatgaggcttcgctgacatatgggctgatgggtatggggcacatctgagacccatgtccctctaacttaaagttagaggagctcctttctatttcggtcaagcctatgtatttgtacgtatcacacgtattgccgggtacttcttctgaagccacacactgctacagtgctaagacctatacaaccactttctacgtgcaaatgaacaaaatatatatgcatagtattaatgacaagattatttctaagagtgcagccggccgggtgcctgcttctgcagttttgcttgcctcgggccacttctggatgactgcatgcgtacaactttgttgcagggctgcagaagagccccaagttcccatgatcaaccaaggagctatagagggtggccgagccctctctgcccctctgctgcatccgtgtctctggcagcactaacatacactctcttgcaacgaatagtttatctccaagttagaccaaaactcccgacaccttcttttcctaccaaggatagagagaaaaaaatataacccaagctaaagtcattaacaattaagcatggaatgtctgtgtgtgtgtgtgtgcatcctaattgatgcgtaagccgggagttccatggtcaattacctaaaaagaactatgcatggaactttgccaatgagaataacatttatatgcatacaagtaaattaagaatggtgtccccagtgtaacaactcgtctacctcgatctggtttcaacaaaaaagcaagttcttttaattagatgtttggtccagaactacacatggaaacttttgtaggatcgaatcacaagaactaaaccaaccagagggggggtgaatggttgatatacctaaaaatccaaactattagcagaaataaaagttaccctcaaattcgatgtagatcggtctgaccgaggttgatccgccggtttgaccgagctcatgccgccggtctgaccggtgttgatccgccggtccaaccgcctgaagattgcctgccgcgtgtgaagtcgccgccggtctgaccgcctctccttcgtcggtttgaccgccgcctgccgccggtctgaccgccggtatgtcgccggttggaccgccgaacccgatgaaacacaaatcgaagaactcttaaagtagatgacaactttatttcttctctttgtgtttacaaagtgcaccaacagtactccttacaaaaatctcgactaaactcgaaaccctaactaaactagcaactcaattgctctcaaaagcgatacaaaagcgataccgggaagcctcacgctccccctctatttatacatgaggtaggcagcctaaagccacgaaccaaactcatactaagagtcctaaacaccttaggaaaacctctagtacaagaaacaaactttacataaccaatcataccaaatttagactccttccaaattcgactccgcatcccatacgcacacaatacctccatcgtatgtcatatgaaatcttcaccaaccatgtgcatcaactatagccatagtatcccgcatgatatctgaccaccacggacatcgtcttaccaccaagccgactcccggtccatcaccgcaaatactctcccgagacatcgagtcacctacacatgaaacaaacaaagaaatcatattccgagaccaagctgacggagcgtggggctcctcaccgggagaccgcgcaggcccccctttgccggttcggccgggggcgctgagtgaggttcttcgctctcgatctgaggaaagtcagcgggagaggaagtgcacaagacacgggcgacgtagacaggttcgggccgctgagaagcgtaacaccctactcctgtgttctggtggatctgtgcgtgaaggaatacagagaaccggagagcgagagtgagttcaggcactcgcccccctttcccagagtcccaaccccctttctcctaggcctgggcctcctttttatctggtcaggggtcaccacatgggcctctagctgcctaagaagggaaacatgctttttacaatgagggctagtctacggccggaaatgacctctgacaagcagagcacacgcctcctgccccgctcgcccgctttcccggtggacgcccatttcaaccttcatttaatggccagcgacttccttgccatacttgcgctgaagcctggaatggatctgaccgggactgacataccaactccaggagttagcacgccggctccggctagggacgagagccaggaagctctcatcattccgacgggacggggcgaggcgtgtgacaggccgcctgttgccacctaacccgcgatctgactggtctgtgaccaggcacacgccgcgaccggtcacggaccggataagcgtgcgctgcgccgcattaaatgcggcgtggcgcgttcgtccaacctgctataaatgcggttaggtgagccccgctgtgctcacctaacccacacatgtggcgccaaaaccacagggggtcggggcgcctcagccctcggggccgaaacgggggcgccccagccctcggggccgaaacaggagcggcccgacccctcaggaagacagagggaggggtggccacgtcaccctcgggcccgacccccccgagggggtcaggccacgtgggtgaccgcggctacccaagcctctagtcacgatacccccggccccatgtcaccgacacaagctatctccaacttgactcattgttagcaaacaacagtattacatacgtatagtatccatctagaagccataaccatgaaacaatcacggatatccaaagaaacaacccgaaaccgaaaccgacatagcgtcggccggtcagaaaattgattatctccaaaaccacttcgacgataatctccaaatctcaaaacctataatcacaaataccaattgttcatcacaaaataagaatcaaaacacactttgatcttacaactttttcgatgggggcatttggttctgatttttcttaagataatggatagaaatctgggctctactataatgtgcactcttacaaacaccccacaaatgacaagagcaacattcttgataagttgatgaataacatacacggtgaacatttttttaatgtctggctaatgttacattggaagcaccacataatttggtagttacttttagttgttgtattgggaagaaatgttgtatattacaacaagaacgaactaccactgcattaccttcttctcctgtacagattttgaatgtcgcatagaacaagaggggagaaccacacacaccatgatcgatatctgtggtgtcagctacgttttcagataacagctgcaggacgccatcaagttgtgctaccgatagtatcaactgatcgtacaactatctctacatcatctctgttgcttcttgtaatctcatggattgcaagaaccttgtgtcgacatgcttgatttccaggtgtctctccttcctactaaagtaattcactgtcgagtgaaaacctaccattctcatatggcctatcacttctggtttgtagcttcagtactgataatttaaggagacttttgtttctggcttggctctataccatgcagaaacatactttattatttatcattgagttagtggtgtgcatttcacatgttcttgacctgatggaataagtatatataatctattatagaaaaaatgcatatgtgttgcaacgggtgaaggctattttaatcttattattattgtacggtttagctaagatgaaattcactgtgggaaattcgcttggatattctttttacaaaatcatgagctgcaattaggggtctgatcgtctcaagttagcatgcaagttttttaaagagatttcttatatgactccttctgtatttctcaaaatgaacaaaattaaaaaccgactcaaacatggatatatatttcgaaaagcgattgaacttaaaaaacgattcaaacacggatgacgtaccaaaagtaccggcaaaaacatattcaatttttataatagtagagaaatgcatttgtatggtgggcagagttattattatggaaacggtgctcctactatataagaggcatcctcaatgtttgcagtacagtgtaatcttaaggtgggccctataaatagtgaaccattgttaaagccataccccaaatgctatggttagaatttagctataagatgggctcacatagaatggaaaaaagaattgtttcattccttgttcatgaagtgaatgagagggaaaaaaatactttctttttgcttgtggtacggtagaccttaagcataaggtgcactctaaggtaatgctactttccacaatttatatggctcaatttacaagtgcagtcgttgtcttaagatcacttttttcatacattatggttgctcaaccaaccgatgacatagcatccccttacgtaaggtagtacgactacggcatcagtgatggggctagaggacaattttctattcacatagctcaaattattaaaagaattgcaaactaatatctgtttttgcagcattttctttatgagaatcattagaaatatatatataatttttccttcaaaagtggatctctagtccccgtgttataaaaaaaaccatgatgttttcgaaccagagaatgatgaacaatggtgtactcagttaacccttggctttccagtctgttattcctattttaccacaattggaaacctggacgctcactttttaagaaactgtgaaatgcatttatctgttttcatctcttgatgaccaaactgtgtacgtaacagctatcacattccacaggtcccatgcaacgactgcaaccagtgaagctaggagaacatgttagatgggcatgcagcaagctgtgcagcgagcggccttgagtgtgggtgtggttagaagagatcaatgtgttgatgccgcctcgatgccacaatgcccggctggtgatggaaccctctccatggtgctataaccctgcgcaaaatttccatttttccactgaaaaggagcatggtttggaacatgccctttatctgtcgcctagccttgagttcctggtgcctccctttcctataccgattagtgtgctaaagtattgcccatgttttaccgctagcgttacacactaataactatatatattgatagagcattgttccggtccaacatattgtaaatggagatactggtaacttgaaggaccaatctaaatcgggccgttcattcttaatgggtaagattgaaaaccaagccagagcaaccctagcacgctaagtccagctcgtgatgctccttctctccgaccgtgtctccgccgccgtgctctccaaaaccacgagcaagtccaagcccagcatggggatggagatcgaggagcccgaggcggtacagcccatcaccatagaggtcctgcccgccacgtcatgtttgtcaccggctcattgaagctgttattctgtcttgttcccttaatcccctcttcaatccgccttccgattcggaaaaaaataccatggcgaggcacgcggatgcactgccatcacagtactgcggtagctgaaggggttcacatgtggccaataaatcggcgacggccgtcgtcgacgtgctcgaatccgtcagcgagattgggggaagggtcgcgcgggaggcgtatgtcactggtgagcttgggggaagtgatgcacgaacgctcgttggctccctccgcctgctagtccgtccatcactggcgagagtcctcgatgcgacatctttaggagagagaaaagacaggaggaagataaagaaagatatatgcgaattaactaaatacccttacttttttagtacctctctgtcttatacgaaatcacgtgggcagtatcactaggtataactctttctcacccgttggatcagatgaaattgatggctctgattacattacaggtaccgaggtaccttctagatagtaaaaaaatatagcaaacaatgtattccacagtaccatcatacatgctttcaacactcggatgcgcacctcttcagctattcatggtagcaatttaagtgctcgctaactgaatatggattcgcaaaagtgcctgaaaagttcagtgcttactgaagatcacagagagacgcttgggagacaataacatggaccagggctcgattgtgaccttagcacgggccctattatatgggccggaatggaaatttcatataggaataagtctattttgccttccccaactcatgttcctgcttgaatcgcatcactcaacatgctgaagaagtatagaacacaccaatctcccaatgcttcccaagcttacatcaagtatgatgataaaaaaaaaaaacaacaactctttggacttcggtttcagagcatggtcaagtaaaaccaaaggaagaaagaagcaaactgagaaatataagcactgtattcatgatctctgacaacaaagattcagtatagcaaatgagcacctgcaagtatttaacctcatctatacggttgcactctacgactctactttgtgcgttaattggagtgtgaagagtacaaaaatagggtaagataaactcattgagtgaaagtttgatactgccttgtacaaatcatatatgaaacaatcctctgaacaattttgcactaaattgctcgagatattcgtatactactctctgtatatggatacaaatcaatttactgaagcttgtcagatagttttgaagtgtcttgactactttgatcaagcctcatgattcaagagttccaagctatcaatacatcaagcagattgatggacaaattatagcaccgtatataatatagcccgataaaaatatttccaattctttctaattcaataggcagctagcattgtactttgactccttgtggctcttcattgattcattcatggatagagggaagacacgtcgcattctttggaagtgagtagcacataacagaggcacacttgtatggttgtatgtttcttccaagctgctcaaagactacgagatcaaataatgcaacaatgctaatcagaattcacaacgaaatttgaccatatacgtgcactttgcctattgtatccttatctgtttttcgaaaagtaatcctatcaaacaattcataatttggttgtttgattaattcgcctaaatacattgggttctccagaaagccatgctactgagtattccctctgttccaaaataaataaacttcgtacagtacgtgacacatcctagtatgatgaatctagacagtatactcccttcgtcttaaaataaatcaaccatatgatgtgtctagatttgttgtaatatatgtcacatcctgtggttgatttattttgtgacggaggaagtagcatattagtactatattagttacggagcttggaatccctgtaaaagcccaatacatgtccaaattacaggcccgtaattcttttccgaactaggctaaaaatggtgcttggatggactgtgtcagactaaaattacagctgtattcagcccattccattagattataagtgtggcctggtagaaaattaagtgctcgctaattctatcttctacatagttggtaaccaaaaaagaatttatttctataaagtaaaatatgcaagaagccacatcatcaacaattttaagccatcggatcgcattagtatagagttatcatctgttggatcaagaaactactcatccatttttaggttgcttgctgggccggacgtttgcttgcgggttgaggcagaggggaggagaagagaggacagcgggctggcttggttgtgggctgaagaagaaaatggactggcaatagcccagagagaaatgatgatttttatttaaataaatgttgaaatgatgtttattttatcaaaattagcaattaagctctggaaattccaacaaattttcaaagagtgttattaattatggttaatttaataaaaattaaatccaaccatagcattttatttcttacacttactttacttgtaaattaatttaattatacacctacctacttaaaaaatacttcctccgtttcatattataagactttctagcattgtccatatttatatagatgttaatgaatctagatatatatgtgtatagatttattaacatctatatgaatatggacaatgctagaaagtcttataatatgaaacggaaggagtacccaaatacttcagaaaatttatatttcaatgaattatataatgtaaatctttcttaacttttcctcaaatttatcgtcttttcttcccgttgcaacgcacgggcactttttctagtaaaacaaaaatacagatagtgttggcatgggccagaatggagaaatgtgaacaccttggacctaggcgatggtggtggcctgatgccactgcctgctaggagagatcaatgcagaagaaatggagaggccggtgacagggcgatgattctcccgtggacaggctgcaatctgcaaaggcaccggaaacaaacggccggccacttgagtggaggcagagatttcccttaaatatccaaacatttctgaaaataatgattttttttgtaagttacattagttgatcccagcttagtagatttctgcctctaccctgccatatttgtgttgcatcgcaagcaagcggtttttttcctttgcttgttccacttctaatttattttttcttcgaaaatttatactagcatgtgaaaaataaattagaagacaggtttttatacagttcgtgggattgctcacacttttttttaaggaattagcggcaagagatctgctgattatattaggagaaaaagttctgatagttctgacacatatagtagctgataattcacctccagtcatgaggtgagattaggaagaatacaaaaagtagattacatattgctcacacttttttagataatgatattcctcacacttgtatccctatctaaatccaacatatgttggacagtgatgcaagagcagaaacagtttggtggcttgcaagaataatctgactggcttgaatgtcagttcccttggcctccccttcctagttctcattgctcttcaccatgaattgagaagacaatcgtcactccttactactcctagcagctaggatattctcattcttcggcggcatttccgacatatatgtggccggatacgaagatgttcttatcatttatcagtgaagcacaaacagggtgatggtaaatatgaactagctaaggaaatatataagctgagctctcaagatttacagtagctcagattaatctcgtcatgcatagtcaaaaattaattggcttccatctttgacgtgataaagcatccagccaattgccgtatcatgatttggaacatagagttaattagtcactacatgttaatgtaaaaccagaatgaatgcatggacgtaaaggggtcagtttaattgatttatgaacaatatcaactgatcaaaccacaaaccacggatgtctttggtatggccaaagcattgctagatcccaaggctgaattttgcagaagagctggtatcctgagacgatgttggacttcttttttttttttttggaaccaccaacttttcatggtcatggacgttaacagtatggttggtaataaaccaaaacaacagctgatttggtttgtaaaggtggcaaactagtgcttccaaattaaagtcacaagacggtggttttatgaagttcataaatatatagtagctattcacacattattaatttggtaattgacaaacagttgctagctctcagtggatgtttcttgtggtaactgcaattaatctagtatgtacctgttcgaatacactgaatttataattagctaatggttattgatcaaggtgcaggatccaattccaatctgatgcaggcttcgcaagtaggtttgcaactatatcaacctcccattgtattgtatcggctatacttcaacgaccatagtctctcctcgaacgctatcatagatcgtcaaatacagcaaaacggtactgctctactggaataagttgcacttgcttttttgctccttacgcagcttgtcgtcttgttgtaaatgatatagcaacttgaacatgaattcctgaggcctccatttcctagtggatcaaatatctgaaacgactaatatatatataactgattactaatcttttttcatgtaatatatgtaaaatgaaaatgtatttgattattttataatgaacaattggcatatatatgatattattggttttgatatttgcaaattattggtgatatggttttggagatgtgtgattttcagatgatgaaaaagattgagttgctctgacggtcatggtcagacaagcaggactggactgatcagaccggcgttatgcgagcggtcaaaccggccagcccgactgatcagaccggcgttatgcgagcggtcaaaccggccagcccgacggtgaccagctgaattctaatacaaagacacacaaacaaacatgaacacaagtgacctagagaaggccagaattctaatacaaagacgcacaaaccgtttgtatacccccaacagacaccatggaacttagacgtgcattctcggtgtctccctttcctattggatcctattgaacatcaccatattactgaacgaacaatctctcgagaaattgctacacatacaactggcatgtacgacttgtgaccaactagtacttagttgtttcttgtcctggcccacatgtagagatgctgctcgtatggagagaattgattggcagacatgaggccggaccggataggggtcagacgatgtggtcggatgtatagcagtactcaatctctcgcatgctgctgtggatcacactgtacttgatgagtgctagtgaattttaacaagactgtttagctatccaactctatagcaaggaagcaaagatagtgactattattctatcaagtatgcaatggcttgtaacaattaatattgtaggtgaacggtacatgagcaattaatagaggtatcatgcagtttcaaggcttcatatgaaaagtaattacctcatccttgttggaacacacaacgatgtggttcatgtaaaacgaaggtgcttgcaatgctgcgaaatcctctttggctggtgtacttttccaccaagcatagaagtttaaggagaactgtaggtcggtggctacctaaggaaactccgattcgatccgccccccgttagaacagtgacaccatggatcactggctgcaatagccatcatgggaaggaagctggatttgcgcagcaaaaggttatagcacaaggtaatgcagtgctgggtttaacatatcctagagagagatgcatgcgcatcttgcaggaatgtgctatattactcgagtttcagttccctttgcctccctttcccattgcactttgctgtgaagacaagacaatggttagtaattaacagccacaattctcattcggttactatatatatgcgggcaagtatatactagctatagtataaatatatatgctgagatctccaagctttatgctagctcggattagtttggtcatgtgcagtcaaagtcggacttgtttgagacgttccacacatacacttgactgactgcaaatgtgtacacttttagttactgctagctagttgtagactcatggttactgaaagacatatataatgccaatattggaggagataacaaactgtaccaaagttgtagcctttagaatttagacatgtttgattgcaatacttgattggatataaaaggttgtttgactatgcacacctaactcacttatgttgcagtctcctctttttttttgtaaaaaatatatttctgaagtacacctctctgatcttataatggaaaaaaagtagtcttccactcgtcatggtggaaaaattcttaagctcttgctatttaaaagtgatttaaaaatggtgctttgcagataatcaataattgaaaagcactactagaaaaattatttttgcaggtggccaaatgctttgcctgctatttaaggcccgtgaaaatcatcaatttttgtagatggattttcatctatgtgtaaaaatcgattttcgcaagtgtccaccctaagagccccacgaaaatctccttttttaggctgcacagttaagtgcccacgaagacgaggtattgctttccaaggccttgtggtgacggatccatgctcccaaggcccagtggcagcagatccgccgccctcgacaccactgccaatgatgcacgagggagagatgaagattgtgtcgatagaaccaccattattgccccttcatcgccgttgccgacccaccgccactgaggtctaccagcaccacgcaacccacgaccttaccggatcctagcccgtaagcctcgctgtccgcgtgccaagccaccacctgggccccgttgctgccctaggtccgccgctagatcttgctactgcagctcgatctccacctccagatctgtccattgtagccttggctgtgccatttcctgagttctgccacttgggccccgtagctcctccttgttgttgctgagccgccaccactcctttgtcttgtcgttgagacatcgtcgccaccacgcatgggttctttaccacaagaagagcggtgggagtgttgagagaggagtgggggactaagagggaggacagtgatgaatgcgtgatacaggacataggagaggaatgagggagagggataatgttgaatcgatggggacagagattttaatcggtgtaggcaataggtcgtggatttttgcagcagcctttggttcttcatcctttcgcatattctttgtgctaatgttttttcatcttggcaagagatggagaagcttattttgatatttggagataaaaaaatataaaagatatttcccccgtttcaaaatatacgacgctattgactttttaagcataatgtttgatcatttgttttattaaaaaaatagtataaatatgtaagagtataagttaagattatattttttatttgatgataaaacaaatcagaatgaaataaatgaaatttatataaattttttaaataagacgaatggtcaaacattattcgaaaagtcaatagcgtcatatattttgaaatagagggaataaatctatggcccctgcacggatgcacccaggcaaaattgtagaacaaatgaaaccaaaagggaaaaaaagagaaattaaaggacctggattcattcccaatatgactgcccacctacctgtatatgctagtcccttatgccatccccaacactgcatgtcatctagtgtccatagcattaactatattgcaacagaagcaaaaatctaatgtggcaagagagttaatcaggagaaagctaaaaagatcacgaaatcatttctcatgcaagaaaccatctctacaccaaaaccaagaatataggtgaataaaaggaaagagaagagagatgattggatgggaatttaatttaaaggccatcctcaacccagaatatatatatatatatatatatatatatatatatatatattctgggttgaggatggccttagatcaatgtaactataggatcgcagatcgttacttgggttgttgaaggttggcttatgaaaattttacttaatacacgccaattttgatcaacatgtttagtcatccgattccctctttttttcagcacttttttattgcagaaattacaaaaagtccacattaccaccccttataggatggaatggagttgacgtatgtgcacaagtgcagcccatgctacaatgggctggaacactacatcaataatgatgttgccgacatcaaatagtcagccggtgacttgggcgtaggatcctggtgcctcctgttcccaattatatagttggcaatgaatattgaccctatctgccacttgtcttttatatccctcatctgtttaatttcttgaaaaaatacagtcaagcaatgaactttgtaattgatgaattggccttgatacatttgggtttgggttttcctttgcgaagaccatgtctagcgagtcggcatattagtatgtataattatttacctgaatcaaagcgtatagtaggtgatggtaggggcgcaaaaatatgtagtagtgggagggacacggattttctacacctaggtgtaacatcacctatatatgcttggcacataagtagtcgtagaaaaatgtggaaaatgtggttagattggttgtgatgctagaagtataaataccaatattcatggttaaatatgatctgcctttcaataaaggaaaagaacaaagtttgacactagagtgtgtggacaaaaattgctatgttttgacgacatctcttgttcatggtcagatcaaagacgtacttgtcccagagtatttgtactggtatgcacacatggcagtgatggaagcccagatttaagccgttgatttgcattgaagactttgtttcagaccacttagctttggcaaatgacaaatataatcttgaacaaccgagacatacaagtatattcatcttctactttaactacaaagattatcaggagagagtatatttagcacaggacacagcatatatgcgcagttgaacattcagccagctcaatgaatgcaatagtggcttggtcactacaagaactaatgctatgaagcattgagccaatgcattcgatcattggacgtgccattttacctacaagaactaatgctatgaagcattgagccaatgcacgaactcgaacagcagctatagcagagatcgttgatgagctggctaaaatcgcactggaagcgcacacggcgggccaaatttgctgaggcccgcatgctgaacgaacggctagataattcgttaaaatggtgggaacaatgcaggttggactgctagcaagctatgaccagagtagatgaagatatttcattatatgccacaactaatatttgtaaagctagctccggtactctttacttatagtattatactataagtagaaataatctagaccatccgtttctaagggcatattagtactttattagttcagtgattagtgataagtttgacatttaattagtcttattttaccatgggtcgctgacagattgctctttcagggcttgttcactttaatgtcattttcaaacatacaatttttttttgataaaattgctaaaattttggctacgtttagtttgttgccaaattttagtaagtactccctccgtttcataatgtaaaactttctagcattgctagaaagattgcggcaaaatttgctacaggacaccgaaaaattgcggcctttgctatgagacacccgaagatcgtgaatcttttcgtggacactgtaaaaaagtggtaattagctactgaatactcctcccattattttattatttctagtcaaagtggtaagtaccaaaatgcccctgctctctttcttttcttttccccttcttcttcctcgcgcttgctgctgagctgagcagaggcacaacgcgcgcggcaaacgcgacggcggggcggcggcggtggcgcatcaccggggttcaccaccgacggcgatgacgcacggcagcattccggcgcacggtgcccgggaagaactcgcctttgccgcccagcgaccggtgtccagcggcacgttcacgctgtagtgcttgccaacgccctcacggatttcgttgatggtgccggtgcccgggagcggaggcgcgagtagctgagcatgcagtggagcatggtggcgcgtaccactgcctgtcgacgaccgcgcacgccacctcgctccaccccccggtctggccgccgcgccgccgcaccacccaccggagcgcctcgcagaacggcacaggcggcgttgagtgccagcatctgctcgaccaggtcggcgcggggtcagtgactgcatcggggaggagctcgtgcatgggcggcgcgtggcgtcggtataaaaaagggaagcgagcaggaaaacgtcacggtggacgcgggtttcgtgttaattgagatgcgccaaaatgcgttgtttacaaatatatcacaaaatctaaaccgagagggctctcgatttagtgttaaagagcgacgtaattatttgtgagagaaggtccaatgcgctactaatacatgagagaaggtcctgtgctactagtacaactacgtgacaaagggtccagttgttactagtgcacacaatgcatgtctatttttttttctttttatacaattttctctcaaattacttatccaatctgcaatctgattacactattacgttcgttgcaattaaatatttacaacaagattttacatgattatattacgatgaaaaaatatttatatttataaattacttttattatatacgtaagttacttttatcatatatatatatatgttacttttagatttgactaaattacttctatacattcataatgatctaagttgattatttttattattgtttttagttaattctatattttgtggactttataaatttctctacactttacttacgaatttactctacatagtttcttatttcagctcactcacaatataattatttctactaaagagagttactcccccgtttcataatataagttattttagcattgcccatatttatatagatgttaatgaatctagatatagttctaaattaaagttactttcctttttattataagttacttctgtaatatatatgtaaattacttttaacctttactaaatttacttttatatgtctaagaagtaacttagtgaaatctaaaagtaatttagacatatcataaaagtaaattgtgatttttcattaaaatataatcatgtgagatcttgttgtaaagatttaattgttacgaacacaacggtgtaatcggattataaatcggattagtaatttaaaagaaacttctctaagaagaaaaaaaacatagatattgagtgtactactagctattttttggaaataagggtgtctctctttagcactatcagctagcactctcgctgtagttgtgtcccaaatatatatgcatgcgggcgctggttcaggatcctaattacaagggattagattaatcatatcttctatctatctgaaccaacaaaccatccgtgcatatatccatatatgagatgacaagataattctagtttatctaacagtcggggggagttgaaggtggtgtggacgacgttgacggcgaggccgcgcgcggtcgtggaggagctcggcgagctggagcatcagggcgatgtggctgcggaacgggaacgagaacatcacgacgcggcggcggcgagctccggaggcgctgtcaacgagcgcgagcgacgcgggcgggcaccatgacatgagagaaagaagaagaacagataaaaagagattgacaagtgagcccatgggtaaacttgtctttaactaaagtttctctctccgtttccatcggaaataataaaataatacagccgctgtccgccagctaattaccatattttttgagtgttcatgagcaaatacacgatcttcgggtgtctcacagcaaatgccgcaatcttttggtgtcctttagcgcaaattttgcctattcatatagatgttaatggattcagacacacatatatgtctatattcattaacatctatatgaatataggcaatggtaaaaagatttacattataaaacagaggaagtacatatgaaatcttgctaaaatttggcaaccttaccaaaattttagtaaccttactaaaatttagtaatgacagaacttggtaaggttgaaaatggtagcaaagtgaacaacccctcagatttcctaaaagaaggaaaaaaaacttactcgcttagatacgaggagggttacttgattctttaggttgtgtttgggaaggagggactttagtccctctcacaaattttagttcctatggaggaactaaaatttttatgagagggactccttcctaaacaccaccttagttgagcaacggtggcagagaagaacaacaaaacgttacttgtttttactggatttactcacagaaaaggcagaaacattggcaagaaaaggcagagaagtaaataaaatcagagaagttcataatgcgctgtaatttgttatttgttttgtaccaagattaacctgaatctactgtaaaaatataaaactaagagaagtgcggttctacatagaccaagcaggagttcagtcaggataaatcaaaaaaggatgaacacgtgagtggtgcggctatgagttcagtcattgacgacgacgccagcggctctggcgccaaaaaaaaatcatttctgggataagttttttcagtagtctaaattttataaaatgatcaaattgtaaaaaatccagttgtaggaggtcggtccaggtcaccggagctctccccgacgccgccagatcctgccgccggagctcggtccgccgcatcctagatcgatcctgcactgcgaatggcatccgcagcaatggttgatgtctctgcacctggcacacagtctcgatatgccgtgtacctcagcgccgctgacaccacgccttgttctcccgcgtatccaccgtcgctggcttcaccagcttgcaagctagcgaggagaatgtgttttactaggtaaatgtcgggacagcacatagcatgaacctcctctgttccagcagctaagcgtgctgagcctgtcataccgaagaggttagcaggtatcaatctcccaatgcttcccaagcttatatgtatattcaccacaagggcaaagaatatgaaagaaaatttgattcttggctcatgagagcttggtggagggagaagcatgggattttgttccagataaagaagtggaaagcagagtaaaataagcagatggtgatatatatatatatatatatatatatatatatatatatatatatatatacatatcctcgtatctctcttggtgtgttcgtatatctggaaaaaaaaccattcagatacagtttagaaagtgagcacgtgcaagtatttaaattttacttggttgtattctacaactctgctttctctcttggagtgggaaaagaaatgaaaaacataacaggaaaaaacatggtcaagctcattgactgaaagtctgaaatttgattgtataatgttgcattaaattgcatgagatactctctgtatatgccgattgctgaaacttgccagattagtcaactacctcaagcctgattagtcaggagctccaagttatatatatcgagcagatcaataacaacatcatatatataacctgctaaaaaaaattccatttcattctttccaataaaaatattacatttccttgcaattaaatctggttgttcttgacttgtgggtcttcattaatattcgtgcaggaaaaggaaatgccaactccaattgctgataactcctactgtacagtataaatattatactgtagttctcactaattaatcctagtatatatacttatgagttcaaaaagaaaatcctaatatacatatcaattccttaatctcaaaacatcctcgccgccagctaccccgctataaaccatatgtgcttccctttttcaaaaaataaatgaaatatttttgcctgcctcaattgaaatcaatttggggccaacaccttcacagattgctacaacttttttggagagagagtagccacatccaagagccgtcattgtctttgcctgtttctaacttgctaacttccagatcggctaatccaaatgcagctcggacccaatatcctggtgcctcctcttcctaatcagagtttacaatcgccttttttttaatgttctcgtatggttttttttcaagaattaattatgtcgagcaattcatgacttggttatcaatgaaatcaatgaattggcctaaatacaagatggtttgttttcttcccaaaaagccatggctgccgagtagcatgccggtactatataggagtatttatctaggacacaagagcacgagtggcgagcgagtgcaaataattgtgagatgagttttgtgccttcatggtcatgcatgactcacaagcatcaattgtccaatgtccaccaaccatctgagcaccttgctgttaactcacctgttggcattatgttttaacagtgcaggtgcatcaattcattcagggtaattctaaatttactacgggactaggcgactaactatacatttgtcgtcaaattttaacttaaaattttttatagatataaatatagtacaattctgatgtagttaaattgtaacttccatataactagagtgtataacttgtacgtagctttccaaaaccccttgatgacatgctatttccatgagaatggagataatggtaccgaatctcctcacatgtgtttgggttttaatttttttactacctcctttacataaattttaaagcaaatcgaatgattcaaaattatattatagttacatacgagttatcatataattacatagcgattgtactatatttacgtctcaacaaatatatagcaaaatcgtttactattgacaagtactcggttttacaaagcctttttcttccctttttgccatctccatgagccttcctttagtgcgccaagttaaccccattcaaaaggtactatttagcctaggaagtgcttcctatagactaggggtaaagtagattgatcatttttcaatagtaaaactggaattttcacatacactactagaaaaagcatttttgcagacatgggattttttttccaggtgaacatgactctcggagctaaatggccgcctacaaaatataaaccgggttgaaactcactgtccgcctgcaaaaatctatagacacgatggaaatggtatttttatatcctgcgaaaataccgtgcggaaatttatatccacacaggcggaaaaatatccttgaaaaaaaaccctttgttaatcttatgtgatccacctgcggaaattggcgtgaatataaatagacacgacatggaagcaagaatttttctaagtctcagctctcagctctcctctccctctaccctctcttccttagctccatcagcgaccggtggtggcggggtcggcagcggcaacggcgaggcatggggtcggcgacggcgacgctcggggacggtggcatccacacccggcacggctcccttctcctccctcctagatccggccgaaggggggagggggaggaggggtggcggtggctacccctggaggtggcggcggtggcggttcccgtttctcctagatccgacctaaggaaggccaggggagggcgatggcggcggcggcagtacccctccctcccagatccggacggagggaggccgggggagggcggtgacggtggtggtggtggcggcggtagcagtacccctccctcccagatccggacagagggagagagagggtggtggcggtggcggcgctcctgcatatttcccgtaaccctagatcggtcggaggtgggtaggtttgctggtggggtggcgcctttgtcgagtaacttcagttacatgcatgaacttcagtgaaccaacttgtatcgatacccatggtatagctatccaagcttgcaataatgataggcctacaacctacttcgtgcagcgatgattattgtctccaaggatcatcctaaaatttaatgggccgcaaggtgttaagtttcaacctatttatgaaaaaaggagttacaccctgatgatagcaagaaacagtggagcacgagtggcgacaacataatatgcacaggtggcatggcagttatagtgatagcggggtggtgtgactgcggtaggttggactagctcctacctttttatgatacagttagctgagtcatattgggccgatagatggatggatgggccatttcaggccttattcagtgggatttgttagtattaatcttgactagtaggcgtcatatactcttgcacgtgttgtgtatgggcagcaacgtgatgtgtttgcatggtagactagctaatttgttagtacataattagttagtgtgtgtgtgttttgtatggattagttggagcgatttctcagggttgttagctgcaacaaaggatagcgggcgtctcatgcggaccgtggagcacgacatgcagtagttagtggctgtgcatgtatggatcgtgcgagcgtatatgtgcgtgagactcggccagcaggacgttgctcggccttgggccttataagctccatgtaaattctgtgtttgtgtgagttgggaagaaacagaagaaaggcgcacatcgctgaaactgcttgcgtgtgtccactacagcgcgtgtctttgttttgtatgtttagtgcgagtgtgattcttgtgtgtgtgcgctcgcgtgagtttgctgctccgtgagttcttcgcatccttggccaaaagctaacaggattcactcaggggctggaagagtttgagctccttctcaagactgtcttagtacggtcttctctgcgcctgtactgcaagcaacttgagcacatcgcctctgattcggagtaggactgccaccgcatcttttgcaaggagggtagcgcatctgtgagccgctgttatctggtctgttccaactttgttgttgacatcacgatcagattgtatgacactaacttggacacatgttcccggccggtgcccccttttcctgatcagagtttgcaaatgaaacttggccatcgtattgcatttggcacttcctatcctcatctgtttttcaaacaggagctaatgctagctgccatacaattgacttggttgtccataaattggcctaaatacaagatggtatttatataaaacaacatcctgtgtgaatgcaaatacaatgtgccggagtttgtaaccatgcatgacgcacaggaataatctgtgcaccaaccatctgaggaagatgccatttacttacttctgggttttttttagaactcatgcattctttttataacaagaaactaaggtttagaaacgagggcttttatggtgcttgaaaggtatttcaagtacctcctctggtataaactttctaccgttcatccttgaagggtaatttaggaatagaaaaacataagcatggatagtttggtaattatttttagctgtgacctttagaactctactaggttttctgtgcactactagagaaagagaaaggggctttactcccggttgggaaccccctatacttccggttatataatcgggaccacgaatccgggacaaaagatacccatctttattcccaggtaaaataaccggagtaaaaatccataccaccgagacttaaaatggagccaggctagatccggttgctgtttttttttctttttctcattgtttttaacattgaatattgatttcattccattcccaaatcatctccaaattgatcatcacatcacagatcaaaatgatcctctccaaatcctcaaattgatcatctccaaatacatcacaaattcttaaaaaaattacatcacaaatacatcatatattcacatcacacataagtcaaatacatctcagatccgaatcacaaattctcaaaaaaaatctaacatgcgttgcccgcctgctgcgccgccctccacgccacgcggttgcctctgcgccaggccaccaccaccctcgtgccgcgctaggccgccgccgccttcgcccgtgtcatgccggctccgccgcttcgctattgcctctgcaaggaaagtgtggataagagcaagaaaagaggagaggataagagagagaggagagggagagaggaggaggatggggagaaaaactttgcgatagagcatttgaggataagtcatagggattatatacgacgggttgaattttagtcccagtaggtattactaaccgggattaaagatctaaataatctttacttccggttggtactaccaaccgggactaaagttgtgatctttactccctgttggtagtaccaaccaggactaaagattcttggccccctgacaggcctctgacatgtgataaaccgggactaaagatgattttttgtcctagttggtaacaccaactgggactaaagataattttttttaaccgggactaaaaataatatttagtctggttctattgtgtaaatcagccgacccagtaaagatcacttctccagtagtggtccgtccctgtaatttgttccatatccataggttgttcttgttgctaactgaataatccataactaatctcttgtttcctttactgattctcatctaaaattggattattgaaaatatcatactattatcttcgattaatctatagacataagaagcagtggccttcccttcaaccattcgttgtaaccattcattatttacgacagtttttttttgacttggcattatttacgacagttgatcgaggagcaattgttgccttcaaccaaatttactgaacatcctgatcaacagccgccatgacagataattaccttcccattgagccatccaaggttcatatcgctcatgtctgctctctcgatctgtctgtgtatcggctctcacaacggcatcagatgattacgcatccaaaaattactgatataaccttttacttaatgtattaagttaatacatagcccacatatttagtacctttctctatgtaccttctgttatacaccgtcagattgtatgtaatcaatggctgccatgccttccaagcaccctagaagatctctttagaaacatagggcatgagttatgcttacatctctcttgggaaaaagttcttttttttttacaggatagcctgacagttggtagatgtgagaaatatctgaacagtcaaaatccatttgattttggctagaggattgcctagcaactttagccaaagtgtctgccaccttgttcatttccctagaaatccgttgtattttgatctcccttccctgcaaaatagcatgaattttggacagagttgggtctcaaagaccagtgccttggagtaaatgcatggagtatctgcttctttgttgctgcagcaagaacatctattcagccagtggctctgcagctagtcaccattcccaattcgcacctcgcaagacaggggccaaggaagaaatccactccaggaaggagaagcagtgcggttgccggcagagccttccagttggcttgtggctgtggcaaagcaatgccctatcgctccgtatgtataacttgaatttcagttccctttgcctccaattcctgttgcacttcaccggttcaaaccatgaatacaagacaatagtgatattttgagaaagggcatggttaattactagcagctaaaatttttatcataccgctggctttgctacatatgtgtagcctagatggtcaggaacacacatttgtatcatttgtcactggagcacagacaagtcatcaactatatactgtatacctagctagatgtcctctccaagctttatagggggggggggggggggtttcaaattaatctcgtcatacttggtcatagactctgagactcataattcaatattcagttattttttcattatagaaaaccaaaattattgcacttggcagtctgaccaaaccaaaaatattattttcccttggcagtctgacttgtattactctgtcatgacattcactttactgattgcaaaaaataattaagcggtttatttatttttagacaatgaaataaattccaacctttgctcgagtagctacagccaattattaaaaaaatatgttcaacgacgagcacaaaccactaagtccaaactagcataataaaaagaagcgatgcacaaactaatgaccattaacactagacaaagatcccgtaattacggtatcctacttgtaaatcttaatccgtagttggcaaaattttacacaactgttgcctctaggtaacaacatgcagtatacataagtttgttgtcctcatcacacatttatggttgtgctgcttaaaactagagccaacacgttgccctgaaaagtactacctttgtcctataaaatttgaaattctagctaatttaggacaaattaggaggatagataaatgaccgcaataaccttatttaatgaacctcatatatgcatacattccatatcgaaaattgattaaaaggaattttgagataattaaccccacataattagcattcttaaattacttgttggatcccacgtgattagaaatacattttttttggacaaagcctcaaagctagaatttcaatttttatgggacggaggtagtacctgcgagatttatatggtgatttgttaaaaaccaaatcatttctactaaatcatagagcccaacattagcagatgctactacaaggataagtttcttagtttttacatcaatacccacaagccaatttccaaagatatgaaatatactatgtggagtatttagaccaaaagaaatttgtatcgatctccagagattcacatgcttgttgtggccaatttgaaacttaaatacttaatacttttgttactctaatatgtttatgtcacttcagaatagatgctgaagccacagagttgttggaaaaactaaatgagaaggagacctgtagagttcatgctcaagaccatgcaaaaattatagaaaggacttctgctgcaaaccgttgaggtgttacttctattgaattgtattcaaattgagtaattgatttgttttgctcattaattttaccaatgagatgttcacatagactttctcgacttagctcagtcatttacatacagtctcatgcacatataagattgttcaggcttaatttcaattattttatttgcagctttgttgatcctagtcttattaagcaaatgctgagttgctgaccatgatagttcacgaatctgaacacaacattttagtacgaaggaagtagatatcctaaaaagaaaaaaaattctttcacacatcctaacaacaacaagattagtgcaataccatctaatcctcctgccatgtcttcctttacaatctgctcaggaattggaaacatgttcatctttcgtgctgcttcaaactcaaatgaggattccaggctcaaatgttcaatccgtcacagctactaacccagctccatgggtagccttggacgacaacgccaccaaggttagatcattcatgctgcgagagaaaacacacatttttcactactgcatcaacatgattgcgtgtacgtacagaatcggatcgaggtgttactgcgtgtgtctcgattgatttctcatgtctcccaatagctcgtgttccttgcatttgattcggtccatgtattaaaaaagaaaaaataataagaaaaaattgttctttttggtcgcattttgatctatacgtgaaaataaactaaaattattatttccggtcacgttttgatctgtacgtggaaaaaaaagttgaccgttttcttaatgattttaatacggtatcgattaattgttctctcacgtgtgagcctggcctgccgcgtgcaactactatggaaggccatttgagacattttttatcactgtttgtttttctatagaattcacgtcgtcctttttctgtttttatgttctcgagaaatatacacacgcttagatttttctgtttctcgcgtatgttctttatcgtgaaaataatgtttacttttataaaaaaataaactgtacacgttaaaaggtgaaacggttgattttcgacctatagtgtttgggacttttttcccccagatcatagttttcataaaatattttagaaagaaaattatgaaccactattttagttttgacaaatggacacatatgatattaaaaaacatttatatatgtatgtataaatgatttatttattatgtagaaaaacatatttgtttaaaaaatataaaacctttatgccatgttaagtaaaagtataaaatttaatgtgtcattttatacataattttttaaaaaatccaaacaagtaaagtaaattttgagatttatcaaaattaattagtttaaatatattttcttttggatttgaatatttgaaagatcaattatttagtatatttagagttgtttttaacatatcatgtgtaacaaaaatataattttggctcaggaggtattaatgatcctattccatgacataagaaagcaaggtttctttctttatttctttgttttggattttctttgtataatagtttcagatttactgtatattctagagttataggagtagtactgagtagcgtggtatatttaaagaaggaaaataaatgcaaattcgttgttttagatttattttttgcttaacaattttgggtttactatatactctagttataaaagtagtaccgagtaggcgtggtatatttatagaaggcaaatgagtagaagttcgtgtgattggaaaaggaagatagttttggaaacctctagaatccatatgtgatatttttctctagatttttcctcacatatgattgttaggttttttttctctagtataaatttatgatttccttcaaaataagaggtaccacgtgtaccaattgaaagctagcaaaagagccagttttagattattagataggacgtgctaatgagcgttattgggctaggtcgctaggaggacagatcttgggttttctttcttttggctcttttttttcgccacgtggccacttctagtcacctctactaagccacatattttctctaccattataaaagttgaagtttatctcactttggaacgttcgactcctacatggtgttcgcctcttcccattcctatatacgtgcatcgtcttccatcacctccgttcgttgtcgccctttgcgattctgaaaccggacggtattgtaacgttatgatggcaatgtctccgcgaagtttcccatgtcccattgcatgtccgacgtcttctccagtactcccacttccccaacaaccaccctcactcctatccaatcgatcgaacccacgagcttagtatagggagatcactaccatagtagagctgatttcatgtcgaacccggtaaacataaacacggggtaccgcatcttgacaaaggggaaggtggcgtgcacacaaccctgccgggtgggggcaatgatgaccatccctctttcctttcacattgtcttcccactcagtcatttactggtcatactttctcttcctctttaccttttttacagccagagaaagtgcatgtgcgttgcaacggaaagaaaaactaatttgaaattgtaccaccatgcataaataaataatattcggtcacaacgaattgtgacgccgacttgtgtagctggctattacatcacccatcacccgatcatagaaattgttagtttcacgcttcatgattgaaaaaaaatcctaaattagaatcacatcactttatgatagggaaaataatgacacgaaatcataacccactttggtccaagcaaggatattaggattttacttttcctccttgatttcagcccgacactaagcctggcagacactccggccggtgagagatgacacgctcctccctcgtcggcggctccatcgtcgtgtggccaggaaccatggctccgcacatccccttgcggctgtcgcgaccgagaaaatttgcattttcctgaacgctagtatattaatctccgtcctagaaaaagctagggtacaccacacaaacatgatataaaagacacatctttattatatcgataatacttacattattacaaaggcgcttcaggcctgacaataaaaaaaaataaaaaaataaacagcagcggactagcgggcctacggctccatcttcacaggcgctcaactggggtataagccagggctccacctaagacttcttctccaaagcttctcttactgaaggggggaaagatagagcaagaatgagtacaaccacagtactcagcaagccacaccggcagatgcatgattaatgcaagagggtacaaggggaaataatataggggttaagctttgtagaaaacagcatttaaaagtcacttagttgcccaaagctattttataaagacgatcctagagctacacaatattattaatcaaggccgtgaacccacacgaacctgccttaacccaaggcctacgatgattcagaccgaacttgcaacccgacctgggccccagctcgtcccaagccaatcaggccaaccattccacattttagttgttaaacaagttttaagaattaaaccactaacttaggtacattgctaggcttgcccaaatccgagggcgcggctattcgaatagattgtactctgatcagaggtgtacatctttacccacaagacacatctttactccgcattccatggccgtggaacccgtcgtaaaggatgtgacataacccctttacccatcctagccgtgacaaaagcaccgacccaacctcgcctacggccggaatcccgagacaggtaggtaagattgagcccctagcagcaggacaccggccctgtgccatgacatctcgactaccgagccgcagcccgtgtagccttcatttgccctagagatgtccatctagccccgacttcgtccatctccatctgtgtactcttgccaggactagactgagcaccgggttaagccttacccattagacatgtggttagtacggtagtgctttgcaacagaggcccgaagactggtccttatagtggccgaggtgctactagcagaacaatgcacctcgagcccagcctaaaaccattttgagagttttgaatagagggggggaggtgtgtgttcaattccatcacaagccaaccattccacagtgtccaaatgatatgagaactcccacagtctaaagttataaaaccacctagtgttgcctaattaatcagcgaagcatctatctaaattcatactagtggaaccattaatagagtacccactagttggggttttgtttatcctagggtggagaaggtaataataacaatagcaataataataaggtcataacaaaggtaaataggcatagctaaataaaacaatgataacgcgggaatttaagtaaagcggtaatgcaataatttaaattaaaataattttataaactaggattcaatatgctcaagagtgatgcgacttgcctttctcagagagaacggccttccgaaccttcggcgatcaccgcgaaccacgcttcgagaaccttcagaacgacagaagctacgcgaagtacacaagcaaagttacaagcctataaagaagcaataaaaatacataaaaaaataagcacatggttctttagattataacaaacattaagagacttgaacgggtcgattcgggattcgtatgaccaagacatggtcattcgaagtttaatgctgtcacgtggagatttacggattattgtaattaggttttgcaattataaaacatgtgtaagcgcttgcctggaaaagacaggaaggctgcgcttgttgacatgcggaccccacatgtcaacctaagggaccacggtacaccgagtacacagagacggtccacgggtcgacggaagcggaccccgtgtgtcaaccgaggcgagtggccgacaaacggactccactagacaccacgcggactacacacgtggacaccacgtggctaccgagcgggcacacaaacacggtcaccacacgcacccacgaacgactaccgacaccggtacacgggcaccggggtcgacaaccgcacaacgggcgcggggcgacaccgaaaggacgaggacgggggcagcgagaggaggcacccttaccaccacgcaacgaggcgtgggaacaacgacgacgaacgggcgcggcggagacggcttggggacgacggaggcgaacggcgagggaacgacttcggcggcgatccttggacgaaggcgagacgcggccagcacaacgcttgacgacgcggagccaaggacgaagacgacgacggggctgcagcaaccttgacgaaaggcgggcgacgaacagcacggcttgacggagggacgaacaccacgactaccgggaatgacgggaggacgacgatgggaaccggcgaggaggcgacgatgaacgccggcgggttcagctgaaggggaggcgaagccaaagacgacatcgccggctcgccgctgtgatgccggaggtggtggtggcgcggccgacggcgcacgggtggaggaagggccgaccggggaaattccgacgaggcggatggagaggccagcgcggcacggcggtgttccggcgaaattcgggcaacgtggtggcctggccggggaagaggatggcgctgttgtgccgggagaggaggcgacgacgacagccgacgcactggcgaggtggcacaggcggctggggcggtacagtgccggcaacgccaccaaacgtcgacgaggacaccgatccggcgagtttccggcgaggatacggggaggccggggaggaggatggcgtcgcagtgccggggaaggcgatggcgacatcagacgccgcacgggcgaggcggcacaggcggctggagggtggctggcaccgaggaaagagaaggaggaggcggggagaggtggtgtggccacgggggagctcgggaaggggctaaaacgatagaacggagcgagggggttccattttataggatggtggagggagccgggcatgggagaggtgggaacggcggcagaaaagttggccggcggccatggaaagcggccaagattggcgcgggcgttccgggtgattaaaagcacgaatcaagaggtaattaagggggaaagagaggggagggaaaggggattaattccccctaatcaattttggaattagtcatttgaatcgagcggatttgagggagaagaaactagggttcacgggagagagagaggagctgtgcgggaggaggacgacgacccgggtggtggggcccacgcaggcgcgccgtcagcgcgcgtgcgacgcgcgtgcgcacggctggctcggctcggcctggtttgggccgggcggctgggccgagagggaaggagggaggggaggggcagcccagaaggaggaggagaggagggagtgggccgggaggggaagggtaggcccaagagaaggagggagagaaagagagggagagaaagagagggaaaaagggaggactttggccgcgggccgggagagagtgggaggacttcggacttggcccaaaggaggaaggaggatttatttttatgttttctttttagtaaactctgataattgtttttgttgcttaataatattttcggtgctctgaaaattcaagtaaaatttgagggctctttttagaccacgggaatttaacaaaaaatctccggacaacattcgaatttttcttgtacgtattttagtgtttgccaatttcttttcgaattttaattaattctattatttcttttagagaatgatttttatttcaggatgaatttatcacgggcatgacagcggcttctgtctgctgaaaaaaatttagaaatatacattttttccgtggaatttgtaagaaagtactgaacatgagaagatttgtgaaaatataccaccgtcgcggtttggtttagcgagagcgcggcgtcgcacgcgggatgcgtgagaacgagagcggtatcgctgtttagataagcgaggacgaagtgccggccgtctcgcggcttggagtaacgagagcgtcagcactctcgcagtatgcgttagcgagtgcgatggggcccagcgttgctaccagtttcctggcgccgaaacgtgagagcggcggcggtctcgcgcctgggaagtgcgagagcgagcgggtgccgcgggtctaggaaagcagcgacgggacgcgcagtcttgcacgaaggtaatgcgagagcgccgggcggtctcgcgcggtgggaatgcgatagcgccacacggcggtctcgcggagtgggaatgcgatagtgcacagcacaggctcgccactgcgccgaacacgagcgatgtgacagcgctgtcgcttgtctgatttgcgagaccgcgctttgctttccaaattagccagacggaaacagtaatgtactgattattaagttaattacttgtatatttgcatgaattaacaacatgtgataatagcattagtttttaaggctcattagtaaatatatatgagaaaccttctgtatatgtactacaaatagaacttccattatttaaactttgttatatcaaataaaaaatcacattagctacaaattaattgtaacatacaattagtacaaattaattgtaacttaaaattactacaaattaattgtaactttaatttaattttttaccgtataaaataattatgtctatctaatttttaaacccgaactgactctaagtcatataacagaaactacctccattatcattatcctacttaataataatatactatacattattaatattttatatttattaacttcatatttttatatttattgtttgccctaaggaccatgtagctttgcttcacggaagaggctgttgtcttgttcgaaatataaaatttaccggtctcgcaattctaacaaacgagatcgccggtcccatgcacgctgtcgcattgctaatgtgcgataccgtgtcggactaagcgccaaccagaaaatcaccatgggacccactccacagttgctcttgctctatgaaagcgcggtaccgagtccactctcgcgcttcaggtgtgcgagaccgcgggtcccacgcacatctcccgctcgccagtaatgccacaccacgggccccacaacactacggctctcgcgcgttgaaaaagcgataccgattccggtctcgcgagggcaatcagtgagaccgatgggcccattcctgctctgtctcccaaatcgcaagaccggattgggtcatctctacgtggcgctctcgctcaacggaaaaacgataccgatgcggtatcgcttacccaataagtgataccggagctgacgtcacgcttttgcttattgatattgcgataccgtgtcgatttcgctcagtcccgttgcgaacctcggtatcgcgctttcctcccgcgatttcgatagtatatttgtgcaaatcgatcggcatcaggtatatttatgaaaaaaatattcatgaacagtatattttcaaaattttttctctgtctgccgtccacttcccgaggtgtgcatcggagggccggcgcactggctgacggcgaaggcatcccacctccctaagacagccaccgcagtggcgtcccgagtcgacgacaacgacgtcactgaggtcatcttaacaggaccatgatcgattggtgctgtaacttaatttgttccttcatgcaggtatactccctccgtactcataattaaagtgagtcgtttagaataatatttaagtcaaatcttgggaaaatgtaaaaattatatgaacagatttgtcttgaaaaatactttcataaaagtatacatatataactttttaataaatatttttatagaaacaagaagtcaaagttatgttttagagaccgtgttgctgtccaaaacgacttcctttactagtacggagggagtatacatctgtatgaaaacttgctctctttttgtttggatatataaattccatgttatacccagttttagctgacatgacactgtgttagggtgaacccacatgtgagcagccggtctacctactcctctctcctcttgctctctattcgccatccctcccaggcttctcactaggtgacggtgggtggtgagcaacagggagaagagtgatagctgacaggacaggagctaggtggtagcacgtcaccgagttggaccagtcgccgaactggaaggtgacggatggcaaacaagaatgggcggcaggcttttggggtggaccatctcaccctcctcccccttcccctcccacggcaccttcggttccccatctctcctaggaaacaagcggcggccaaaaagagaggagcaaagcgcccctctttgccatgactcatcatctttgccgcctttgggtggatcattagtgcaaagacaaatggtggttcgtcgacatggtgagcggtgccatccgcgcgaaccaacgctcttctatgcccaacaaccactagttcacctcctctatgtccacatgccgacaggcaacgtagccaccggtgcctcctcggcgcaaagggtagagatggctgtctgccacctaggtggaagccgacgactagggtaaggatcactgcaacgggagctcgccttcgacgcctcttcccatgggaactacgtctccattgctgcttcaagacaacggtgggcgtcacaccggcttatgccgcaccctcgccttcctctgtgctcgagcccacgcttcggcctcgttggctccccgtctagacaatctttcctgatgtctagggatgggtaattcaatggttttgacatcctttaagtaacctatacaacattcgaattctttagtagtgtattcctctattatcgatctctataggtgagcacgattccgtacatagccattcataatagacatgtagcgctcgtatcccatatttgatgtaagtataaaggaccaagttcaataatctgagagacaatctaaacaattagatgcactatcatattgaaaaataatggagcaaaatacatctcaagctggcatacggtctctttcacaaatttctacaatggccccaactccaaagtatcaaataatttctgtgaaattcaatttaaaaagtaacatatatttgtgatcaccaccttaatctaaggtggtttgattgcccttatagtattagggagaaagacctgttagcatcacatgacagtcatgaaagttgtatctggatatggtcaaatctttcatcaagactagcttcctaatgtttgatgagaaaccagtagacaatatcaccgcatgtaaccatttgcataatgcattcttctcttctgatgttgtaaatggcaggaggagctcaatctttgcatcaggtagttccttaggttgaagttctattcttatagccaatttcgttacagtctatctttcgtcttaccatgttaatctttactactataattcatgaacctgtttccgcagaattttggtacgtcatccatgttcgtcttaccatgttaatctctactactataattctgcatgggtccaaactttcctgaataagacaatattttccaaccttttcttcactattgttgtttgagcctcctcgattctactaactgagctgacttagcttgatgcattgatcactgtagcacgtaccatcctcctgatgctttccaagctcaaatccaccatcatgagaaacaaaatcaattctaggtaattctttgttttggagaattgtgatgcatgcctactatgactgtaatagaatggaaaaggcacaaatggtgagacatatatatatatatatatatatatatatatatatatatatatatatatatatatatatatatatatatatatatatatatatatatatatatatatatatatatatatatctatctcacacacacacacacacacatacacacatacacatacacacacacacacacacacacacaccccccccctctctctatctctcacccacacatacatatacacctatatatacctatatatatanaaaaatataataaaattttaatcttcccacacatatatacacccccctcatacacatacacacacacccatacatcattcctcatatacatatatatataatatatacacaactttacacatatacacatatatttattctcctcattnctctaccatatactacatatatatatatatatatatatatatatatatatatatatatatatatatatattatatttttttatattgtcacttcaaatacgccatctagttacattatggcatagaagtgttccactcccgaagatccttgaattcgtcacttgtcactagggcaccctttgggtcaaagaaatctcctttcacatgacagcactcatggtggatgaagtggcacagatcacgctggacatttgtgatgcctgtatcgtcaaagcttgttcgacgttttaatcttggcaactgcatgcattgaagataaacaatatattagtatcataaatatgtgaagctgtctagtacatagtacagggacttacatcctctgcgttaaccctgtacctcttattaaccctaaggaattcgcacgggtaatacccgcaaaggaccgttcctcgcggttgcttgtgacacttcaggacatatcatagaaaaaaatagttaaaatttgcaattagtgaaacaattggaatacattaagtgagtggagtattaccggccaataggtacgtactagtagcttctcccttgttcgggtctgttctccacccttgaacttgtagtattggtacgcactgtacggatgtcgtacgtttcacattaagaaggatatttatttataatacattcatataaaaatgcaagagtcataatcacttactactgtaagattgttagaaattctttgtatgactggtgtctgttatcgagagggtccaagactaccacagttccgtctttaaggtagatgagtaaacagatataatgatcgctacatattaacaatatcatagttagttagtaccagctaaaataagacatatgtgtagaagataaatgtaccgaacttacttaaaattataagtggctatgactactctcttatttggaaagtgcaagaaggcttgtccaatatactgtgcgacaataatcaatttctccttgtgcaagcccttcttgtattcagctatctcttttggagtcttgcccttcagctggtctgaccctggtgctagcctcacggtatgctgtggttgacagatccgagttggatccaagaagccgataggttcttttttcttcttagcatccatgtattgcatcctacagaagaagtttgttagtaacaatcacatggatttgtattgtacatatttttcatataattaattaaaactcatactcacatgcacaaaacaccgacatagttgacgtccatcttatcccgacgatatatggcgtggagatctgagaaatctagccatacgtaaccttcggcgccgaagcaatctaccggtgatcgagctgttatatttcccaaccctttcttgctgacctccatgtagaaggtatgtaaccttctcatctcccatggtccttcatttagtgcccaatccggtaagagtgctttcccatgttcgtacttttccgggcaatcatcagttgccaagtttgttggcccggctagttcagtggccttctggggggtcatcatctctgagtttggcacgttccttaccacctctgaagacggttaccatgaacttctctttgttctcatctttggacttgaagtcgtggctcctaagcactctaggcacctcagaactggtagtggccttctcagggacaatggtctcttgcacctcggcgtcttttgtaggaaaagggtcttcaaatatttctggctctgtagtttgtccctcaggtaagtataggtctcgcaaccaatctatgaagagatgcttgtgttctttcattatccactcggtggtgtgacccttattgttagctcgtagtagttcgatatgttgatcgatgtagggctcaacgatagcaaactgatgaagtacgctgaagtgagcttcttgaaatgatttgtgatcatgggcgatgaatctcttctttcctatcgttcccctgccactctatctgccctcgtgtcggggcacaggtactccaattgcatatccatctttgagctaatcgatacagcactcgacaacctcttcagtactataaccctcaaccattgatccctctggatgtgtacgatttcggacgtaacccttcaaaaccgccatgtaacgctcgtatgaccacatttgatggaggtacaatgggccaagcacaaccatttgcgggactatgtgaacaatgaggtgctccatcatatcaaaaaatgacggagggaaacacatctcaagttggcactgtgtctcatgtgcgaatgtatggagattttctaactcttcgagactaatgaccttctgtgacactgcgttgaaaaagtagcacaaccttgtgataacaacctttaaatgctccggttttatggcccttattgcaattgcaagaaacacggtgagcaagacatgacagtcgtgtgaattataaccagataccgagaaatctttcatggaaactagtcgactgttgtttgatgagaaacctatgggcactctgacatcacggagtgacttgcaaaatgacttcttctcctcagatgtcagtgtgaaacaggctggtggaagatatactttgccattcttctctccttcttgagggtgtaactcttccctgattcccatctcgactaggttcatccttgattgcagaccatctttagtcttcttcggcatgtccaacaatgtttcaactatattgtcaaacacattcttctccagatgcatgatgtctatggcatgccgaacctccagatctttccagtacgggaggtacttaaagaatatagaatgcttcttgaatgggggagggagtttatcatctggcttcgaactatcatcttgcttcttactatcctctggtttcgtagtcttctcgggtttcttgcactttgtcccctttgatagtttcttagtcacttttccaaactcgcaaacaattttctgtcattgcacacactttttcccccgatgtaggttttggtgtaggatcagtctcttcagttccatcgaactctgccttcatcttgtggtacttgtgatttgtgcgtaggaaccgccggtgccgcatgtacacaagcttgttggaacccgggagatacctatagtacgttccattcgagcagatcacacatcctgttttacctttaatttgatctaaaactgaaaacattgctggataatcgttaatggtcacgaagatgatggccttcactgtgaagtattctcttaagtactcgtcccacactttcaatccctctttccataaatcagccatatcttccaacaatggttcaagaaatacgtcaatatcaataccagactgacggggtccctgtatgaggatacagagtagtacgtattttcacttttgacaaagccaggtaggaagattatatatggtgagaagcactggccaagtaatatgtgagctgctcatgtctctaaaaggattaactccatcagtactcagggcaaatctaatgttccgtgggtctttagcaaactctctatactgagcatcaaagtttatccactgacgagcatctgtcgggtgtcgaatcatcccatccttcttgcgcccttcttcatgccagcgcattagttccgcatctcgcggatttgagtatatccgtttaatgcggtctttgacaggaaggtaccacatcacaagtgtcagacggttctaggcccgtattgctattcgatttgtaccagctagcatcgcatgttggacattcatctaaacaagcatactctttcctgtacagtatgcagtgattaacgcacgcatgaatcttttccacaccaagtgaaaggggacatatgagtttcttcgcttgatatgtgctggatggtagtgagttaggcatcgggagcattttctgcagaagttctaacagacagtcgaaactggtatcagactatcaatgtctcgcctttaacctcataagttcaagaactgaccgtagtgttgtgaactcactgtcacagcccttcgactcatcatatga

SEQ ID NO: 4780 - DNA, 17313 bp, Oryza sativa
ggacgagtccaccatgtacattagcgacacccgccccacggcgaggcagctctggaagccgcccgtcggcgtgctcgaggtcggcatcctcggcgccgccggcctccagccgatgaagaatcgcgacggccgtggcaccaccgacgcctactgcgtcgccaagtacggccagaagtgggtccgcacgcgcaccatgctcggcaccttcagcccgacctggaacgagcagtacacctgggaggtgttcgacccgtgcaccgtcatcaccatcggcgtcttcgacaacaaccacctcggcaacggcaacggcaacggcaacaacgccggcggcggcggaggaggaagcccgccggcgagggacgcccgcgtcggcaagatccgcatccgcctctcgacgctggagaccgaccgcgtgtacacgcacgcgtacccgctgatcgtgctgcagccgtcgggggtgaagaagatgggcgagctccgcctcgccgtgcggttcacctgtctgtcgctgatgaacatggtgcacctgtacacgcagccactgctgccgcggatgcactacctccacccgttcacggtgacgcagctggacgcgctccggtaccaggcgatggggatcgtggcggcgaggctggggcgcgcggagccgccgctgcggcgcgaggtggtggagtacatgctcgacgtggagtcccacatgtggagcatgcggcggagcaaggccaacttcttccgcgccgtctcgctcttctcgggggccgccgcggcggcgcggtggttcgccgacgtgtgccactggaagaacgttgcgacgacggcgctggtgcacgtcctcctcctcatcctcgtgtggtacccggagctgatcctccccacggtgttcctctacatgttcatgatcgggctgtggaactaccggcggcggccgcgccacccgccgcacatggacacgaagatgtcgtgggcggaggcggtgcaccccgacgagctggacgaggagttcgacacgttcccgacgtcgaggcagcaggacgtggtgtacatgaggtacgaccggctgaggagcgtcgccgggaggatacagacggtggtcggcgacatggcgacgcagggggagaggctgcagtcgctgctggggtggcgggacccgagggcgacgtgcctcttcgtcgtcttctgcctcgtcgccgccgtcgtgctctacgtgacgccgttcagggtggtggcgctcgtcgccggcctctacctgctccgccacccgcggttccgcagccgcctgccggcggtgcccagcaacttcttccgccgcctgccgtcgcgggcggacagcatgctctgagcaagacgacgtacggcttcaaaatgtttgaaattttcagtccaaaaagatgagatttcgttttgtttttgtttttgtttacattttgctgatgaatttggacacttgagatatgagaatttccctcccatgtaactatgtttgtctcgaggattctaataagtgcatgcctggattctaataatacgcaactctttataagaaagtttagggaatgccattctgcgtgatctgtaatctgggcctgaattggaattaggctattttagcccccaccaagatccatacatagcctaacaaaactgagtgggtgatgaagaaagaataagttcactttaggtccttcaatttgtcgctaagtctgaattcctccctgaactgcaataccagactgatatgatgtatccctcaacttccaaaaccaatacaaataatgtcctaagacgatttcgatggtggtttcagctgacaaccgctccacagaaccgccgttaaccattgatcgttgaggaggcgtattctcaagggacccatatctacagctgtgttaatgggggcgtggtttggtaatacgccaatttggccactattagtagaaaaaatgatttctttcacttcacaatcccaaataattcgcttaggagtcagtacataaagattaatttcatttcttcaatttgttttcctcttctaagtttatagctttcgtgctagcttcattgatgttacccaccaaataaaaaacttgttcgggtaggccgtctaattctccggaaaggattagttgaaatcccctaattgccgtggaacccacatatgaatgagacagtgactgtccggttaaaaataaaaaaatacggtggaactcatgtctcctccccaatatgcccatctcctccgctgagagaattcgtgatcgagccagtcatcgtcaaaacgaaggcggcgctgccatcagtgatcaagaacatggtgggtgctgtgttgactggaatggaaaaggggaacgctccgatcatgtcgaaggaggaaaccaaggaagcgtattttatataggacgcgtcaggggccatgtcgaaggaggaaatcggggagtccatggcagaaaacaaccaaagcggcccggccaccgtcatccaccggcaaggggcaaaagaaggggacacgcatcggcgagggcgccatcatagaggttgctgtacatcctcgaccatcctcttggtggccgctggtcattcgcaagacatcgtggggccgtcactggcttcaccgttgtcgtgccaactgcgctggtgtgcggtctcattgtaatttttttttatttttaactagacagtcattgccccactgactgtcgccatatggaaaggaaatatgcgaactcgcagcgtccgagacggggactcagctgcgccacccgcaagttcgcttggtatatcacaggagatttcaaaacctatcacttgccagatgatgcatagggattggtggattatgaaatttgaattctcaaaacccattcaaactttcactcgggatatactttcttcccacatcgaaacctcgaaatttcacggttcttcagtcgattttcgtcaaaaagaaaaaaacgtgaaccctaccctatgacggacctaagtaaggtctgctttatccgaatttacttgaggtggctagctactacgcctaaaagaaacactacagctaattaatccaataatattacatggccacaacaaattctcaaaagtatttttaaaataaatttcaactcgtaaccatgcaaaccagcgtagaagaaactctactcgcacatggtagaggctaactgaagaatagtgctacattgcaacaaataagcatattcaggatcttttttctctggacgaataagcatgttcaggattatggatgtaggcacggaggttacgatatgatccaataattcaaattaaacggtaccttgacaaccaataaattagcagcacgttcgacactggatatgattgaagatagcattttcactcgtacatattttctttgtttttaaatatttaacgccgttgacttttttaaatatgtttgaccatccatcattcaaaacatttaagtaattattaatttttttctatcatttgattcattgttaaatatacttatatatatacatatagttttatatatttcacaaaaaattttaaataagacaaatggtcgaacatatgctaaaaagtcaacggtgtcgaatatttaaaaacggagagagtatctcattatccttggggtttgaaccgtaggttgggttgtctaaaaggaatattctgcgtatatccagttgccggttggcttggtccaatccatctctccaattaaacatggtccgttccatccctccaaccaaacaaaaatcagatccatctcatcctaaaaatatatgaatggacctaacccatctcacatcatcctcaaaccaaacatatattagaaaagatggaaagaatcacacaagtcattgagaagcaagtgcaattacctaaaaaaaataaaatccagatgaataacacttgctgatatgatcatataccaaaaaaaactacaaaaaatatgaaaaacgtacccgtcaaaatccttcaatagtctctgtatcattaatcgtggtagataatgtgtttcttttgttccatagaagtttatgccaacgaaattcccatcaaaatcaatcagtggtcctccaataccggcctggcaaaaaaaaaaaaagcacatgaatagatgaaattttcaatgacacgcatatgaagcgatgaattaaattactcatattctgatacaattaattgtttacaccatgaaagaaatcaacccaatgtaccttagtgattttacaagtggagatcataagctctctgcagtcaagcttgctttcctcgtcagacaatatcccacttgtagccattaatttgcctgattcaaagatacgtcctatagctactacctccctatgaggttcgatttgcatctgtttgtcgagttctgctgtccgaagacaacagaaacccttgacactgaccacagcaatattgtagctcaaattgcaatgctgcaattcgcttacggcgattcgtttatttggaaggtacactttaatctgctaagaaacacaatgtgagaattaaagagtatctcaaatgcacaagcaaaaggagtgtttgtgatgccaaccttcaggttatcagcaatcttgttttcatcagcagatattctaaccaaacttgctgaagtcacaactcttgatgtggatccattgaagtctataaatacacctgtgcaagcaaaaaacctttcttctcctacaaagatcagtgattgcaattatagtcaggtgatggaatagagaaaacagacaaatatggagaagtaaagattgttgagattatgggcatataaggatttaatttattccataaataaatcatgacattacagatgaaaactagcatgaacgcatcattagatctacacatgtaaactacgcagaataacatgaacagatcaaatatgcgcaacatattgaacacgtaccgaggtgacgaaaagaccggctgcttggtcgaaacttttcgcaggtgtctacgaaggcacgaaacacgcgagcgaagaggaaggcgagccgtcgcgaacgaacagggagcagtcgcgcgaagcgcttcccaaaaaccttattgccgccttctcccggtgcaggacgtcaaaggcagaggttccggagacctgctctcccgatcgctggtgcacgccggcgagcgggatggagtagtctacgagcgacggcgcagtacagagtaggaggcaaaccctagattgattttcgcatatattgcgtgaagacggcgggtcggtttatatagagaagggtcgcttgatcagggcgcccgcacgatctctactgcgcgtaaccgaaccggataagtcgcgcgtaacttatccggactccacgccgtttgcacgcaccggatttttcggaacgtttccaaaacaaaacgaatccgaatttgcagcaaaacaaaactgcaaaaggaggctgcatctgccaagggtgaggagccaatttttcggaccattcgacgcgtacgtcgtgcacgcgcgccgcctgccctgccctgccctgccaggccaggccaggccaggccaagccaggcgagcgagcgcgcgcgtgtttcccctcttctctccaccacacatgcttcaagtggctagaagggcatcctcccttttaaggaggtccccctctcctaaaataagcaaggtggtactaaactccacatgcatgccatcccatgaggtgggcttttgtgattttccaaagaattaatcttcgagtgggctaaggcccattcattaattccaacaatcccccaccaaatctcaaaatcccactgagatttgccttttccaatgtactgtttatataccagcggttcgatagagaccaattaaggttgaacatccacctagaactccaagctacacttactcacaacttgaacaatggactacgccttgaattgcaagtcttgtgcaagcaagtttcactcaaagtcttatctggtactagaccgtctgtagactacccctcgggtggagcgtataagtcatactcctaggtctttagtaagcttcctagaagattcacccaaaatcttcatagactgcgaccaacagtcaagctcacaaaggtgagttccttcaagaatgctctgcaggacaacatctttgctaattaaagccaacagaactcattaaggcatagccaactctgccttgcagctcacaagagtatatgcatcttcacttggatagggtatatatatttgtactctcctctagtttattaatggtttgttcttcccaggatctaattcacgggatctccgatcacatagactgggttaccaccatagtataactcacatgggtctcaaacccatctccttcgatgcattgtctatcacatttcgtgatagtcccttcgtgaagggatctgccaggtttctcgctgtttggatgtaatccaacgttataactccggagtttcttaatttcctgacagacttcaatcgtcttttcacatgtctagacgatttcatattatccttagaactattcactttgacaattaccgtttgattgtcacagttcataaggatagccggcaccggtttttcaacaacaggcagatccattaatagatcacgcagccattctgcctcaacagtagcagtatccagtgccgttagttctgcttccatggttgacctcgtcaaaattgtctgtttgcaagacctccatgaaacagcaccaccacccagtgtgaaaacatatccactagtggctttgatctcatccacatcagagatccagttagaatcactataaccctccagtaccgcaggatacccagtatagtgaagtcccaattccatagtacctttcagatagcgcattactcgctcaagcgcacgccagtgatcatctcccggattagaagtaaatcggctcaacttgctcacagcaaaggagatatcaggcctagttgcactagccaggtacatcaacgagccaatgatttgggagtattccagttgattcctagcaattctcttgttcttgcgaagcaacaagctaggatcataaggtgttggagaaggcttactatcaatgtagccaaagcgattcaagatcttctccacataatgggactgcaagagagtaatcccattctcacctctaattagcttaatgtttaagataacatcagctactcccaaatctttcatatcaaaattttgagacaagaatgatttaaccacatttatcacctcaaggtttgtcccaaatatcagtatgtcgtcaacatacaagcacaaaataactccctcacccccaccatggcgatagtacacacatttatctgcctcattgactgcaaagcctgcagatgtcaatgttttgtcaaatttctcatgccattgcttaagagcttgtttcagaccatacaaagacttcaacaatttgcacactttgccttcttgaccttcaactacaaacccatcaggttgatccatatagatctcctcatccagctctccattaagaaaagctgtcttaacgtccatttgatgaacgagaagaccatgtgaggctgctagggaaagtagcacacgaattgtggtcaatctagcaacaggtgagtaagtgtcaaagaaatcttcgccttctttctgagtatagcccttagcaacaagccgagccttgtacttttcaatagtaccgtcaggcctaagcttcttcttgaacacccacttgcaccccacaggtttacacccatagggtcgctctgtcacctcccaagtcccgttagcgataatggaatccatttcactacggacagcctacttccagtagtctgcattaggagatgcatatgcttctgaaattgacttaggagtgtcatccacgaggtacacagtgaaatcatcaccaaaagacttagccgtcctttgtctcttactccttcgaggagcttcactgacatcctcctcagagacaagttcatgtgtatgttcagtttgtactggtggtgtgattgaactgggaattatttcagagggttggttcgaaccactatgtgtatccttcattggaaaaaagctctcaaagaaggtagcatcacgagactccataattgtaccaacatgcatgtccggtacctcggatttaactattaaaaatctataggcaatgctatgatgagcatatcccagaaaaacacagtccacagtcttaggtccaagtttgcgcttcttcgttattggtacattgactttcgccaagcacccccatgtgcgcaaataagaaagtgatggttttctaccaatccatatctcatatggtgttttgtccttatttctgttaggaactctgtttaacacatgatttgaggtcaacaatgcctccccccaccatgccttaggcagtcccgcggtgtccaacatggcattcaccaagtcagtcagtgtgcggttcttcctttcagcaatcccattagactcgggagaatagggaggcgtcctctcatgtatgatgccatgttcctcacagaataagtcaaactcgttcgagaaaaactctccaccacgatcagacctaagcctttttatctttctgtcaagttgattttcaacttctgccttataaattttaaaatagtctagagcctcgtctttcgttttcaacaagtacacatagcaaaatctagtagcatcatcaatcaatgtcatgaaatatcgttttccacccttcgtcaacaccccattcatttcacaaagatctgaatgtaggagttctagtggtgccaagtttctctcctcggcagccttgtgaggcttgcgaggttgcttcgattgcacacaactatggcacttagaacctttgacaatggaaaacttaggaattaaacacatgctggaaagccgagacatcaagccaaaattaatatgacataaacgtgaatgccaaacattagcctcatcatccacactgccacaaatatggttcacagacttattgcagaaatcagaaagggaaaagcggaacaggcctccgcactcataacctttaccaataaaatatccatgtttagacacgactactttattagactcaaaaaccaacttaaatccgtctctagtcagacgggagccactaacaagattcctgtcgatagaagggacatgctgcacgttcttcagctgcacgatctttcccgaagtaaacttcagatctaccgtgccaacaccatgaacagaagcatgtgacccattccccattaggacggtggaaccccgtgcgacctgataagaagaaaacaatgagatgtcagcacaaacatgtacattggccccagtatcaacccaccaattagtagattgattaactgaaaaaacagtaggtaaattaccatacccgcttccatctccagtgttgccaatggtcacattagcagacttagaagtctgccctgcaggtgccttcatccccttgcgttgtggacacttcctagccagatgaccaacttggccacacacaaagcaagtcctctcatcctgattaggattgttgttgttcttcttctgcttcttgaagttggtggtctgctgagctttgtatttccccttgctcttgttctgggccttgtgcacaacattggcactggactgcccaccatcgcccttagacgcggcatctttttcccgagctttctcctcaacatcaagagacgcaatcaacccctcaacggagtattcctgtctcttgtgtttgagtgcagtaccgaaactcctccaagatggaggaagttttgcaataatgcacccggccacaaatttgtcgggtaagacacacttaaggagttcgagttccttagccatggtttgtatctcatgagcctgttcgactacagaacggttgtcagccattttgtagtcatgaaactgctccatgatatacagatcattgctagcatcagtagcaccgaatttagtattcagtgcatcccacaactccttagcgtcggtcatatgcatatacacctcgaccagacgatcgccaagaacgctaagaatgcatcccacaaagagagtagtggcttcctcgaattgcttctgctgttcagcagtaagaactccttcaggtttgccagtactcacccagaagcatttcatagctgtcagccacagagtgaccctgatctgccatctcttaaaatgcacaccggtgaatttatccggcctcagtgcatcggcaaaaccagccatagtaaaatcacagtgcctataataaggtttttggattgttgagattatgggcatataaggatttaatttattccataaataaatcatgacattacagatgaaaactagcatgaacgcatcattagatctacacatgtaaactacgcagaataacatgaacagatcaaatatgcgcaacatattgaacacgtaccgaggtgacgaaaagaccggctgcttggtcgaaacttttcgcaggtgtctacgaaggcacgaaacacgcgagcgaagaggaaggcgagccgtcgcgaacgaacagggagcagtcgcgcgaagcgcttcccaaaaaccttattgccgccttctcccggtgcaggacgtcaaaggcagaggttccggagacctgctctcccgatcgctggtgcacgccggcgagcgggatggagtagtctacgagcgacggcgcagtacagagtaggaggcaaaccctagattgattttcgcatatattgcgtgaagacggcgggtcggtttatatagagaagggtcgcttgatcagggcgcccgcacgatctctactgcgcgtaaccgaaccggataagtcgcgcgtaacttatccggactccacgccgtttgcacgcaccggatttttcggaacgtttccaaaacaaaacgaatccgaatttgcagcaaaacaaaactgcaaaaggaggctgcatctgcgcaagggtgaggagccaatttttcggaccattcgacgcgtacgtcgtgcacgcgcgccgcctgccttgccaggccaggcgagcgagcgcgcgcgtttcccctcttctctccaccacacatgcttcaagtggctaggagggcatcctcccttttaaggaggtccccctctcctagaataagcaaggtggtactaaactccacatgcatgccatcccatgaggtgggcttttgtgattttccaaagaattaatcttcgagtgggctaaggcccattcattaattccaacaaagatcatataacattgtaatctcacctttgaacgaagcaagtgagacaacactttgggatgtatttaaagcaacctttttactcagtttgcaccatgtatcttcagcaaattcctcttcaaaagtatttttcaagcgcataccccctggttaaaaaaacataaaactacagttgagtttgctagaaaataccgtcaaaatgtgcaacaaaagtaaccagcaaaagtgaaagcaatgactcaccccaaaacctgattggcatgggataattacgagactttagatcctttttcaaaagctgcgtgaattctggtgcaacaaggtgaagagtaaataatgatcatgtgatactaatagctagcaaaactgaaagcaatgactgaccatcatctggcaagggcttaataagttcaggaaacaattcctcctcccagaaatctggtgcaacaaggtgaagcgattaatttacatgttctggtagtgatcaataagcagcattataacatgctgagagcttgcatgataatttggtaacaatcagttagaaataacctagctcgattcaccttctgaatcacttgtagaatattcaggaagcttctgagtctcactttcattctcttcatctgaagtacctaaaataaaatttaaaaaataagcaagaaaaacgaacaaaactcaaaacaagcaatgagagattaatgaccctgcattagaaatgactaataagtaataacattataatacgaggacagtttgcatgatcatttaataacagttagaacttgatacttgattggctcatcttggttcaccttctgaaaagcttgtgatggatacggtttgctcctggttccttttttttgccactcctcttgaggtacctaaagcgggaaaccaaatgaaatgaatgaacataattaaaacaacgcaatgctctatccagggcatcaacagtagattacaaaccttacatgttattatagtgattatactatctaccctgttccacaaatatggagtgcatttattttatattattattgaaaaactagcatattgcccgtttgctgcaatggattttcttttttaaagaataacttattgtaccgtatatattttaaagcccataaaaatgttgtttctattgtccaacatattatcatcatgctactttttctgttactttatagatgaaaaattccataatattcgattgtcatatttttcttctggcggggtctgtggcctgtggggtataggagacaggaaattctttgtctcactctttgtggtcccgaatggtagttggatggtggtggtggtaaattcactaccaccactaccatctttcatattagtacatagatatatagatacatggcatatttcatactgcaaaacaagataagcatcttatctactatacccctaacaaatatatccaatttatgagcaccgggaacaccacaaagttaagctttacccacaggagaggaaactacaaccaaggattaataatatacattaatgaagatcgacttctgacaataaacaatttatccagtacaaagagtgattgtgcttcaactgatgaactcaccaacaaaattgttgtgtatcatcttagatctgcatctttcaattatgcttgtgcattcatcgtcgatttcaaccctgcagcagaatgtagtatactcttatagtgcaaatacacagagctgctgatccccaaaaagaatggattgcatatagctaatcaaaaatactatcaagattaacacttccatccataagaagcatattatggaaatcagctatagggcgtgcaaaacatagtaatatattgctttatctagcagagttataataacatagtactatgtgcaaaaccaaatcgctattatgtgataggctgtcaaataaaaatgaaaaaggtccactttaatccctcgaactactattttgcgggagcacttaaccccctaaactatttctagctcaatctggcttggcaagtgtttgactgtttggaggatctgaatgaaagtacgaggcataccagagtgtgcaagatcgcaccaagcttcggtaaattttgttccttggtaggaatggagtcctctcctccgaaaaaaagttcatgccaacaaagttcccatccaaatcaatgagtggtcctccagccatatcctggaagaaaatatactgtcacactgagctaagataagcacaaaaataaaaccatattgaatgaaaaaactacatgaagagaatgaaatgtttaaggccccaaacgatatagtacagtgtatgtagtgaactagtgataaattctgctactcatatcatgagacaattattaatttccacaataccgagaagaaagaagagatatcagcagtgcaccttagtgattttacatgtggagatcataaggtgttcaggataatctgttggcccatcagtcactatcccagataacgccatcaatttgcctgagttgaaggaacgccctacagctactaccttactttgggacccaaatcgcacttcgtgatcaaaagacgcagctcgcaaaccaggtaaatatttgatcaccacaacagcaatattgtagtttaagtcaaagtgtcccatccacccgatgacacgttgcttatttggaagcagaactcgaatctgcagtgataatgcaagcaacactgcagaattattatcatatcttaaacaggtaagtaacagagtgcagagaaaattaggggtaccaacatccaaaaacggattgatcttgctgtcatcatcaaaacatctaatcacatttgctgaagttagaatacttgtagttacttcatctttgtttctgacaactatgcctgtgcctgaaaaatgcgtctgatctcctgcacaagataatatcttcaatgtttagaactgatgatcagatacatatatggaaaactaatttgtataggcactcaccattgaatgaagccactgagacaacagtttcagataagtttgaaatgacttcttgactgagtccactctaggcaccttcactataatcaattaagctaccagattcctcttcaaaagcaacacatttagagctgtgtaaatacatgtaagaaatggcggaagtgaatcaacattcaagaacggactcacctttctttctactatttgtgcaagttttcttctcttcatttgagctcgagcaattgccccttcgtttagacatctttccaaccttggatcagaaaggacaagacccaaatactgagtaaacattaccatgaaagttcgatctttaatttgtttttgtttttttttcttttggcagaagcaactagctagtcaaatcacaaactgattttctggcacattacgtatatagctaggtacacgtaaaactgagtagggccagaccagctagtaatacccagtaagctttgaacataattaaggtgtcatataaatgatcttcgcaagcaaaagaggaaaaaaatccttactgcaaatgaatctatagactaatataatgccattttaactggagctgcatgatacctgattcacaatagaagaagctaccaaaggttaactgagcaacgatgaaagcaaagttcagatcaattatttatctaagataaataacgtcggcttgtcatggtaatttacaaatttgcagtagataatttttttaaaaaaagaaaagcaagtaaacaccagtaatatccaaccagctctataaccatgaagaaccaatagacagggaatagtggagaaccatgtgtgagagatgaatcaattcacagaagaagccccaattgctcggggttcaactatatatctttcccgcccaatgacaaaaactaataggtcaagtagctagtacatgacgagcctagaacaaaaattatgaaagataagatacatactaattatctaattattgactaatatagtataagttaacatggtataatttagctagtattgaataatttactcgggggccttgggacccggtaacgtagtaagcataacgtagacacgccaccggcaaatgctactgctagcttgccttacacagatcacagacagggcaagcaagaacacaatttgtaatttttgctcaactaagaacacaatttggaaaaagaagcgcgcattataggtcaccttattgctgcctagtcacccaagttagtagccgacgcaggcgccggagtacaaggcaaagcgacggtcgccggagacgcgagcaacacgagggggctgggaggcggtgacgccggccgcgccggatgcgcgcgtctggtggccgtcgccgccggcgacggtgagggaggaaaccctaaagtagactagggaagaggagaagggggaggcggtgcgcttgcaattttcgcgcggatgggaaaccaacagacttgggctatatagtagtagttgccgcgccggggaaattgattaggcccttgtttggttgggccgggttgaggctggattgcggccggatccgcggggaccagaccagcccaacccagcccagccaggacgtatttttaaaaattaaatccatgccactgcaaatgtgctgattcagaaaaatacaactactatttgtgatatctattgcgtaccattgaccatgccatcgccatcacattttctgttataatataaattaaaatacccctacatatgagacttacatgttagctccatcttcctcctccaccctcgcctcttctcttttcaacatctcgctctacatctcccccggtggatagaggatgcggtggcaggcggcccatgggtgcgcaatgcaagtggctaaagggcaaggtagcggtgacctcatcgacgatggaattagaggttgtggaagctgcatcgtcaggacgggagccctcacgcgagctcaccaatggcatcacacatggaagctgacagatgagggagacaacatgttgcctacatgcatggtgtggtggtctgtccggtgtaccagagccatcggcggggtggttaaggcagcaacggcgcacagtcgacatagaggggtggcgtggcggcgaggttcggtggatgggggaggaagaggcaatggtgagaaaatagatctcccctctctatttcctcactcaggctgcaacgcatgaacatctcatcctctccgtcgggaggtcaccgacagcttctcacttaggcggattgcgcgcgttggtgttgttgttgctgctactcctggtggtagttggcggcggtgccagagacggttgttgctgctactggtggtgattggtgtcgatgtcggagacggagaagccaagtaggttgacggatctaacgaggcaatgaaagaaaacgtgacggcaatggcatgtttcaatcttacaaaattccagtggcacgcaacagatatcacgaataatggtggtatttttctgaatcagcatacttaaagtggcatggatctaattaaccatttttccccttctcaacctattgacctgtttattcacagtaaagggaagagaagaagagggccacgcatgtcacgcacgctcccacggcccatggccaccaaccactccatcgtatctcctctctctatatatatcttatccatttctttctctccgtcttcacccgtgcacgtgtgcaagcgaatgaggaagcgatgacgctgtcgcctccctctagcgatggtggaggccctctgacaaacccccttctctttacagcaagcttcctccgatggagaagagggacggaattgagcaaccttcttccagcgacgaaagcctctatttggcaagcctcctctttcttcctccagcaaccaagttagctctatctccaccatcatctccagcctcaccagcgccaaaaggtgtcaatgttccagagcggcctccttcccctcctattcgccttactttgccctcatcgatatcatcagcccacaacccgctgctgacctcgcggctctaatggcgtcaccgccacctcaccaaccgcccttgtccgccacacatcgtcaaattgttgcctcataggccatccctctaagcttgagtattctatagtgtc

SEQ ID NO: 4781 - DNA, 12255 bp, Oryza sativa
caaaaccaccgcggattgggtcaaggggtataatttgtccggtttgcttagttgggggtgaagaatacccggttttatggttcgggggggtggtaatttggacagccgcgatagttccaggggggattcgtactttttcctttgcgaatttgcgatgattatgaggcccgggctattgctgctgactttgtgccgatggatcgaatgtaagtaccattttttaaagataatggaagtaaatccagtctttgctcaaaagagctataaccacttattacacaaactcgctcaacagtgatcacacaccataatgtaagtacctaaccaacaacaccgtgcttatatgttatttccataattagtgattttatgacgaagttgtttggtccgtggatcttcagtttcgcttacagcttcatgatttctttaagggagttcatcttataccaccataggtgggcaatagtcttcctgccccgctggatgatagcagtttcaaccggtagcatgaaggctttgttcgcactaatgcgtgccaaaactacatagggcatcagggtctatgtatgggctttccatgggccttgccttatggcccaatgcccatggcatgtaaatatgtaacatctccattcctgtggtccaagccccttcgacatgacaatactcgatgtgataagatgggaggtatagtttttcaggaccctcatgcatgtgtactctcctatcattttcctgcagtacctgatcttatccccgttgggcaatgaggagcttgaaattgtgttcctggcgcctccctttccctatgtatggatggacggtttaagagcttgtttgtttgggtaaatggggatttcttcaatccctacataatggcatgaaaactcgactaaagaagacatcaatctgcaaagggtttgggctcctatgtgcgtcgtacatccagatcggagtctgttgaagacgtcgtctctgacattgtttcttaagagttctatatatatcatagaagagccagctactagatgcacctatggtatttatcatggaaggcaatatcacaacgtaattaactactccaccaatgcaaccatgcttttggagacacatggatgtatagatggctatatggcccgatggcccgcccaaggcccggtgattttggcccggccaggcacctctggtcgtgcctgtgctggcccggcccaacagccgtgccgtgcctaggtcactacctcaacacgctgggccggcacggtccggcctgaagttcagggatgcgaaacagacttattctcaaccatatgtaaggcacgtcacaaagaatagggaggaaaaatatatttattttagctatatatatgtcacggccgaaagaggagggaggggaaatagagttattttaaagaagacacgatgggccgtctgtgccttcgggctagcacggcacggcccgactattggtgggccgtgtctgggcttgaggtgcagcctgtgggcgggcacaccacggcccaatgtgttggtcaggccatgccggtccggtagaatctagcccgagcacggccatgcttgggccgtgccgcgcagatgaccatctatatacatggatgtatttacttaaacatttttttaggtgatcttgcaaaaaaaaaaaagccatgtctcaagtgcgagctagcttcatggactcagaattaacctcatatagaggtgagcatgtacatctccgtaaactactgtgtattagtataaagtaggactcagtagtaagcaggatcattttatcctgtttggttttacgacatcaaacaatgcaatatacagccaatggagtttgaatggtttcaatattaaagatcattttcatagctctcccagtcccaaatgtacagcctgatattccaatcgtcgtattagttaatttattgcatcaatttgaatttgttaaaaccggtatcacaaacgccaatgatgtcatgataagcatagacctccaatctgtttgcttgatcgactaggcattgctcacagtcacggaccttatcacttacacactgattaattcaatattagcaaacgagttttttctttttttgaaacgaaatttgaggcaacgcccaccgtccgtgctcacttttgacggaatttgaggaccaaaccgtgtcaagattttgctgcgttacaacttgctttcgacgagtaatggatgtccaaaaaccaacatactcactgggacttctttattggcaaatgaaaaacacttacataagctcttcagcttggtttcaattgactgggattttagttcaattttgcttttattatgaatggatcctagatactctcaccaatttacaacaagctctctgagatttcatcgatctgtaatagacctatttagtccattatatccaagaaggttactgtgatatagtcatgtttatttttactagaatcgacagatcaaaagtaatggaaaattataaactcccaagattatgattgtgatagaccaactgagtggcagccaaaacaagctctgatgactcacagccttgtcctgcatttctccttaatcaccatcaggagatggatgttttcagttccttgcgctgcttgagatttcttctaggctagttcatcataattgcacagtgggatatcctcattaacactatacattctgccaccacagtagagcaactctctcccacaggcaatggcttttctctgatctccaactatgagcatcgagcatcacagtttcgtgatcttgcacagacaaagtatgggtgggcagatcattgaaaatgcttgctgattgaaactaacttctcggtgcctccatttccaactaggatgtaaaactatgatccacaatattcctctaccatatccagcagtggtcttcaaaccattacagaagggagcgcctctgctatttatctttggttgattattctttgtacaattttcacagatcggattaaataaagtcatgaacgaaatgaacctcgaatgacgacacatgtgctgcacaactatacatggccataaggcccgaggcccgacaacccagcccaaagtgcggccatttggcccggtccaaacacgacatggcacgattggtgtcagacccaagccagctcgggccgacagttgggtaaaatagacttattttatagagaaacacgatgggcgcctgtcatgtctttgggctggcccaattcctagggccatgggtgtagcccgtggacaggcacgacacagcacgacgtgtaggttgggccatgccgggcttggtccgggtggcctatttggctatctatatgcacaacaacttacatggaataaaacacccagcaaattatttaacttgacgacaacattatttgcacattgcaggcacactataaaagttacacatttaaagagagtttctcgtgtgtgtgtgtgggggggggggggctgaaatctcgaaaattttgcgatgaaaaaaaataaatttaaatagaagtaaaatagtgaactttctatcctgccattattcagctcacagtagttcggatgaatacgaactaatggcatttgttttgacatatttggtatgatgagatacgttttgaacattcataaaagttgaaagcaggtcttctgaggtaaaaaaatgactacatttaataaattgtaattattagatttggtcgtattgtgtattatacaattatacaaggaaagtaaaatacaggtgccttgatcacaatttggtgccaactgctaacactgtcgggttacaaatgtgctccgttttttttggtttgttttggcaggaacagctctgacgagagtgttgcatcaggcccccgtcatgtcggattggacactaattagaagtattaaacgtagactaatgacaaaactcattccataacactggacttattcgcgagacgaatctattgagcctaattaatctatgattagcctatatgatgctatagtaaacatgtgctaattatagattagttagtcttaaaaaatttatctcacgaattagctctcatttatataattagttttattattagtttacatttaatacttctaattagtgtccaaacatccaatgttacaggatccaaaaaccacctgatgaagtaaaacttctccttttatgtttggcactccatttacattttatatcctctctgatgtcttaattatggcaaaagatattcctgtttagacagaagttatcctgaagcattcatccaattcttagaactatttctgttgtcattagtgacattagtgagtaatgacatctgttgtgcatagcattttccatggagcagaacagggatcatacacatcataaagataacttcataattatctcggtaacaacattgttaccgccaaataaaaaaataacaaatttatttcatgttccatgggaagataccagaaggcaccaattattttttgtgtaaataggtatcaggaggcaccataattaattaacactaaaaagtatggtactatctgatgtcttccgagactagtttttaggaaaaacctttaacttcttcatgtagaagagatcaactccataaagaagttaaaagtttttcctaaaaaaaagttagagctaatgcttcaggtttagagaccaaagaattacacaattgaatcaaatcggaacgctttctattattgtcgttaagcaaatcctgacaaaagttgaaacaatagcgacttaaaaaaaatgactatgcagcaaaggagtacatcacaatacaacacccataaagctgctaaaatatttagatttaaaccttccttataatatatacttccatttcagttggttgttctagtatgagaaattttgggaaagagtatattagatcatttcaaattcatgaatttctaataatccctgtgtactcagctagtctggtctgatcttggtcttgctgttcaagctacccactgctctgcgaccggccatccattaccaaggctgtctgctaccaccaagcatccaaaggtgaggcaagtgcaaccgtagggcttgcaaggacatatcttactgtcttgtatagttgtaaggtgggcagtatcaatccccttatggctcaagcagtctagaacagccggaagcacaaccctgtcggttgaggatcttgcatctaaatataatcaagtcctacctttacgttcctcgtcccgaggatggacccaataggttgaaactgtattcccaatgcctccttttcccttgtatatgggacagttagaatgttgttttagtgtgagtgcggaaacctgatatcgatgccttgggaatatgatgaaaaattgaactaactagacctagatagcatgctgattttgcgtatcttgctgttcaagctacccactgcttggtgaccggccatccatttccaaggctgtccgctacaaccaagcgtccaaaggtgaggccagtgcaaccgaagggctacgtgcaaagacatgtcttaattactgtcttgtataatagtaaggtgggcagtcaatccccttatggctctagcagtctagaacagccagaagcacaaccctgtcggttgaggatcttgtagctaaatgaaatcaagtcctgcctttatacctcgtcccaatgaacccaataggttgaaactgtattcccaatgcctccttttcccttgtatatgcgatagttagaatgttgttttagtgtgagtacggaaacctaatatcgatgtcttgggaatatgatgaaaaattgaactaacaagacctagatagcatgctgattttgcgtatctacactagagctagcttgttgccattctcactttgttatcctaagagagttctggtgttctacatcagagcacagggccagttgcaagcaggttctagtatacatttctatatatatggaagtcaataaaagtaggcaatgagacgacacatgcatgcaaatatggtatttatcatgaagaaaagatcgcaatgtaattaagtaactcaaccgaccatatatgcttctgaacgcatcgatgtattattgcattttgtactttgtagaaaaacaatgggttgtgtccatgtgtgagctacctacatgtatgcactcgaagctgtaaaattatttgtatattggacataggatctcggtgcctccttttccaaaccggagtttgcaattaaaattgacgatagcatttgcttcccatctattatctacaagaataaatgttatatatataccccaaatggcttcacctatctgcaagagatcaaagaggcttcttgttaatttgcatgaccatcatgatatatctgttgtttaattttgacaagaaagaaaacgagtcaagttgcatatttcaggttcttcaatttgaagtctcaaattcgacggagaaattaaaagtcatcaggttcatgaagaaattaacattcctcatcttgcatttgatcctaaacttattgaactttgccactgaacgagagcctgctagagctatacagatcgcgggaccatttgatatatttgatgagcaaccgaggacacacgtcattgccggtcggcaaatactaccgcagtgttccattcacgttgtttgtgcccaatggagtttcttcacaagagcgctgtgtagtgatgccgaggttttagcagcgtccaagaaaattctacgggacgactctagcataagatcttatacctcactctccggttcacggactgctctttttgttcaaacctcacgattaaaccgattgccttgatcattgaaattgaaggtagcttgaaactttgttccgggtgcctccatttcctatggcatgttcgacgatgagacccattatcattttgtaagcacctccatggccgcaccaaaatgtgtattcaagcatcagggtcttcttctatttatcatgggttcacacaactctcaacataatttctgcaccaattctcagcacaattttgtgcgtaagtaagattaaataaagtgttattaattagtgagtaacgacatctgttgtgcatagtattttccacggagcagaacactcaaaggggatcatacaccacttcacaattttcttggtaaaaaatattgctaccgccaaataaaaaatcacaaatttatctcatgttccatgggaagataccagaaggcatcaatatttcttttgtgtaaataggtatcaggaggtaccataataaattaacactaaaaaatatggtaccatataatgtcttttcaaaaacaataaaaaaggctaaataaatgtgaaggaacgatactaatgagttaccaactcaatccaaaagcagagctcatgccattttgcttctgagaggaaaacaaaatactaaaaactgaataaattaaaacagcgcagtgcatagcaattaatcaaaaaaaaaaaaaaacagcagtgcatagccggccattctcagctgaaagacagtttcaatgaatatgatctaaccatcgagtgccatttggttagactgtgttgtttcttgataatggttagacctaaaaccaagatagagctaaactccataaaataagttagagcttttcctatagaaaaaaggttagagctaatgctttaggtttggagtgtggaaaaatctaattggtgtattctattgttttctaatctattacattgactctcttatagggatagaaacttagagtgcaatacaagtaagagtagatttatctctaagattctatctctatgatatatcttatctctatgtttgtatttgaatcttatctctaactaacatatttgtacttctaacaaagagaccatagaattaaacaattgaatcaaatctaagctttctattattctcgtatgcaaatcctgacaatagttgtaacaatagcaagttaaatatgcttgctgctaactgtagagaaagtggaatagatgcctcaccaatgtggggaggtgaactctcatatatatatagcagaattacaatcaatgctagtgctgagttacaatcaatactagggagttacataagaccaaaggtctaggagagtaactatctaggagtgtaaaagtttaggagataaacagcctatagattaataaataatcctaatacccgcccgcagtcgtagcgggaggagcatgaacgcacagactggaccgaaaatcagtaaataactgaaccggcaaacctttggtcatgatgtccgcgaactggtgcgatgaagggacatgaagtacccggacttgtcccaaagccaccttttcacggacaaagtggatgtcgatctcgatatacttcgtccatcgatgatgcacgggattcgctgtcacgtaaacagcactgacattgtcacaatagacaatagtagccgaagcaattgggacatgaagttctagtagcaattgccgcaaccagcagcactcggcgacggcatgagcaacggcacggtactccgcctcagcactggaacgagagacagtagtctggcgcttggaggaccaagaaaccagataatctccaaggaagacacagtagccggacgtggaacgaggagaatcgggacaacccgcccaatccgcatcggagtatgccgtgagggactgaatcgggccggagccgatgtggaggccggtggagaggctgcccttcacataccggaggatacgcttgaccaaggcgagatgaggctcccgcggatcatgcatgaagaggcagacctgctgaacggcgtaagccaaatccggccgagtcaacgtgaggtactgtagggcgccagcgatgctcctgtactctgaaggatcggcaacgggcaggccgtcggtggcggagagcttggcacgagtgtccactggtgtcgatgtagagtggcactcggccatgctggcccggtgaagaagatccacagcgtactggcgctgtgagaggaagaggccggcggaggagcgcgtcacagagatgccgaggaagaagtggaggtcaccaaggtctgtcatggtcgaagcagtgaggatgatgtcatcgacgtacaacagaagataggcaatatgatctccatctttgtaaacaaagagagatgtatcggacgccgaaggcagaaatcccatctgtcgaatgtacgtggcaaaccgctggtaccacgcacggggagcctgcttaataccatacagggacttctgcaatagacagacagcatcaggggcagcggggtcaacaaacccagagggttgctgacaatagacggtctcctgtaggtgaccatgacgaaacacattcttcacatccagttgatgaattggccaagcacgggatgcagcgatgctgagaacaaaccgtatggtggccggcttgacaaccgagctaaatgtctcgtcgtagtcgatgccatgctgctgcgagtaaccacagaccacccaacgagccttgtgacgagcaagagtgccgtcagagtggaacttatgcttgaatatccacttgcccgtcacaatgttgtccccaggggggcgaggaacgagacaccaagtgccgttgtcaaccaacaccttgtactcatcagccatggcagtgcgccagttgggatcagccaacgcactgcgataattggccggaacaggagaagcagcggtggcgtgggtagccgtgtaggtcagcctgtcaaccggccgtaaggagctagtctgggagcgcgtcaccatggaatgcggctgaggagcagcagccgtgacaaccacattgggtgaagatgatggcgggaccgtcacggtgggccgacgggtgtagacatggcggaatggtgacacggtgccggctcgggtggcaccgaccgacggggcagcgccgatcgaggaggcgctgaccaagggcgtgccagctgatcgggcgtcacgtgccgcagggacggtgttgttcggcaagcgtcggccgaagaggggaacgtacggttgctcaacctccatggagggagccaccgtaaggcgtcgcggttgctcaacctctgtggagggagccaccgtgagaggtcgcggttgctcaacctccaaggagggagccaccgtgagaggtcgcggttgctcaacctctgatgagggagcgaccgctggagggagtccctgcagcaaaaaatcaaaagacgagggagcagggggagttgctgcgaagggaaatcgtgattcgtcaaacacgacgtggcgcgaaatgatgatgcggcgagtggagagatccagacatcggtatcccttgtgggaggccgggtacccaagaaaaaagcaagttgtcgagcgaggggcaagcttatgtggagtcgtggcactcaagtttgggtaacaaagacagccaaagacgcgaaggtgggagtagtctagggtggtgcgatgtaggagctgaaaaggtagtgagtggtgaacagaggaggagggtctccggttgagaaggtaggtggcggtggcgagagcctcagcccagtaggacggaggcatagaggcctgtataagaagggtgcgtatggagttgttcatggtgcggagcatccgttcggctttaccattttggggggaggtgtaagggcaagagagtcgtagctgggtgccacgactagtaagaaatgaagtggtggcggtattgacaaactctctgccattatcagcctgaagggttttgagtggtaagccaaattgggtggaaacatactcggcaaactcaacaagatgacgatgaacatcagatttgtgtcggagtggaaaggtccaacagaaatgactgaaatcatcaagcaccactaaataatatttaaaacccgaagtactcaacaccggagaggtccatacatcgcaatggacaagctcaaagggagtggaagtgcgagacaaagacctatcgaaaggtaatcgggtatgtttgcctaactgatacgcatgacataaagaggtgtctattttattacaggaaatagaggacatatttcgaagactgtggatggcggctggaccagggtgaccgagacgacggtgccaaagcgtggaagaagtggcgagggagcaggacgcggtgttggagggagtagcagctggaagggtgtagagttccccgtgactattgcagcgaagaatcacgcgctgggtctgaaggtccttaacagagaaaccaaattcatcaaactcaatggaacatttattgtcgcgggtaaactgacgaactgaaagtaaattacgaactaaggaaggggcgacaaggatgtttttgagtgcaaatttggtggttcctatgggtagaaaagaggtgccacgacaagtaacgggaatagtttgaccatttccaacagtaataaaagtgtaagagttaggcaagcgtgtaacgaggataccatcagtggaggacatatgagatgtcgtgccggtgtccaaaacttagttgtttgggctttggaaggccatctggttcagtgctgcaatgaggccagcttgctcccaattgggctggcctgtaggagcaaatgtgggcgacacaaatggcctagcatatgtggtattggcctgggagtagtcggccgtcggagccggcccaagaaggccggctgaagaggggcgccaggcctgttgctgggccggccaggggttaaaacaaacccaaggcccggccggcctccagctagggttggccacccagccggtcgaactccctccagcagagaaaccgccgccaccagaggaaacgccgctgccaccgccgccagagaaggcctggcgagtgccaccaccacccccactgccgccgccgttccctcctccatttccgccgccgcgtccaccatttcccttgcggttgcggcggttcgtgttgccgccggtgcgggcctggccagcagggaagccgccgccaccagtcccaccgcccgggaaggtctggcgtgcgccgccaccactcccactgccgccacccccaccgccagaggagatgcagccaccgggagggcaggaaccggagccgaagccgccgccggccaccagcgccgtggctgccgccaccttggcttcgttggcgatgcgcaactccttcagcaggagggtgttgcgcgctgaggtgaagcttgggaggacggctgcgccagcgatgttatctccggtgttggagaagcgctcgttcaggccttggaggaggttaagcacgagttgggattcggtgacggcgtggctgatgtcgcg

SEQ ID NO: 4782 - DNA, 18876 bp, Oryza sativa
gctaacatgtgccatgtgtgctgttctagatgggtgggacgacgaacggtattgcaacgtacaaaacgtgcaagccttgtggctcatctcatctcgcgcgcgatggctcaatatgcatatttcaacgtcgtcagtttttattctcgtgcaactggcgaaggttcgccttccaaaatttacaatgcatcatacgtcagattaaaaataatcttgtctcccgaaattcgtggctaattctcttttaacctcattcatttttccaatatgagaacttaactttgagtcttggacgtgaattaaagcagatagcacaaactgaaattaactacatcttgtcttgtacatgttgtatgagttagtctgagccggtgcaaccaccattcttctttgttgttcgctgtctatgttctttgcaagctcgtagctaattggggttttttaaggagattaataagattttaatgaactactggttggtaccgacttttaagaatttaaaaaagctgtattttcagcttctaatttctctttcattttctaaattctacaactagattgaacttgaagaagctgcaactgatagaagctcctccaaacaaaccttaagaattagcccaaacttgatcgccgttgagccaacacgtcttcagtcttacctgctatggatgcatgagacgccttcactctcgatgctggtgccacgatgtactgtttgctttgtttcgtgcctttgcttctgttgtcttggtcatcctgggagcttcctcagagcctcagagtagggggaacctgccggctccagtagatagggcagccacaatatgtgttgctggtttcatcttccattctacgggcttgggggttcgtactcgacttaccagaaaatacagcacttaccactctcctgatgcttcccaatcttgcattcaacttaagagaaaaaaatgttggtttcacatcaagggcaagtagaatgagcgctgattgggaagcatcaggagagtaaaaaatgtatagtcccaatgcatttatggtctctgtgacaaaacgatccagttctttttttctgaaaaataataagtctagcaagtgtgaaaaaggtggtaaataaattgagtgatttaaatcacatctagcttgcgtattagagcatgaaaaggaaaaaaatgtggtaaatagattaagtgacttaaatcacgtgtaaaatctattggattgttgaactaatagctagtgctggttccacaactggcactaaacttcgtacactaggagtgggggttatcattattagtgctggtttcaagtcgaatacttcctccgtcccaaaataagtgcaatcatggttttctgcgtctaactttgactgttcgtcttatttgaattttttttaaaaaaaatcaaaaacataagtcacgagtaaagtactattcatgttttatcatctcataaaaataaaaatgctaattataaaaaaatttgaaataagacggacgatcaaagttaggtgcgaaaactcatggctgtacttattttaggacggaggtagtacatataacttgttatggccaaggattcaaactggagacctctccttagctagcatcaccttaaactagctcacctacaaatcagtttactataaaaaaacgattttcctgtacagggacccatttatattgcagatgaaccatgactagtcgcgtttgggaaaataagcttattttcgcgtgcggtccatttaagaggaccgcacggaaactgagcctattttcacgggcggacctattaaaagtgccgcacgcaaaaataccgactccctctttccctcttacccactttaaattttcccctctttctctcctttcctcgctatgtctttttcttctctcctctcctctttcctcttcccagtcatcagtcaagcggcctcacccatctgcaccctcttctctcctcccgacggcagcggtgggcgtaggcgatggcggcggtggaggagcaggatccggcgggcggtggccaacccctgcacggatccggcggtggtgaccgtccctgcatggatccggcggccggccggccaccctcccccgcgggatccggctccctcccctcctcttcattctctccccagatccggcgaaggggaggggtgtcggcaacggtggcactcggcagcagcggcggcgtggcggcggtggaggcgtaggatccggcgggcggcggccaacccctgcacggatccggcagcggcggccgtccccgcacggatccggcggttggccatccccacacggatccgacgcccagctgccctctcccctgtgggatctgactcccctcccttcacctcccttccctccccagatcaggctgaggggaggggcgtcggcggcggtgcggccggagcccggaggggagcatggaggccggcgagagggcagatccagcggaggccggcacggaggccaccgctgccgccgacaagggcgggagcggtgtcctcggccgatgacgacgacgacgaggaggcagcagcgccgccgccggattctaggtttttcatttgttttgaaatttttttttccggatttttgtttttacgtacggatgatataagcatctgcacgcggaaatcgtgatttttgcatacccctgggtgcgtgcgggtcgctcacccgcacgcgaaaatctttctcgtagtagtggttctgatagcaaatagatatttttccttttgagttttgcccaacagatatttgaattgtggagtattatgtttgaaagatctcaaatgaaaaggttgtcaacaacaaaatcatcatgtcgatagctataattttcatataaaatttgtctcaatccaagtttgtttgaaaatattaagtttacattcaaaatcggtactaatatagccagggtcatcattgctaatttgtagctagaaccgacacatgcgagacactcattcattagtgctagtttatagctagaactggcactgataattaacacggactcgaattcgaaaatttttacaaccaaaaattcttattagtaccggttctataaactaataggcactaatgtgtgggatactagttgtggcttgttatacatattgacgttgattacccccccataatcagtgccaattaagcactagaactacttacgtcgtcatcggtgccggttcttccttggagaagtttcacttggataacctgaaaagtgatgctccggaataggggaaataggaaaagtttcacggcaaacgaatcttccctatcaaattttatttattacacgatcaagccactatgaatggcatccctagcaatcaaaagcgaattctgatatagcacgattaaatttgttcatttttatgatataatcgtttccacaccgttcaaattccagtgctggttactggcttgactaccaactcaagtgttctatccgttctcatcatggatcaatgaatggctcttaacactggattttcggtgcctcccttccctactatgccgtgtactatgtccaccctagtactattgatattctagtgtttgctcgtaacaaaattggatctttggtattgatgctgacgattaatttttttaagacagatagttctgaccattaggtgatctttggagcccagccctgattctcctgctgtggagcgttggaagggccttttgcactcaagctcctggatttgcatagaattttttagctagtcagacatgtctcactgggattcaccctggacagctctagtgctctactgcactcgaagaacatagctccctttctcgccgtcttgctgtaactgaccagataccttcaacatgtgttcctgatacctccatttcctagcagatcgatataatcccttaaatgtttcacgtaacatagctcgttagtcccgctcaccttaaaatacttcgagtaataattccttaatagaatatttgattattggtcgtgttgatgtactcgattttttttatattggcatggacagaaaagccctccattatagatgctgaccgctttaggctgcgttccccggcacgtaaaacgaagcatgtattattgcataattaatctgagggctctagcccaagggatacggttgcaacagaatattttaagttactctcccttttcctttcctctgtccacgtgtgctttctctcccttttcctttcctctgtccacgtgtgctttcctagtacctggtacctgatacatggtaccggtcggtatctggtacctggtacctttgataccaactaggtatcgaccgatacctgatgcccggtacccaagataccgggtggtacctaggtatcagaccttggtaccaaggtatcaagcctgatacttgtgcggtatcagagggtaccgtcaaaaagaggaggatacgtgggggagggagcgccgcaacggcggaggatggcatcgaggaggcacggcgaggtgagggacgtgtgctcccctagtacctggtaccttaggtaccggttggtacctgctacctggtacctttggtaccgactaggtatcgaccgatacctgatgcccggtacctaaggtaccgggtggtaccaaggtatcaagcctgatacttgtggggtatcagagggcactgtcaaaaagaggaggagacgtgggggatggagggctgcaacggtggaggatggcgttgaggaggcacgacgaggtgaggggcgaggcccgagccagagagcgcgagaagtctcgaggaggagccgaggtggatgttgacggccatacctgttgcaggtcgatgtgggctgccggcgtccatcccggaggcgcaaaagtggcaggctgcagcggggacgacggtgacgccgaggctgaggacgaggacgaggacgaggggagctcctgcttctgccctccccggggcgacgactccccggcacacacccgaccgacgagggtggcgagccagcgcaacgaggggaggcgagctcgagggcgaccccgccgtgggttggctgacctcgccaacgcagtgccgtcatcgtcctcctcggcagccggagatgacgacgatgaccccttcctcccggccggcttcgtctccgctcggccttcttcagagagagagagagagagggggggggagagggagagggagggctgcaattctgtgtgatttgggggaggagagtgaggtaggaggagaggattcggatgattttggggagaggagtgaggtaggaggagaggatcctgtcttcatgggataccgtggtgtaggttttctgttaattaaatattaactattttttgaaaaaagattaatatgtttttttaaaatagttttgtacagaaatttttttttaaaaaaaacactgtttagaagtttgaaaagcatgcgcacggaaaacgagaaaggtgaattgtgaaaactgggggaagaacacagcgtccatggtgtgtggggtgcggttaaagcccatcacggatgaccgtcctccatggtgtgctccatcatcggcagccggcaatttgcatagagtgccacaatctccaagtctgagaaaatggattatatttgttgcttttttttcttttgtttcatgattttgaatgaaattttggtccaattcaaaatttagtttgaaaccctttgacaaatttctccaagatttcactatctcggacctggacgttttgtttttagaacaatagtgttatctagggttaaaaattccaaaatttcggttctatcagaccacccccccgtatggtattattgcagccggttttctttttttacgaatttggcaatatttttgttcaaatttaaccaaattttgttcaaaattcaaataatttcggtatatcggcgccaccaatacaaatgccgaaaaaaaaatattgaacccggtgttatccacggtgaacagaatgatctttttaatttcagcaaataaccagcttgtgcaaccgcaattctctcttgggcagccgtcgtgggatcagacctcacacagtcacattgtcgcacacatggaacgacacctcttctgctcaaattggtgcttgggacatcccgaaacacatgaaaactctgatgcagtgtctcgtttttcgcctctcactgtcactgggttggccagcagcctgcgcgctgctacgggtcatggaaatctgatggctccgacaggtaagattggtgccatccctcgacagattcgtgagctcatcttgggcatggcactcgagaccccgccttgagtccccactctgaccaaattctgttgacaaatgggaagggagagcacatagcaatctcccaatgcttcccatgcttacattcagcacgaccaaaagagaagaaaaaaaaggaatacttggtttatgagaattgtgagatgtgaataaagtattgtaatctagaacgaatggcaggaatggtgagatgcctataggtatcatattcgcatacatatgtgtatatataactcaatgtgtttatgatatctaacccaaaatattcggtccagtaaatgaccaccttgaaagctgcaaatattcaaccacttgtactttctgcactttataactatattttgtgtattggagtgtggaaaagaaaaggcataagagacatgggcccattaactgagacactcaaactaagcgtttgtgtaagtcacaaaagagcatagggtactactctgtttacatggagaatgaattactgaagattttgtcaaacagttatgcatatcaaattgattgacaacaacagaaccaaacacatcctgagaacaaatatttccagttccatctaatccagatcttggcttcttgttgtgtcttatttcgtggaggaagggaaagaccccaaatccaagtgctgagacctctcatgtactgctatcatgtagggagtagcatacaatttacagatactgttgtgttccaagaaggaaaaatttattgtaccttcctcttcctgtcatactatatactgtactgtagttaccactaattaatcctaatatgtttagtcaatgttactctctccgtttcacaatataagtcattctaacatttcccacattcatattgatgttaatgaatctagacatatatatatatatatctagattaattaacgttaatatgaatgtgaaaaatgctagaatgacttacgttatgaaacggaggaagtataaaatttctccaaacatgcttgccaccacaccagcctgcttgctacaaactatctgtaatccttttgttttttctttttttttactaatggatattgccttgcttcaatataaagcaaatttgagggaccgcctattgatcatgtcaaacaattaattcataccttggtcgttgatgaattggccaaacaacctaagttcttccggaaagacatggctatatccagagtggtactattttccaaattaaaactggaacaggagttcatgcctattcaccatgatatatacacaagcataaactatccaccaaccatccgaggacagtatggaaagtataatccgaacatattaataggtgaaattcgaatcaaatatttaacattcctagcgtcaaatcgtgtaccagatctcatccaaacattacatcctgaatgcctcaaatgcatatagtttcctagacatagaattttagactatataagtccatgtttggcacaggtccagatctcagatccacaatagatttgaaatttgtgcgttgaattatagtggttcaaaatttcaaatttcatccaaaataagaacaaaacgatttatccaaatgttatcaccgtaaccgtagatctagattcttggatttgtggagttaggaatacattggattcagagctgtgtcagaggggtctaagaattcaggaaaagcaacctcagtggtgactgcaggtgacatgcatccaccatgcaagatggagttgaagttctctgttattcttcgagacactgaaagcacgcttagtcgaagcgaaataagccaatgcgggctagccacagcttggtgctgcgagtgtcgaaagatcggtgttgcgccctgttagcacatgaaaccttgactctcgctcagagttctcggtgcctcccttttctagctactgtgtgacttcgcgcgcgtgtactgtctacctacattagatgcatgatggtattaggtgtcctcatcttcacattctttgctgatttttcatgcaccttctactggagagatagagaaacttgttattccgaagccttagctagatgagaggaatgtggtggtttattgatcgcgcgaggaataatgagtacatctatggcatgtgctatatcgatatgaccttccgcatgtatatacatttggctcgtagtttggtcgttgtgctaatgttaaaatcagaactagaccagctgggcggtgaggtacaaattaaaacgttatattgatactgttttgatgacggcacatggcgattgatagcaacgggatgcccgatattccgttaggtaaagataactctcgatttggtggaaacttgaaacatatgatctgaaccctacaatcgtagaatcacgtttcctctggttattaactatgccgaaacttgattgacctcgccgagaaggctaatccctacgtgcgaatcgaaaaacacaagaaaaacaagatggattgcaactcaatttgcagataaatgattgagttatcaaagatagggttccacataccgaacttgtggccaaactgcaatgatagaaataagggataagtccattttgcaccctccaactcttcgcttagtctaaaatacaccctcaaacttcaaaaccaggtatttagcatccttgaactttttttttcttgacttaaggcatacctgaactttcaacacccattcattttaccccctcgagtggttttcagctggtattcacctgtgtggcgctgatgtggtggtctaatcagcaaataaaaacaaaaataagggatagacatctcttcttcttcctccatcttccatcccctttctctccttcctctttctctctctatccttcttcctcctacgctagaagagcagcagtggtggcgtccctgttaacatccctgagctcgacgaggagagcagtggcggtggaccaaggggttcattgcgaaggtgggaggtttttccttgtacgccattaagaaaaatggtgtctgcctctgtgccactaaaaaattcgagcccccctctataccatcgtcaaactttatcgtctcctccacaccattccgtcgctattctgtttcggtttaaccatttggcagctctgacatgtgggcctgggaaggaaaaatatcaatcttgccctttcactctctcttctccctcgattccctttttctccctcaggccgccaccacgcagggcctaccggcggccggccaccgcccagccctcggtctggtcgtcgtcgtcgtcgtgatcctcgtcgtcggtgcgctgttccccatcctcggcccgaccggctcctccagcttcgccatgccgcggatccggtggagttcaacgaacccatccacgttgcggtggcggctccacctcagccaccgacgcagatgcaagctggcgtcaacatgagcagcaaggaggacagtggcctcccgccgacaacctccgccttcgccctgacggcgcgcttgtcgtgctccacgtcccgccgccgcagagcatcgccgcggggctcaaccctggacccatccccttcggcggcccgagtaagcaatctctcgcactcgtcttcacggaaataggacggacacttggtcctgtggctcctggatggcttcctggatgtgccgcatggctgatcaggcgaggtcggtggcatcactagtagcaagcatcaatagtcctcgccaccgtcgttgtgctggtcctggcatcactagtagcaagcatcaacagtcatcaacaccactagcaagcatcaatagtcctcgccgtcgtcgttgtgctggtcgtcgtcgtcgtcgtcgtcgcggcgctgccgcccccccatcgcgcagcactgccgccgccgccgttgtcgcagcgccgcccccctcttcgtcgtcgtcgtcatcgcaacgttgttgccgccgtcttcgtcgcgcagcaatgccaccaccatcgtcgtcgcagcgccgccctgtcatcgtcgtcgcagcgccgccctgtcatcgtcgtcgcagcgccccgtcgctgtcacagcgccgccgtcatctcccctcccgctcctttgctgctgctgctgcatctaaggggagagaggagagtgctacgagagagcatattggaccaaagggcaactaagtcatttggctgcgccgttacccaccgttataaccaaaaacgaacggaatggtatggagtgcgcgataaagatcgacgatggtagagagggaggctcgaactatttagtttcatagaggcagacaccatctttcttaatggtatacaggaaaaaacctccgacaatggagccggagctcaagctcctccccgaccctgagttcccacgtgcgtggctctggcgatgtacacctctttggcgtggtcgacgcattaggacccctctgtcattggctggtgcccccaatgcagtggaaggacttagctcgagcggggcagtcgggtagtggcacaactcgcggacgccaacctcattctagatctggcaatggaagtggtgtgggcgacgacgagctcacggatgccaatgccaaatttgttggcgagctccatccatggagccactctccccctcccccccaaccctgaatgcccgaagctccacacccttccgttgccggtaacaccgctcaacaagctcgagttgaaggcggggacgatgcaggccgctccaagcgagctcacggtggggtcgatccacatccatcaaccctcgtcggagcttgccagcgaccccatcttctttgtaatcggcaacccctcttctccaacctcggcaaagggggcgggctccgatacgcattgagctcgccatcaacctccctcttctccacatcaatctcaccgccgacctccctcttctctcaagcacagcgagatctccatggccgcctcaagctcggtgagagagggagtcgaaagagcaagggaggtgaaaaaaacattatgataggtagggcctgctaacattgcatcctggagtataaccgaggtaaaaacaactctagggtgtacagtgaacgatattgaaagttggagggcgtaaaatatccggttttagagttttaggtgtattttagataaaatgaagagttggagggtgtaaaatggacttatccctagaaataatctaagtgaaacccgactctaaatgatgacggctatggaataaatatgattagggacgtccaaaggttagccctagggtgctacccccttgggttttgtccatgacacgattacaagtccaaagacccaaatcagactcggactggattaggtatgtgacttgttttacataattccgatagctaaggaggaattttaacgtgggaccaaaagcatatgaaagtagactcaataagctttccaacaaatacttatggtcccaaaagttcttctggattagcagctatgtccgtttaagggtaatgctgtcaggagtacataatcctaatccagtatatgcataacttaatctcttaccttctatggacaaaaaaatcacttaatctcttaccttctatggataaaaaatgacgtggtaatattggagtagacttgggcaagatcttggtttagccctaatcaacttctttgactatccatatatattccttgtgttcagtctctatcccttaaccaaacaagtctggaaatgagaacacacaaaacttacagtacaataatgcttattcaaatatactagccatattagtcgcgctttgcgcgactttttacatacccgtataaatgctctgtacatataaactgttacatacgctgatggtatggagcaaagcagttagaagcttccccatggttaagcagcctaagaacatattagtctcaattttttttgtactgttcgatgcacgagatgtcatgctttttaaatatttggtttgcagatctcattggatagtgaaataacagggtgattacaacgggtaaagtctctgtgtatctccggtttttatccaatctggtattgttttgtgctgacgaaattcctgtccggttcttcagagtgctgaactgcagtaaaatgtctctattgtgacttgtattgatgtctactactcttctatacaaaaatagcaataccaacattgtaaaagaagtaccttctctattttgtcatcgtgaatagatatcatgtaggcaattgtcaggaaaaataattgagctgcacctatttaatgcccaatgatctgaatgatcaattttgagttagtgagaaaattttcgatgattcaatgaaatattattgttagaaatatcaagaaaggatggcatataatctgccctcgttgtctctgtcacatccgtgctaattcaatgttgagtagtgcagtaagcacgtccacggaggttcagaaaaggttgattaccttattatgtagtttgaaaattgctttattgctctgctgcaaccatcctgcaatttgtatgcccaacaattacattggaaacactgacttttaacaatacatggtgagatggaacctctgcagcttatagcgcctgaaataaaaaggtgaagtatttagtacttctatcacaaacaacttgaatgagggattcataacctgcatgatagctctggatttccactaagatgcatgtctccattcacaacatgagttagaaaagaaaattggacaattcgactcactgtgatacacaccatgtctttgattttcttaaaagaatatcactttgcctatatccaccaaactccaggaacacttcacatggcttctctgcaaaaacatgcaatctgaggtggatatataagaagtgtaatcagctattaccttggcccaggaccaggtatatacgtacaactgctaccagtgtgttcatgctgtagattgccctgaaaaggattatgcatgagagagaaattatgtaaacaaaattaggtggttaacaccatgattttataagtaataaaccaattgcagaaacactaaaagacaataggagaagatgcttagtagattcgaactaaaagaccatttatgctctggaagggaaggggcataggaaataaagaataatggcatatcaagcaaagtagcaaactatcctgttaagtataaataatgtcatactctcaatatagaggcttcaactatccatgatccgccaaaaaaaaaacaaaccttctcctaatgcattgtatccattggttaattctggatatggcttcagctttgttcaaaagatctacaaatgacagccattactggctacaatgaatttgctgcttcctaatgaaattattgatacaaaaaattacatacatcaaatatattgcaatcattttgacccatgctcaagctttgcagagaaactcacgaattacataagtaggggttaacattgtgacactaactcactctgatgcaagaataatcctattaaaaattcggatgactatatgaaatcaaaattaaacaacacattttcctattttttatagaatttcccttctattgtctacacaaaggttcggacaccttcatccgaaacagacactaatcaggacaaactcatggtgatattcagaagtagcaagttgcaattgttgatgcttcagctgaacataagcatccatattacaaatccaaatactactacctggtagttcctcaactgtactcaaattacttaatggtaatctacaatcgtctctggccactatcggatctgaagcattgttcgccacaccggcgttttgggtcttcttgagccggctccatcactacctccctctggtgttgccagctccaagccactaggagacatacccatggaggaggagctggagagcggccaggagggaatgaatcgacgcagtggcattttggatggaaaggacaggaggtgtggccgccgccggaataggggatcgatggaggatactgtgcagcagtacagatgaagagggggccagcggtggtgatggggtcttggagaggagtcgatgaggcagcggcagcggcgggtggctccaaggtcgacaacgacgatgagtgcgagacggcgccgcgagtgcgagaagacagagcgtcagggtgggtgcctcacggtgtgggaggaggaagggtgaaaatgaaaaacaaaagagttataaggatgtgtaaggactagaaatagataggagtttcctcaagggcctagaatatactatgccaattataggatccaacgaccaccaacgtctagagtaagaatcgaacggcccttattactttgatgacgtggcgcaatatggtgacaaaaaactttacttttttcactactttagataacacgtaagtctcacgtagaacatatacatttttatttttgatatgtaagctagccatgttctcatcagcgattttattttgtttaactataaatgaggtatgatgggtctgaacgtgttggtcacccacaaccttgtccctcgccctacacatacatgtgtttttatttacctagatgtgtttttatgtttgtctagatttgaatttcttaaatatttttatggatcgaccgaaccacatttctttactataaattggaacatgtttttggcacaaggggaaaactaaatacttggatgttgatctatcggttaaaaaaatgtaactgaactgcagaagaacttgccactcgtgctgtgagttgttcctcttgctaatgtagaaatgatcgctaatgttcctgtggtattctataaaatatatttttcgtcctgctcatggaggacagagatcacaaaacattttaaggagaatcaattgttatcctaatatgatgattacacagtcttgagtagattgtgttatgtttctgagaactttcaatattagtatatatacatggcaaattggcaagacaaaaaagtttctccaagcacagtccttgtggttagaaaatttctcatagcatctgttttgccgctacgtactcatctgctgttacaaccattcagttcttggctgatgtagcattgaacttatttcttccaatttggttgacagaaagacacatgttggacaacggtgtattcatagctacattgccgtgccattgtaacgtgtactctgaacataactagtgcacggcaatgtagtcctggaacaatcaaatctctcgttgggccaactaaggctgacatatgactaatcaaaattaacaaatgcagtatgaatgaccgcaaatttcccatgattgtaattgttcgagttgcatgatgcagttttgtcggctaatccggttaactgatatcatattaaataaaaatgacgctccttaattagtgatctactatcctgtccctactggcaagacttaattaattatcacgcaccatgaatcatgtagttttagcttctgttgtgttttggaacctctatgtatatagaggcatcgcctgaacacgaaagggcatgtagcttagtggttgtagtgtcctgagtagtattctaaggttttaagtttaaatcttcatagtagcaaatttcagatggggctaagttcccaattttgaatgactgcatatatatatatatatatatatatatatatatatatatatatatatatatatatatatatatgtagaggccgtgtaggcatatattctctaaaaaaaataaaaataaaaaggtaaaaaaccctctaaaaattaaaaaaaggcatcggtcctgagtttaaatggctgcatatattcggttcgatgtagagaccaggtaaaaaatacccttctctaaaaataataaaaaaaaggcaaaatggctttctctaaaaataataaaaaaagaggcatcggtcatgagttcaaatctgtatagtagttgcatttatccggttggatacggagaccggctaaaaaatattcttctctaaaaaaataaataaataaaaggcatcggtcctaaattagccttcactaaaaacaagcacgggacttgagttcaaatctccatagtaatgaatatacacagccaaattatgtaccacttacttgtggtcaggtcttggaagtcagttgttgcgctttttttttcctccattgttagggtgaaattttttgcatgtttcacatatgcacgtgctgtgtccttttcataaccagaataggtttctaataagaataaccatgggctaactgaacacaaattctcaagcttgaatatccttatttttatgtgaatccctagtgcctccatttcctattgaaatactctagaaaacgtcacttttaatttcttgttcaaaagataaatagtatttcctcatagtgtatagcgtgactggcttaggatgctctatatcgtgcgagatatcggatgcctctggtatttatcacggctctcaaattcagacataactactccatgatgatagtacatgcttttcagaggtcaaatttctagtcaaccaagagtggagtgtctaagtaaatggactgagaatgactgcaaattttttctactattgtaatgcatttgcatgaggcagaccaacccagtactgaacttatgtgtgctaacagatcttgaacggtttcgttacaaatcattttcatgaaaaatccacaaagctctcctcaaagcccagtaccaaaatgtacctataactactacctctgtcccaaattagtagtcacttctgtcccaaattagtagtcgctttgacttttttctggtaacgtttgaccattcatcttatttgaaagtttagtgtaaatataaaaacagagaagttatatttaagtatttttgacaataaagcaaatcaaaaaataataattccataattttttgaataagacgaaagatcacaagttacaagcaaaaactcaaagcgacaagtattctaggacggaggtagtacctcacattaattccattttcgtagtgcttcttcttacatactactagtacctttgttctagaatacttgtctctttaggatttaaattttgtcgtactacttgtcccatcaatcattttctactcaaaaattttcttattttaccctcaataaccatttcacttctcatacattatttaacaaggggtattatagacttttgtattaaaccttaatctatcctaaacaaactagaatgacaattattatgggacgtagggagtaattgtaaagttgtagaaaaaccatatcacaaatgtcaacaatatgtgatgtcacaacaataggtttttttttagagaagggtaaatttacatggtctctacatttaaccggatatatacagcctatatttattttaagagaaagctaatttttacctggtctctatctaactgtttatatacatcattctttaattgggaatttagcacatcaaacagggaacttagccctcaaataacccaatttgaaaatcgctcctacttaggaccttgggtgctactcaggtcactacaactattagactatatgccctttcacggagtaggtattactgatggacctaatcactgtctaattcatagcatttctggacccagtcttctctcctcctatgaatatgtttttcatgttcctcttccactcagatttctctcacaattgtcgctctaaccacccatcgcaatgccattaccatactctcaaccaaaacttgggaggccatgtctgtgggattgccaccaaacattcgagccttgtagcaagggtctaagtttttagcctataacatgtaagtgctgactttacaacggattgggcagaaatgtagtagtttttttttaaaaataaaaatatttaagagttgatgtgggttatgaaaaaaaaatccatgggccttggcccattactaccctactggccttcctagatcagctggattaattggatgaaagggtttgcgaacggaaaagtacgaattacccctcccccaccccgaactattgcggtcatccgaattacccccaaaccacaaaaccggacattcttcacccccaactatacaaaccggacgaattacccccctcgacccaatccgtggtggttttgtcctacgtggcgtacgcgtggcagtctaatcagcattctatttattaaaaaatgagggacccacctgtcatacactcatactctctctctctcaggaggggcggttgggcgccggtgtccagcgagatcgagggtgggcgggaggcagcagccgtggacgagctagccggcggcggcgggtgacgcataggaggcggcggcggcggaggatgaggaggcggccgcttggcgcagctttcccccctccctctcggcgtcgtgcgggcggagcggtggccgagtcgcggcagccgcggacgagctggccggcggtggaggtgggggcgccgtcagagcggtgcggcggagggggcctcgacgccggccgtcccgccgccctcgtccttcccgcgcgcacgccgctgagagggagggggagtgtgcgggcggagcggtggccaagtcgcggcagccgcagatgagctgccccgcggtggaggtgggggcaccgtcagagcggcacggcagagggggcctcgacgctggccgtctcgccgcccttgtcctctctgcgcgcacgctgc

SEQ ID NO: 4783 - DNA, 45482 bp, Oryza sativa
aatgcaatatacagccaatggagtttgaatggtttcaatattaaagatcattttcatagctctcccagtcccaaatgtacagcctgatattccaatcgtcgtattagttaatttattgcatcaatttgaatttgttaaaaccggtatcacaaacgccaatgatgtcatgataagcatagacctccaatctgtttgcttgatcgactaggcattgctcacagtcacggaccttatcacttacacactgattaattcaatattagcaaacgagttttttctttttttgaaacgaaatttgaggcaacgcccaccgtccgtgctcacttttgacggaatttgaggaccaaaccgtgtcaagattttgctgcgttacaacttgctttcgacgagtaatggatgtccaaaaaccaacatactcactgggactcctttattggcaaatgaaaaacacttacataagctcttcagcttggtttcaattgactgggattttagttcaattttgcttttattatgaatggatcctagatactctcaccaatttacaacaagctctctgagatttcatcgatctgtaatagacctatttagtccattatatccaagaaggttactgtgatatagtcatgtttatttttactagaatcgacagatcaaaagtaatggaaaattataaactcccaagattatgattgtgatagaccaactgagtggcagccaaaacaagctctgatgactcacagccttgtcctgcatttctccttaatcaccatcaggagatggatgttttcagttccttgcgctgcttgagatttcttctaggctagttcatcataattgcacagtgggatatcctcattaacactatacattctgccaccacagtagagcaactctctcccacaggcaatggcttttctctgatctccaactatgagcatcgagcatcacagtttcgtgatcttgcacagacaaagtatgggtgggcagatcattgaaaatgcttgctgattgaaactaacttctcggtgcctccatttccaactaggatgtaaaactatgatccacaatattcctctaccatatccagcagtggtcttcaaaccattacagaagggagcgcctctgctatttatctttggttgattattctttgtacaattttcacagatcggattaaataaagtcatgaacgaaatgaacctcgaatgacgacacatgtgctgcacaactatacatggccataaggcccgaggcccgacaacccagcccaaagtgcggccatttggcccggtccaaacacgacatggcacgattggtgtcagacccaagccagctcgggccgacagttgggtaaaatagacttattttatagagaaacacgatgggcgcctgtcatgtctttgggctggcccaattcctagggccatgggtgtagcccgtggacaggcacgacacagcacgacgtgtaggttgggccatgccgggcttggtccgggtggcctatttggctatctatatgcacaacaacttacatggaataaaacacccagcaaattatttaacttgacgacaacattatttgcacattgcaggcacactataaaagttacacatttaaagagagtttctcgtgtgtgtgtgtgggggggggggggctaaaatctcaaaaattttgcgatgaaaaaaaataaatttaaataaaagtaaaatagtgaactttctatcctgccattattcagctcacagtagttcggatgaatacgaactaatggcatttgttttgacatatttggtatgatgagatacgttttgaacattcataaaagttgaaagcaggtcttctgaggtaaaaaaatgactacatttaataaattgtaattattagatttggtcgtattgtgtattatacaattatacaaggaaagtaaaatacaggtgccttgatcacaatttggtgccaactgctaacactgtcgggttacaaatgtgctccgttttttttggtttgttttggcaggaacagctctgacgagagtgttgcatcaggcccccgtcatgtcggattggacactaattagaagtattaaacgtagactaatgacaaaactcattccataacactggacttattcgcgagacgaatctattgagcctaattaatctatgattagcctatatgatgctatagtaaacatgtgctaattatagattagttagtcttaaaaaatttatctcacgaattagctctcatttatataattagttttattattagtttacatttaatacttctaattagtgtccaaacatccaatgttacaggatccaaaaaccacctgatgaagtaaaacttctccttttatgtttggcactccatttacattttatatcctctctgatgtcttaattatggcaaaagatattcctgtttagacagaagttatcctgaagcattcatccaattcttagaactatttctgttgtcattagtgacattagtgagtaatgacatctgttgtgcatagcattttccatggagcagaacagggatcatacacatcataaagataacttcataattatctcggtaacaacattgttaccgccaaataaaaaaataacaaatttatttcatgttccatgggaagataccagaaggcaccaattattttttgtgtaaataggtatcaggaggcaccataattaattaacactaaaaagtatggtactatctgatgtcttccgagactagtttttaggaaaaacctttaacttcttcatgtagaagagatcaactccataaagaagttaaaagtttttcctaaaaaaaagttagagctaatgcttcaggtttagagaccaaagaattacacaattgaatcaaatcggaacgctttctattattgtcgttaagcaaatcctgacaaaagttgaaacaatagcgacttaaaaaaaatgactatgcagcaaaggagtacatctcaatacaacacccataaagctgctaaaatatttagatttaaaccttccttataatatatacttccatttcagttggttgttttagtatgagaaattttgaaagagtatattagatcatttcaaattcatgaatttctaataatccctgtgtactcagctagtctggtctgatcttggtcttgctgttcaagctacccactgctttgcgaccggccatccattaccaaggctgtctgctaccaccaagcatccaaaggtgaggccagtgcaaccgtagggcttgcaaggacatatcttactgtcttgtatagttgtaaggtgggcagtatcaatccccttatggctcaagcagtctagaacagccggaagcacaaccctgtcggttgaggatcttgtagctaaatataatcaagtcctacctttatacctcgtcccaatgaacccaataggttgaaactgtattcccaatgcctccttttcccttgtatatgcgatagttagaatgttgttttagtgtgagtacggaaacctaatatcgatgtcttgggaatatgatgaaaaattgaactaacaagacctagatagcatgctgattttgcgtatctacactagagctagcttgttgccattctcactttgttatcctaagagagttctggtgttctacatcagagcacagggccagttgcaagcaggttctagtatacatttctatatatatggaagtcaataaaagtaggcaatgagacgacacatgcatgcaaatatggtatttatcatgaagaaaagatcgcaatgtaattaagtaactcaaccgaccatatatgcttctgaacgcatcgatgtattattgcattttgtactttgtagaaaaacaatgggttgtgtccatgtgtgagctacctacatgtatgcactcgaagctgtaaaattatttgtatattggacataggatctcggtgcctccttttccaaaccggagtttgcaattaaaattgacgatagcatttgcttcccatctattatctacaagaataaatgttatatatataccccaaatggcttcacctatctgcaagagatcaaagaggcttcttgttaatttgcatgaccatcatgatatatctgttgtttaattttgacaagaaagaaaacgagtcaagttgcatatttcaggttcttcaatttgaagtctcaaattcgacggagaaattaaaagtcatcaggttcatgaagaaattaacattcctcatcttgcatttgatcctaaacttattgaactttgccactgaacgagagcctgctagagctatacagatcgcgggaccatttgatatatttgatgagcaaccgaggacacacgtcattgccggtcggcaaatactaccgcagtgttccattcacgttgtttgtgcccaatggagtttcttcacaagagcgctgtgtagtgatgccgaggttttagcagcgtccaagaaaattttacgggacgactctagcataagatcttatacctcactctccggttcacggactgctctttttgttcaaacctcacgattaaaccgattgccttgatcattgaaattgaaggtagcttgaaactttgttccgggtgcctccatttcctatggcatgttcgacgatgagacccattatcattttgtaagcacctccatggccgcaccaaaatgtgtattcaagcatcagggtcttcttctatttatcatgggttcacacaactctcaacataatttctgcaccaattctcagcacaattttgtgcgtaagtaagattaaataaagtgttattaattagtgagtaacgacatctgttgtgcatagtattttccacggagcagaacactcaaaggggatcatacaccacttcacaattttcttggtaaaaaatattgctaccgccaaataaaaaatcacaaatttatctcatgttccatgggaagataccagaaggcatcaatatttcttttgtgtaaataggtatcaggaggtaccataataaattaacactaaaaaatatggtaccatataatgtcttttcaaaaacaataaaaaaggctaaataaatgtgaaggaacgatactaatgagttaccaactcaatccaaaagcagagctcatgccattttgcttctgagaggaaaacaaaatactaaaaactgaataaattaaaacagcgcagtgcatagcaattaatcaaaaaaaaaaaaaaacagcagtgcatagccggccattctcagctgaaagacagtttcaatgaatatgatctaaccatcgagtgccatttggttagactgtgttgtttcttgataatggttagacctaaaaccaagatagagctaaactccataaaataagttagagcttttcctatagaaaaaaggttagagctaatgctttaggtttggagtgtggaaaaatctaattggtgtattctattgttttctaatctattacattgactctcttatagggatagaaacttagagtgcaatacaagtaagagtagatttatctctaagattctatctctatgatatatcttatctctatgtttgtatttgaatcttatctctaactaacatatttgtacttctaacaaagagaccatagaattaaacaattgaatcaaatctaagctttctattattctcgtatgcaaatcctgacaatagttgtaacaatagcaagttaaatatgcttgctgctaactgtagagaaagtggaatagatgcctcaccaatgtggggaggtgaactctcatatatatatagcagaattacaatcaatgctagtgctgagttacaatcaatactagggagttacataagaccaaaggtctaggagagtaactatctaggagtgtaaaagtttaggagataaacagcctatagattaataaataatcctaatacccgcccgcagtcgtagcgggaggagcatgaacgcacagactggaccgaaaatcagtaaataactgaaccggcaaacctttggtcatgatgtccgcgaactggtgcgatgaagggacatgaagtacccggacttgtcccaaagccaccttttcacggacaaagtggatgtcgatctcgatatacttcgtccatcgatgatgcacgggattcgctgtcacgtaaacagcactgacattgtcacaatagacaatagtagccgaagcaattgggacatgaagttctagtagcaattgccgcaaccagcagcactcggcgacggcatgagcaacggcacggtactccgcctcagcactggaacgagagacagtagtctggcgcttggaggaccaagaaaccagataatctccaaggaagacacagtagccggacgtggaacgaggagaatcgggacaacccgcccaatccgcatcggagtatgccgtgagggactgaatcgggccggagccgatgtggaggccggtggagaggctgcccttcacataccggaggatacgcttgaccaaggcgagatgaggctcccgcggatcatgcatgaagaggcagacctgctgaacggcgtaagccaaatccggccgagtcaacgtgaggtactgtagggcgccagcgatgctcctgtactctgaaggatcggcaacgggcaggccgtcggtggcggagagcttggcacgagtgtccactggtgtcgatgtagagtggcactcggccatgctggcccggtgaagaagatccacagcgtactggcgctgtgagaggaagaggccggcggaggagcgcgtcacagagatgccgaggaagaagtggaggtcaccaaggtctgtcatggtcgaagcagtgaggatgatgtcatcgacgtacaacagaagataggcaatatgatctccatctttgtaaacaaagagagatgtatcggacgccgaaggcagaaatcccatctgtcgaatgtacgtggcaaaccgctggtaccacgcacggggagcctgcttaataccatacagggacttctgcaatagacagacagcatcaggggcagcggggtcaacaaacccagagggttgctgacaatagacggtctcctgtaggtgaccatgacgaaacacattcttcacatccagttgatgaattggccaagcacgggatgcagcgatgctgagaacaaaccgtatggtggccggcttgacaaccgagctaaatgtctcgtcgtagtcgatgccatgctgctgcgagtaaccacagaccacccaacgagccttgtgacgagcaagagtgccgtcagagtggaacttatgcttgaatatccacttgcccgtcacaatgttgtccccaggggggcgaggaacgagacaccaagtgccgttgtcaaccaacaccttgtactcatcagccatggcagtgcgccagttgggatcagccaacgcactgcgataattggccggaacaggagaagcagcggtggcgtgggtagccgtgtaggtcagcctgtcaaccggccgtaaggagctagtctgggagcgcgtcaccatggaatgcggctgaggagcagcagccgtgacaaccacattgggtgaagatgatggcgggaccgtcacggtgggccgacgggtgtagacatggcggaatggtgacacggtgccggctcgggtggcaccgaccgacggggcagcgccgatcgaggaggcgctgaccaagggcgtgccagctgatcgggcgtcacgtgccgcagggacggtgttgttcggcaagcgtcggccgaagaggggaacgtacggttgctcaacctccatggagggagccaccgtaaggcgtcgcggttgctcaacctctgtggagggagccaccgtgagaggtcgcggttgctcaacctccaaggagggagccaccgtgagaggtcgcggttgctcaacctctgatgagggagcgaccgctggagggagtccctgcagcaaaaaatcaaaagacgagggagcagggggagttgctgcgaagggaaatcgtgattcgtcaaacacgacgtggcgcgaaatgatgatgcggcgagtggagagatccagacatcggtatcccttgtgggaggccgggtacccaagaaaaaagcaagttgtcgagcgaggggcaagcttatgtggagtcgtggcactcaagtttgggtaacaaagacagccaaagacgcgaaggtgggagtagtctagggtggtgcgatgtaggagctgaaaaggtagtgagtggtgaacagaggaggagggtctccggttgagaaggtaggtggcggtggcgagagcctcagcccagtaggacggaggcatagaggcctgtataagaagggtgcgtatggagttgttcatggtgcggagcatccgttcggctttaccattttggggggaggtgtaagggcaagagagtcgtagctgggtgccacgactagtaagaaatgaagtggtggcggtattgacaaactctctgccattatcagcctgaagggttttgagtggtaagccaaattgggtggaaacatactcggcaaactcaacaagatgacgatgaacatcagatttgtgtcggagtggaaaggtccaacagaaatgactgaaatcatcaagcaccactaaataatatttaaaacccgaagtactcaacaccggagaggtccatacatcgcaatggacaagctcaaagggagtggaagtgcgagacaaagacctatcgaaaggtaatcgggtatgtttgcctaactgatacgcatgacataaagaggtgtctattttattacaggaaatagaggacatatttcgaagactgtggatggcggctggaccagggtgaccgagacgacggtgccaaagcgtggaagaagtggcgagggagcaggacgcggtgttggagggagtagcagctggaagggtgtagagttccccgtgactattgcagcgaagaatcacgcgctgggtctgaaggtccttaacagagaaaccaaattcatcaaactcaatggaacatttattgtcgcgggtaaactgacgaactgaaagtaaattacgaactaaggaaggggcgacaaggatgtttttgagtgcaaatttggtggttcctatgggtagaaaagaggtgccacgacaagtaacgggaatagtttgaccatttccaacagtaataaaagtgtaagagttaggcaagcgtgtaacgaggataccatcagtggaggacatatgagatgtcgtgccggtgtccaaaacttagttgtttgggctttggaaggccatctggttcagtgctgcaatgaggccagcttgctcccaattgggctggcctgtaggagcaaatgtgggcgacacaaatggcctagcatatgtggtattggcctgggagtagtcggccgtcggagccggcccaagaaggccggctgaagaggggcgccaggcctgttgctgggccggccaggggttaaaacaaacccaaggcccggccggcctccagctagggttggccacccagccggtcgaactccctccagcagagaaaccgccgccaccagaggaaacgccgctgccaccgccgccagagaaggcctggcgagtgccaccaccacccccactgccgccgccgttccctcctccatttccgccgccgcgtccaccatttcccttgcggttgcggcggttcgtgttgccgccggtgcgggcctggccagcagggaagccgccgccaccagtcccaccgcccgggaaggtctggcgtgcgccgccaccactcccactgccgccacccccaccgccagaggagatgcagccaccgggagggcaggaaccggagccgaagccgccgccggccaccagcgccgtggctgccgccaccttggcttcgttggcgatgcgcaactccttcagcaggagggtgttgcgcgctaaggtgaagcttgggaggacggctgcgccagcgatgttatctccggtgttggagaagcgctcgttcaggccttggaggaggttaagcacgagttgggattcggtgacggcgtggctgatgtcgcgaagagcgtcggcagcggtcttcatcttctggcagtaatcgttgatggaggagtcgccttgaatcatggagtgaaactggtggctgaggaagatcgctcgaggctctttgttggcgtggaacatgtcctcgatggcgaccgagagctcccgcgcggtctgatcgggctccatggcgaggtcaaggacgttgtcggcgactgacccgaagatccagctgcagatgcagcagtcggcctgttcccaggccgggtcattggggcgtggaagagcggaaccgtcgatgtgagccattaacccgaacttgccgcacaaagatgtgaagaaggccctccatttgttgtaattcgggtgggtgttttctagggtgatggggacgtgggatttgatggcgaccgtggcgtaggggtggaggaattcgctggtggtactggaagaagaaaaaccactcgaggccgaggaggtggaggactgagttgattcagtcgacatggctgggatgcagctgcgatggcagcgtgctagagcagcggaaaagaaggtaagagcctaggctctgataccatgtagagaaagtggaatagatgcctcaccaatgtggggaggtgaactctcatatatatatagcagaattacaatcaatgctagtgctgagttacaatcaatactagggagttacataagaccaaaggtctagtagagtaactatctaggagtgtaaaagtttaggagataaacagcctatagattaataaataatcctaatactaacaaagtacatcataaaacacaacactcgtgaagctactaaaatatttaggctaaaccttccacaaaatacttttgcatttcagtggatttggtctagtatgcatgagaaaagagaatattataacatttctaattcgtgaatttctactgatcgccaagtcctgcatgctggatcctttcctagaccttgtagtcagctagcatagtctgatatgatctaagtttggtcgtccaatctgctcaagtagctatcattgtgaccggccatccatttctaaggctgcccgttgccaccaagcatccaagggtgaggccagtgcaactacagggataggtgtaggaacttgtcttactgtgttgtatagttgtaaggtgtgcaatatcgatccccttagctgtctcaaacagccgaaggcgcaaccatgtcggcttaggatcttgccgccgaatccattctaagtcctacttatatgtacgtcgtcgcaagagtgtatccgatgggttgaaacttgattcccaacgcctccttttcccaggatcttggttttagtgagtggggaaaaaccggatgttgatcgatatgccttgggaatatgatgaaaaattgaactagcaagacctatatatatagcatgaagattttgtgtgtacccatcgacactagagctatagcttgttaccattctcgcattgttttcgtaagagagttgtggtgttctacatcactgctgggccagcttggaagcaggttctagctagtgttctacatatatatatgggactcgataaaagtaggcaatgagatgccacatgcacatatggtacgttatttaatttatcatgaagaaaagatcacaccgtaattaaacaactcagccaaccatatctgcttctggacgtacgcatccatgcatcattgtattttatttgtatactcgtactcgatcttggaaaaaaagatgggatgtgtccatgcatgtatgcaccccgagccttggaagcttgaacgtttccgtatattagctagtgtgttagaaagttgggctcagtctgataaaaaaaaggttggactcagtagttaggaaaaacaaagtaattaagaagaactcactactacaaaaacacccataggtgtcggtcacaaaggtgccggttagctaacaaccggcacctataagtcatttcccgtcaatatagcaaaaaaacagcacctataacgatttattggtgtcggtttttgttgggaaggtcattggtgccaaaaatactcccgccaacggtccgaaaatcgcataggtggcggctgtggataaaaaaccggcacctgtatgaaaggtggcggttatttaaccaaaacgacacctaatcctaggtttttttttggatgaagggagtacttgattgtaaaggtcaaggtagactaattgtatctaggtccttagcaacaatgtattccatatactaggctgttcaaacatgagaccaagatgagtttgactaagaagatattagtgctaattttgcttcagtgtcacacatcatagatacaatagagtcactagaacggataccctcatctcaatcgggcggtaagccccatctcaatcgggcacagcgtccgtcacagactagaagtcactgatgtgaagagttatctcaatcgggcaaacagccgtcacgaatgaatatatctcaatcgggccctaagtaaagcccgtcaccgatagctttgacccagataaccagtcaaactatagcccgtcacacatgacctatctctatcgggccacaactagcgcccgtcacagatgactactaacctttatcgggcctaaactagagcccgtcacagatgacactcatctcaatcgggcctaaactatagcccatcatagatgactgatgacctcaatcgggactaaaatagagcccgtcacagatgactgctgacctcaatcgggcctaaactagagcccgtcacagatgacctcatctcaatcgggcatttagttatggcccgtcacagatgactataatccacaaaaaaaataaattttgttttttggctagcctcaggcctttgctagccatgcccgctgcaaaaatgacagaaacaaacacagatatccaatatccccagctccccagcatcacccattcatatacatatgcattcacatacacagacatcaacatatttcacacaaccacacattcacagccatctcatatttcacatccattcacatatttcacatccattcaaatatttatcatatttcacctgcaaaaccgagttaattggatcaaatatttatttagcaagtcttaacataaacatatgaaatatatacataaatataagcatcacagttacatcatcacaattacataataagtgttcatcattgcctaaacatagaagttcaacattgttcatcattttagtttaagcctaaacattcctttggggttaattatttcgcggaagatgaagctggctatctcctcgcgaacctcctcaaagctggtaggcagagacttggttattgtgccctacattgtcataattccagattagtttatcgatcatatataattactaaatcacgtgttccataatcagtgtctactttctgttgttcccattacacaaaccacgatattaatagtgctaataagaaatattactacagttaatgaaacatcatttcatgaaaatcgatcatatattcatataaaaaaacttcctataatattgtcctacaagtaattttgcagttattaagaaggtatcagaaggtatgacacatgttctagtataaaatttggtatccctcgatatctctaatactataagatatcaaatcttacactaaaaatattggtacctcctggtacatatattaaaaactgtaaaattaccattgttacatacttcgtatagctcagcaccatcctggtacctccttcatatgcccatgatgtccaaacacacacccaatctcaaaactatttacgtacaccacccgccactagggtttacgttactgctggtaaccgcgcggttaccgcggttaccggccttaccacgggggtacggtaatagaaataccgcggtaagccggtaacctccttaaattcaaataaatttaaaatataatttgaatttttgataaattttgcacggttttgtatggtttttcatggttaccgcggtaaccgtgcttaccgccggggcatggggttaccgtgctccggcggtttgggaaaccctgcccgccaccactgaggttggaaactgctatgaggtcgtggatggtagcggtgaggccagtgtagccatgggactaaaagaaggcggctgcctcctgtacagcagcattgcaaccatcaggcggccggcatccatcctctaggcgcttgagtccagccggatgcacaatcctgacagttcaggaccctcatgcatgtgtactctcctatcgttttacttcagcagaccatagcgctttcagaaacttgaaaatctgctgctggcacctccctttccctatgtatggacggacggtttaagagcttgtttgttcgggtaaatttggatttctacaatccctttagagtggcatgaaaactcaactaaagaaaacatcaatctgcggagggtttgggtgttcttttttttttctttatgggttcaccaaacaacacctatgtgcgtcgtgacatccagatctcagagcttgttgaagagctcgtctttggcattgttttcttaagagttctatatatcatagaagagccagctactagatgtctagatgcaggtttcatctatagaactggatgagccgtggtatttatcatgcatatgggacgcaatgtcacaacgtaattaactactccaccaaccatgcttttgtgtagacacatggattatttacttaaacattttctgtagtcgatcttgcaaaaaaaaaagccatgtctcatgtgcgagctagcttcagggactcagaattaaccacacagaggtgagcatgtacatctccgtaaactattgtgttattagagcaattttacggtacttgaggagataccatgaggtaccacttttttattgtacatttggtaagatttgctacagtctagcaaaaagtacctcgaggtactgctacctcatggtaacaaatcgtttccgaccattcgatctagctgggcaggatcggcattgttagattcaatgcttggaaacgatttggtaccgtgaggtaatgctacctcgagatactttttgttggatcggagcaaatctcaaatttggtatctcttggtacttacgtaccatgaagtacctgtaaaatcaaagtgtgtttgattcttattctctgatgaacaattggcatatgagtattggttttgatatttggagattattggcgaagtggttttggagatgattggatttgcaggtgatgaacaggtgctgctgaagatttggtccgatcagaccgggcaaggcttgccggtcagaccggcatgtatcgagcggtcagactgtctagcccgcggtctgaccggctgactctgtgtcggttttgttttcgggttgtttcgttggatattcatggatagttcatatttatggcttctagatggatactatgcgtatgtaaaactgttgtttgctaacaatgagtcaagttggagatagcttggtctcggaatatggtttttttgtttgattcatgtgtaggtgtcttgatgcctcaggagagtattactggtgatggatcgggagtcaacttggagataaggtgatgtccagacggtcagatatatatcatgcggaatacttaggctaaaagatcaatgcacttggttggtgaagattccatatagcataggatggagatattgtgtgcgcatggaatgcggagtcgaatttagaaggagtctaaatttggtatgattggagtttgtaaagttagtttcttgtaccggaaggtttcctaggtggattaggactttttatatgagtttggttcgtggctttaggctacctacctcatatataaatagagagggaatgtgaggcctcccgggatcgctttagagagcattgagttgagagaatagttagggtttcgaatttagtcgagatttttgtgaggagtgctgttattgcactttgtaaacacagagagaagtaataaagttgtcatctactctgagagttctttgatttgtgttttctcgagttcggtggtccaaccgactgttgatgcaaaaaaacacacattggcctgggagatctgcttaactccagtgcaagtccaaatcttgatgagatgtgggcgtgccagtcagtttgatcctgcaactgacaaaatatgcaaatagtagatcaatgagccaatcggctgacaagccgatggagtagttccagccgatgccgataccagccgatggcgatagggttttgagctatcgacaatatgtccaatctagataatgatataaaggcaatcggctgatgatgatgcaatataacaataatataattcaatagacaccaatcagctagcagtatgatataatagaataagcactgatccgaaggttaaagcatacatttactggagatccgatgtcataaaatccacaatattagataaacaataaagtctttgttgtcatcggctaaatccaacttatatgtatatgcaatccttataagccgatgcaacgtctagataacttatcggctagcaacccgataaaacattagcatgaacctatcggcttaacaagatttatattatcaacaacaatctagtaggtcgaacctaaccgatgcagcacgagattgcatatgataatataatactcgatgagccgatagatctgtctagcatgatggatataacaaatctatttacaacaacgttgtgattgtagagaaatatcggctaagacagaagatcagacctaaccgagacagttccaactaaaccgatgcttctctaaacacaatgcaattagagatagaattgagatatcaggtaggaaaatatatcaaccaaaccagagcgatccaaaagatcaaaacgatgcagccttgaacaacaccaacatagccgatagattctccagggccggcggaacataggacttaccccttcgccggagatcgaactgaaccgatgcagccccgcgaaaagtgccaaattccgccagatgataagtaaaatcctcaggaaagagggtggcgatgcaccgagattagttgtattgatcgagagatatattacatagaccccgggtgtatatatttatacccgtgggtagatactagtccttgtcggacaagaaacaaaccttcctaaagataaaacagaaacataaagtcattattagacactaaacacacttttctaaagataaaaggaaactaacaaaccattcctataaagtcattattagacactaaacacactttcctatagataaaaggaaactaacaaaccattcctaattaataaatacaattgccttcttcggactcaatccgcacgtggcaatatctcatgaagcacgctaactcaatctggcaatgattccaatctcaccttgccggaatcagctacatcggcttaccttgtccgattcagtatccgccgatgcacaccgtagccaatgcagtcccgaagctgatttatactctggttctgttatcaatttccttccaaatccgcttcggccataactcgaaatccgttgcatgatttatcaaatttggtcgttaacaccgacgagacaccggcggtcagatcgatggcatcgcggcggtcagaccggcgggtttactgcggtcaaactggcggcagcaataggcgacgatgataggtttcggcggttagaccgggagatcaacaccagtcagaccggcggaataggaacggtcagacctgtagatcaaccccgatcagaccacaattcatcgatttgagagtaacttttaattgcactaaatgttttggtttttgggcactacaaccatctggtcgaattagttcttgctgttcgatcctacagtaccaaattttacactaattttttggttccttttggcacctccttaagaacagtaaaattgctcgtgttataaagtaggactcagtagtaagcacgaccgattggtttaagacatcaaacaatggaatatactgccaatggagtttgaatggttccattatattgaagatcattttcatagctctcccagtcccaaatgtacagcctcatattccaatcgtcgattagttaatttattgcatcaatttgaatttgttaaaaccggtatcacaaacgccaatagtgtcatgatgagcatagagctccaatctgtttgcttgatcgactaggcatattgctcacggtcacggaccttatcacttacacactgatcaatccgatattgcaaacgagtttttttaaaacgaaattcgaggcaactgcacctcacttgctgtcaagattttgctgcggtactacttgctttcgacgagtaatggatgtccaaaactaacatacttaaaaaaatatctttaaaaaatgtgaacgacactaatgagataccaactcaatccaaagcagagctcctgccattctgcttcagagaggaaaagaaaatactccctccgtccctaaatatttgacgctgttgactttttcaaatatgtttgactgttcgtcttattcaaaaacttttgtaaaatatgtaaaattatatgtatacataaaagtatatttaacaatgaatcaaatgataggaaaagaattaataattactttttttaaataagacgaacggtcaaacatgtttaaaaatgtcaacggcgtcaaatatttagggacggagggagtactaaagagagaataaaaagagcagagagtaccaattattcgggaaaaaaaataatagtgcatagccagccattcttccgctgaagacagtttcaatgaatatgatttaagcatctagtgccattttgttagacatatgttgttgttaggtaatggttagacctaaaaccaggataaagatcaactacataaagaagttaaaggtttttcctaaaaaaaagttagagctaatgattcaggtttagagaccatagaattacacaattgaatcaaatcagtacgctttctattattgtcgttaagcaaatcctgacaatagttgaaacaatagcgacttaaaaaactgactatacagcaaaggagtacatcacaatacaacattcatagagctgctaaaatatttagatttaaaccttccttataatatatacttccctttcagtgggttgttctggtatgagaaatttcggcaaagagtatattagatcatttctaattcatgaatttctaatgattcctgtgtactcagctagcctggtctgatcttggtcttgatgttcaagctacccactgctttgcgaccagccatccatttccaaggttgtctgctaccaccaagcatccaaaggtgaggccagtgcaaccgaagggctacgtgcaaggacatgtcttactgtcttgtatagttgtaaggtgggcagtatcaatccacttatggctcaagctgtctagaacagccggaagcacaaccctgtcggttgaggatcttgcagctaaatcaaaccaagtcctgccttgacgttcctcattccaaggatggacccaataggttgagactgtattcccaatgcttccttttcccttgtatataggatagttagagtgttgttttagtgtgagcggggaaactgatattgatgtcttgggattatgatgaaaaattgaactaacaagacctagatagcatgctgattttgtgtatctacactagagctagcttgttgccgttctcactttgttatcctaagagagttctgttctacatcagagcatagggccagctgcaagcaggttctagtgtacatttctacatatatggaggtcaataaaagtaggcaatgagacgacacatgcatgcacgtatggtatttatcatgaagaaaagattaaacagctcaaccgaccatatatgcttctgaacgcattgatgtattattgcattttgtactttgtagaaaaacaatgggttgtgtccatgtgtgatctacctacatgtatgcactcgaagctgtaaaattgtttgtatattggacataggatcccggtacctccttttccaaaccggactttgcaattaaaattgacgatagcatttgcttcccatctattatctaccagaagtaatgatatatatacccaaatggcttcacctatctgcaagagatcaaagaggctttttgtttgcacgaccatcatgatatatctattgttcaattttgacaagaaagaaaattagtcaagttgcatatttcaggttcttctatttgaagtctcaaattcgacggagaaattaaaagtcatcaggttcatgaagaaattaacatgcctcatctttcatttgatcccaaacttattgaactttgccactgaaccagagcctgctagagctatacagatcacgggaccattcgacttatttgatgagcagccgaggacacatggcattacgatcggcaaatactaccgcttcactgatcaatggccatcacctgcaaccatgaaagcttgggattgccgtcatggcagtgttccattcacgtcgtttgtgcccaatagagtttcttcacaagagcgctgtgtagcgatgcggaggttttagcaacgtcaatccatgaccgcagcaaactgtgtattcaagcatcacaggaagaggggcttcttctatttatcatgggttcacacaactctcaaaagaatttctgcaccaattctcagcacaattttgtgcataagtaagattaaataaagtgttattaattagtgagtaacgacatctgttatgcatagtattttctatgtagcagaaccctcaaacagctggaggcacaaccatgtcggttgaggatcttgccgacgaatccattcgagtcctgcttatatgtacgtcgttgcaagagtgtatcagatgggttgaaacttgattcccaacgcctccttttcccaggatcttggttttagtgagtgggaaaaaactggatatcgatcgatctttcttgggaatatgatgaaaaattgaactagcaagacctagatatataacatgatgattttgtgtgattcgatcaacactagagctatagcttgttgccattctcgcattgttttcctaattaaaagagttgtggtgttctacgtcacagctggccagcttggaagcaggttctagtgttctacatgtatggaactcgacaaaagtaggcaatgagacgccacatgcatgtacatatggtatttattaatttgtcatgaagagaagatcgcaacataattaaacaactcagccaaccatatatgcttctggacacatcaatgcatcattgtattttgtatactttgtagtagatcttggaaaaaaaaatatgggatgtgtccatgcatgttcgcactccgagccttggaagcatgtacatttccgtatattagtgtgttagaaattaaaagttgggctaagtccgataaaaaaatgttggactcagtagttagggaaaacaaagtaattaagaacaactatcgataaatcttgttctgtcgatcgaacataatctaagaaagcaaataggttctgaaggtttaggttataatattccatgttaattaggggctgtttgtggatggggctaaattttttttaagtccctgtcatatcggatatttgacactaattagaagtattaaatatagactaatgataaaacacatttcataattctggactaattcatgagacaaatctatatattgagcctgattaattcatgattagcctatgtgatgctatagtaaatatatgctaattatggattaattaggcttaaaaaattgtctcgcgaattagctctgatttatgtaattagttttgtaagtagtctatgtttaatacttcaaattagtgttcaaatatccgatatgatagggactttagtctctagatccaaacacccccttagaatattattagtcatattgtaaattttgatctcgattctctctcttccacctaggaatgtgatgatgtggcatttgtttggagcctgctgactgagtttattgtacctgttctaaagaacttactagtactactactttgtttgttgtgccaaggataactttttaacctatagatgtattcattactcctccttgatttatactattttgggcataatcccctatatttattgtgggtataatcctctatattccggagggtgtatgatctagcctcgatcatgtcgattggagtcaaaatgatgctaccatacataccatacagtgtactcgatgatcagccacccttgagaatggggctctctctaccttcctacatgctagtatgaagcacgctagtcttctcttcgatgtcagcatcatgtatgccgaatgtggaactctacaagtacgaagaccctatgttctttcactaggatgtactaatacactaccaaagccatgccacccacactagcataaccttgtcaactcttgaaactagtcactctttccatagtagtagctgtctattgatttcatgggacactccaaggttatgccgatcgaaaagtggaccgagagctgtgcgatgaattcctgatacctccatttcctactagggtagttcttcacttttgttcagagttttgctacaagagcttagattttgatctacgtaataacttgcacaacaaaatgactagaaaagacatttcttttatatgtcttccaacccaactacctccaccaaccatgcatgtgcggactgagctcgtagagttaaatcatttaagaattcttttcaacaccattatatatcttttattcttcctagtaacgaaaagcaggtgaacagattctgctagctagggagcaattatttttgggggtttttacacattagagtaaattaccgtgctatggagaaacgctcaggttcttccggctagctctataaggtgatgggctagacgacttggactcgaagcatcaccccttctaattatttgatattaggtccttccctaatattcgcgtttttaattaccgtgctatctcattcagacagtcaggtagataaatacagtggcgtgtatatgaacaccatcaggtttcccctaacattgagtttttctttgcttgattatattgaattattggcatcaatgtctttgcgctcagtccacacatggttatatatatcaccgatagtggtcggaaaggctaatgggtgggtgatcgctcccccaccagcccagcgatcgccgcccaccctctccccgatactactagatgtatgtcacaccccaatccagcaccgccgtacaacgacacctgacactggcgtgtcgtaggaaaaacggcgcgaaccgcttcctacgaaaccgcgatcacagtaccagtcccaggacatagtgctggtacccacggtgacaaatatgattcattgcaaatccttaaaataaatagaggacttatttaccttaacttaggttgcagctcaggacagcctgagaatacaaccaaagacacagacgaggaaacaccagcaacagcagcagcagcggaaccaacggtctaacaccccacaccacaggcgacggctgggaaccaggacgaaaccctaatcttcactttacttcatcttcaacttccgggtggaggaactatatatatttatatagagcaagggtgagtactttcgtactcagcaagtcacaggaatttaggtgtttaatgcaagcttgaaagagaggcaaagtagttttgcaaaatcctttgtttgaaatcattttttgaaatctctaagtgatttatttctttttaagtttggatcaaaaaggagacttgcgtctcgattcgacttaagagatgcttttcaacaactcaaatggtaatgtactgacccccgggtcagatcattacttatcggctcccatagccatttcacttgattaagcggctcctagagcctttttcatttttgcggactcccagagtccagctgcccagcagcaaagcaatccgcttccactcgggaagcctagtctatgatgcccacagacatcccgaatcacacagattcgtttctgaccactcaggtcatccatctgccacttaggctgattctggttacgattcccaatccacaacaactgttcacaaagcacaggcaaacaaatctacgcaacgggaaccacctcacatccgcccatgaccgtgggcacggctgtttgaacagttagttaacctctgcagaggggtgcactttacccacaagacacgaacttactccagacactggccggtgtcagaggtttgcgacaaagcctttccaaagctaaatttgggtcacctcatgccacatagagggtctccctgaccaacatcgggccaactccggctttccttttaggactcccggatgccttcctctgtttcggactcccaggatgcctctacccccacatcccggctttccgcctctattgacatacaagattttccaaaagcagctaattacttagccagggtgtcccataccaccatgtggttgcacttgttatgcttgatgaatttcccaaaggaatcggtccttatatgcgaatacgggacagtgccaccaaggcacagcacccgcatcgcgagctttcacaattcattttattttcaaacacgccgacaccacatgtcgggttttaaaggcttctcaaacccatttcccagattatcgacaaacaacggtgtatgtggaatagttggtatacgcgctcagagagcacggataccgaagtaccacaaaggtggagcgacaaggaatcagggtagtacagcctacaggaattagtgcgactactaggtaggtccgtcggtttggcacgcaaaccgaaaccaagcatgctataaatgtgtgttgctaataatgcgagttgcaaacaaattaataatgattttccaattataggagcaattggtcaaagggtgcttgccttgctcaaggtcttcacgaagcttcacgaatcttcgagaaaacccgcgatcgacgaaaatccggtaactgcaactatacgcaaacaattaaaaacctacacaagacccaaaataaagatcctatttagactacataatagtaccattagatagatctcaattttacggaattattggaagttgaacggagtcaatcggatgagcggttgagaagatatggattttctaaggattaaggaatttctgtctaaaggaaaaaggatttaataatttattaaaccctttttggaaagaaattgaaagagggatatgatttagacttcctcgggcggcttgggtgcggcccaagaggagaggcatggctcggccgaactaatgggccggccggcccggagaggcggcccaagggggcgcggggagagtgagggagagagagggccggcgggccgagtccaccttgcggggtcccgagtggggcccgcttgtcggtggcgcggctcaccgtgggagcggcgcatgagggtggcgctagggtttcgggtgagcgcggttcacgcgcgtgcaccggatggaccagggatgcggcgggcccacgcgcagccggttggcgcaccgtgggccgcgcgcgcgaggggggggagggaggaggcagctgaccggctcggctcggtcaatgccgaggtggcgccgacgtggcgcctacgtggcagccacgcaggccggcgggtggaggaagaaggggaggccgagatggacggcggacggcggccgtgttcaccggagcaagcgcgacgggtttggtcttcgaggagcacaccggagtgacgagggcgtcgagaaggagcgagccaacggctcggattcgccggagggtgttcaacggcggtggaattcgacagcggcggccggcggcgagagaaaggggaaatcaccgaggggcgacaaggactcaattaaaggcggcgggagcatctccggggctcaagggtttcgttcctgtaatcggatagggtggggaggcgccgtggaggtccggcgacgagaggcggcctccgggagcaggcgctgacggtggcaaggccatgccgagcggcggcagagctcggggcggcgtctacgcgcgttcgaggggctaaccgagctatcatgcaagctagagagggcgagggagaacgaggaaggagaacggagggaggtactaccgagccgggcgtagtgatgggcggcggcggtgcggggcgagctctctggcctcgggccggggaaggggaaggagagggtgcccggagtcccgcgtcacgcatccacgcacgcaccggtctccctggtgcttcggcgacggacagcgagggcgactgcagggcggggtggcaacaatggcgcggtggaggttgggcaaggaaacgaggaggaaagggaggggctcaggttgggttttatgggtgcgggaagtcggttttgggggaggaaaccgacttagggcggtcaaggggaggagctggcggtcgcgcccgtggtccaggcggtggcaagcggtgacgccgatggtggtcgggcaaaaggaaaaaggagagggagaaagggagctctgctccttgctgtttcgggaaaagttgaaggagggagagggagtgagagaggggctgcctctctcggctttggaagctagcggcgtggagcggcagagcggcagcgcacgacgcaagcgatgctagggcttgacgcggcggcaaccgggcggctgcgcggcgcaggcgcggcagggctgacggcggcaacgaccggccggtcggccactcgtgagcgccggaaagagcgaaggcggtggcgggttttgggcggcgtcggcacgcgagagagaaaacgagagagagagcgagaaacagagagagcgagagagctctctctcggctcagctcggcacgtgcaacgcacgtgcgaggctgagggagcagaaacggctgagggagggaggtgggctaagggggaaaacggcccacaacacccgagggaagtaaaatagacttttgcagagaagactgatttggagtgtattcgaattggggttttggattcgaattcaaatttgacattcgaactcgatggtttagggaggaatcaagggagactcgaggagaagtcaaggaagagattcaaaacagaaacttggatatttttttagtagtcggagcgaatattcggcaaggattcaaaggaagggattgacttttggaatttgatttcggagacttgaattttggataggaattcttgaggtggaggatttttgatttcgatgagagggaacaacgggattgagttgagatccatggcacgacttagactctcactcaaagaacaaaaattttcgcaattagtattttgccgaattagtgtttaatgtctcacgaaaagcggagcgttacaatgtactcctccctcttctcccccttcctcctctccttctcctctttctactgcaatagaccacacaaaattttttgaaaaacaaaagttagaaaaatttatgtatagaaatactatatataaaaaatttgaattcaaattcaaatttgaatcgggtatgtaaacttttgacttataaattttgggtctataaactttaggtgtataaactttagatgtatagaaatactatatatagaaaatatttgaattagaaaatatttgaattcaaattcaaatttgaatcgggtatataaactttaggtctataaactttaggtgtataaactttagatgtatagaaatactatatatgaaaaatatttcaattcaaattcaaatttgaatcggatattcaaattcaagatcaaatttgaaacgggtatatataaactttaggtgtataaactttagatgtacagaaatactatatataaaaaaatatttgaattcaaattcacatttgaatcggatatataaacttttgacttataaacttttggtctctaaactttagatgtgtaaactttaggtgtataaactttaggtgtataaatttactaaaataggaaaataatacggtgacaaaaaaggaaaccaggtggagggagggaggggggaggtggggagcgaatctgatcgctaccccatccccacggcgatcgatcgcccattaggggtacccgatagtggttgctttcatcgttaaaatgaataatcaaacaattgcatcacttgtttcttatcaaaataaagatatgacgaattgttaaacatgttgacatatcttacacaccaaattccatgtgagactccaaagtcaaaacccaactactaggcctaagaaatcatcagcacaagaagtaagcacacggctgctctgctcccagctatcttcttgcttcaagaggtcagcgtaggtgggcacggttttcctggctagctttagctactggtgcaaaggaaaaaacaaactccttgcctactggcaagctccaaaacacggacttcgactgtgcaatcgttggccttgccatgttgccatccgcatattatattggctagtttacacattatgtactctcagcagctggttgagagtatagtagattgcaactttgcaccgaattcctgatgcctcccttttctattggacttgattgtccatcgtctcaagtgagacttgtaaacattggaacacttgcatccacctctacagcatgccctacaagaatctagctagagtgatggatgatgcaggctgtgttttgaaggactatgtgcactgatacttttttaaaaggacaccactaggcatcagacatgattttttacagatcataaggcctgtgtttcaccacttgtaaggaaatgcgttttagattatatattcatcactcagtgaaaatgtttctacaataatttgtttatgatgtttaatcacttagtgaaataaatattccacatgtagtaaaaaaaatgtttcgattagatgcaacatcagaaagtttgggttgcaaccccaaaactttacgcaaggtcggaaaaaaaagtgcgtgtcgtcatttggaacatctgaccaaagagggataaatactggaatacaataacatgcaacaagataaacaatagtgcaacaaacctatcgctctagtatgctgagtttgtgtatctacatagtagagctagctaagtccgcgtggtacttggacaccatggacttaatgccaagcgcagacattaatacaacatagtgaattaatttcacattagaattcatcagattatctgacttcaaataattcttggcatctcttccactagaactacactggtactctcctaaagcgatgggaataggctttgaaatgatatttttcttagataggcttgaaacgatatgtacagtaagatcgatgttgccactgctatgtgtggactgagctttgccaagtgaagtcaatacatatcaaggaaaacggcataattgcactgagctacggcttcattgcatccatggtacacaatcactatattatgttattaactgtctgaaggtcaggtgcacagtattagtgtagagagcccatctaatgttacagagtttgtgtcgaatatatatatatgtagtttagaacttggagttgtacttggtgttaggactagagtaagagtcagactctatactagactctcttaaatagaggggtggacctattgtaatcgcatggcgacttagcatagcgagaggaagcggttgctggcggtgtcctagtactgctagagctttacactaaatatagttttagtatgcacttcccgcactgcaagagcaattttacagttcttgaggagataccattaaggataaaaatttagtgtaaaatttagtagctcctagtacttaggtattaagaggtaccaaatttacaatagaaaatgtggtacctcctcaaggactataaaattgctcgcactgctgactgcagagcagtgtgacctttcacgaactcaactgtaatatgtcgatcaaaacagtgttacagtaccaattctgtggttctaagcaacaaattatgttgacggctatgctctactgctcctagacttccatgtcttcaggatgcacgtacgtaactttgccctgctggttttgtactcttacttctgctggtgtaatacgaatgggtttcagcaaaagctgtgatgaatccacatgttctgcagctgcttcaggtaattcacatgcgatactaagtcatggtgcacagtgttgtcactacgccgcgtccttcttggactctcctcccaatcgtttccctcggggctacactattcaaagcctcctaacctaagttctcagtgcctcccttccctatgcttactgggttatacagtggcatgatcagtgattgatattcgagttttcctccatattcttctccttgagtttttgcgagtttcatgaaaccaaaaatgctactctcgacatggatatatagagataagtggttattgagcattcagaacaatgaatccaataatgatttaatttacatcgtatataatcgagtgcacatacacaccaacaacctccagccactatggtttctctggatctctgtaattgatgtcatatggaatttttttttcttttgcaaaacaccatacagaagaatatatttatatgcacgtcggctatctcatacatccatgagcacctccacgagatctggattggtgtatcgtaatattgagtaaggcatcatacacatctcatcatcgatggacgcattgtctaccacttaacgaatagtatcataaatgtgagcaccatgtgacgagtcagaactcgagggtaggttccaccgtaagaaatttaatcaactgagagctactctctccattcatgtcacacaacagttttagtgtgctatcttgaaacagaaaagagcagataaagctaaagggttcatgtctaagcattcttgcacaactgtttctaaaaggacttctcttgcagattttcatcacaacagttttttacaaatgaagtgtcgcacatttttcataatttcattaatgaaaagttaaagggttcaggtctaacttaacggagaggaggataaagtgaatctagcctgctgacctagtcatctggacagccaaagcacaggaggcgattaaaaacaccatcaaacgtcaatcacgtagccatcatcattgttctttaactttcctcaatcaccactgggagatctttgacgatgatctttaaccattggaatcttcagttcatcgatcctaattgcagagttaagcaacctgtacatcaatctcttgtagaccagttgatgcatgattgttgcggagtgaaatatatgctcactagcacaacagtaggcatctatctcggcagtacatcaagctctctgtgtgggtaatgatgtttatccctgaataagatcataagggtttcaacaagtagcacgaaggccctctcagtgcttaatgacgtaaacactctacatctctagttcccaacatggtctgccatcagctgctctacatctctagtttccacaagttcattttggttggtctgatcttcgatagtacaagccgcctaaaactaagttcctggggcctccatttcctaccggttatgaccctttattgtgacttgcacctaactccataattcctcgaagatatacagttatacactgttttgatctttgagcattacaaaatggagtacctcttctatttataatgggctcacaacttttagcacaatttctccaccaccaaccatatggaattctgcgcggataggattaactaatagtcactctgtgaaatatatgtatcttgaatgatgactggtgtgggcacaacattttttatgaagcggtatttccaatggttctcaaacaacttaatctacaacctactacattctaagagcaaatttaatggtatagccaactatcggctccaaatcatctatagtcaattttatagctaattaattcatacaataatagttacacataaacatatactacacaattaatatctggtcccacctgtcatacatacatgcatctttgagtccgtgatgtggctagctacagatctgtagcccgctgctcctctctcctattttatctccacaaaatatatttatagctagtttataatctgctattgtacccgctctaaagctcaacatgcaaagatatcacattatcatccattagtaattgttacatcttaaacctcatacaaacatgctcttatctatattttattatattttaaagctttttaaatagaaccatgttaaatcatcatccgatgtaagttacataatatttcaacatatatttctccatcattttctacaatatcctagttcttcttcatttagttaatgttttctatcttctcattagaccatatatcacctaaattatttctagcctttagatgattaatctatagtccaaattttatccctcatttgcttcccacatgaagccacaccacctttcttttacttttaaattatcaatcaatattctactttaattattctaaaccaaatcaattctatggttcatagtcttttccaattatcgatcaaaaatataaattctataagcttaaggcatctcgctatgttacacgttatttctactactatcatactaaactcccgcagcaacgtgcggagtttcatctagttaactaggggatcgagaacgtcatccgacaagtctaaatgaagtttttctcaaaaggacaaaaatcattacaattaataaatattaactaagtagaattttctacagtacattgaagttttgtagaatttgttgtacatcactcaattacaaaacacctcataggtaccggctcatatgtaccaatttatttaaaaccgacaactattacctttttcacctctataggacgaaaaatttggataaaaaccggacatatacttatattatagatatcggttcaagataaaaactggtacttatagttttgttatcgatattttttttttaaaaaaagacaataccaatagtaagctatatgtgctggtttctaaaaaatcagcatccgagccgagccacccacgactccaccttatccactcccctcgcccaccccatcccccttctctctcatgcactcctctccatctgcccctcctctcctcctcctctccgtccttctcctatgcatcctagctccttccccctcgtcgtcgctagagcgtgtatgacattttggcgatgctggcgcgggatggcgcccttgaagttgttgtagaggaagtcgagcacaatggtgcggaagtggcggacgaggcggttgttgctgtggtcgagctcgtggaggcagtggagggtggcagaagcgggtggagttgaggtggagcagcgcgatgtcggatagcaactcgagctcgacggggaggtaatccacgatgtcgctgaccttcccagccgcagttgtcggggagcagcacataggaaacaccagtgtagccgcacacgtcaaggccaacctagtcggcagtgaggttcttggggtcggagaagatggttcttgtagccaaccagcacatgtttccaatctccatgtggcagcaaggaaggcgacggtggggctgctctctccctccggatctggacgagactgctcgcggtgcagcgacggcaccagaggaggcggaaacccgcatggaaggaggagacggagctggtggcagtagagatggcggcaacagaagtgggggttcgagttcatgacaggatatagagagtccatgtctggtggtggctccaggaggcgggcgggactgtggcggccgtcggcatcatggcgataggtgacctgtgcataggttcagcagtgacttggttgtggccctccctcctcctctccttccacctttccccttctcctgatccgacagcggtggtggagaaggctggcacagagggcgaggtggtggctggtggccgcgaaggaggtggaggtgttggccgtcgcactcctctccacgccgccagccatcggatccagtgacagtggctccatcgggctcttttttattatttcattgaatactgtaggtgccggttggaaagggatcctctgacataaagttatccctgacgtggtcactgacatgtggacccgctagtggtgtagcccacatgtcattcaccacgttcctctgactttacgtcagaggatctcaatccggtgccggttgtggggtgcggtcttggatatatttcattgaatattgcagatgaaacattatattcaattgcagtggatgcacactttttgggtacaatataaatatactggtagtatatactgtcattataacaagggcaatttagaaatataccacaaacttaaaaattggatcaagcaagaaaaacgcttcactatacaccgagaatttacgtaagtgccactgcccaatagtatataaagacaattttactcgctttaagttcatactgtaatatatttaaataagtcagcaaattaatctaaacccttaatcaattatactggctgtttatattactagaatattctaccacaaaaattctcttgattttcgttctatagctataattaattattttaatatcccaaattttgggctatatatctgcttgaaatatgagaattgagtcatttgagaaagtttatatactagcagtgacggtggttttgctttcatcggtaaagcaaataattgaacagctgcaacagttcattcacctggatatatcgacataactgttatacggatatatccttacactgaatttcacgcgagactctaaaaaccaggcttctagtccttcgaatcatcaggatgaagctaacagccatcatcgatgcttcccatactgacttgtatcctgtgcttcacatactgacttgtattttgttcttcacatatatatactgactgagctacattgtcggttgcaaccttgcatcgaactcccggtgcatcccctttctactggacatcattgtcgactacaacggttacccacatctcaatcgggcggcaacccccatctagcctcagacttgcagatgttggcccatcaccatcctcatacccctataagaatttgacgacagatatgtaagacacagctcgtgttttctttccaggggctatatacactgataccgatcgattgttgttcatattggagtgcttgctagttcatatcgatgcttgaatatatagcagagccacatcaacgttagactatgtactcctacatgaattcacaaggagtgaaaaaactggaccaatttggtataattcaggaggacctgactgtcattcaagttagtacttgttgaatggagcctactacgtactctggtatctcatcattggtcaccatccgtttctgctgtgagcttcaggcatatgaatcacgtttgatttttctatcatcactactgcaaaatcgattcttcctaacggtcagtttacgttttttacgatagctggtgctgccgccagcgactaaaggctagtgaaaatcagctatcttcacaaacggaacttcaccgcaagcggcgaggttaagctgaccactagaaaaaatgattttcaagaaaaaaaaatctccacattcgccacccatgctcgagcttctatgccgaatgcactgcccatgccctgagtcctcgccaaatctgccgctcgcttcccacgactgagctacaccaattgtggtatcctcacaacctcgagcctccggatccaccgcctgggccccaagccaccacctacacctttgccagatctaggagagggagggtgctagcggagccactgaaaccttgttgagacccagctatcgttgtcgtcatggcagccaatgtcatcatcacgatagtcgttgttgtcattgtggttgctgccgctagatccacttcctccacaaccacctcttttccttcaccattgtggaggcggatcgaccggtctggagcaccgcaagccactggatccatcccctccatcgtcactgctgctgaccactgcccgcgcgccctcccgggtgtggattggcagcccgtgcccctcacgtcatcgtcccaatcatcgccatcaccatcaccgtcgagaggaggaggggctgagggcacaggagggggtgagatgggaagagtggtggagtctgagtgagagtgggggcggaattttaatatagctatttttttggcagtcggtgctccttaggcatcaccagcgaaaatatttcgctggctgtcacttatgagatccacatgcaaaagtagtttttcaaatggatctcttaagtggcagccagcaaaaattttgtgaccaggagtccctctcaagtatcttttacaagcatgtgttcattaaacccacgagtaaaaaaaataaaagggtagtgctatccgaaatgtttttttagttgtgcatgcgatagagtggaatggaatggtggcacactttctaagatcctaaatgatgtgaattttgcaaatagtttctacatatgaaattcttataatactttttaaaattcattctttaactttttatagttaattcattcatttgtagcctcaggtaattattacaaaggaataactctacttcaccccctaaagtatcggggttggtctacttaaccccctaaagtacgaaaccagatattctaccccttgaagcgtgaaaatcggttcaaataaccccctaaagtagtttgtaggtagttttgccatgtaaatgattacatggcagcggtattggcttgcatgacacaaagattagtccagtaaacccaagttgatctaactattgcttcttactcattgatcgggaagcctaaaaaatattactccatctatcctataatataagaaatggtcaaacttggtacgattgacttataatttttcatgtgttataagatttattatgcaacaaaattataatcatatgaaagtaaattcaaatgtcaatccaatgataacattctcaacaaataaaatttaattcatattatactaattattggtcaaatatcttagaagttgaatcttgaaatgcttgtgcgcctcatattatgggttggagggagtatatattaacactaatttacaatcactctcagcctgtttcacttgtgaataaaatgcttagcatgttacaatagtctcctctatagtccaagaggccaaaaccattgccatatcatcgtgtacacagcaaaaacacatataaaaccactaaaaaacactgatgttgtataataaacacataccaaaaaccaaaaagataaccattaaaaataaaaaaacaacttaacccttgttttgatactttaggaggcagaatatccggtttcgtacttctgtaggttatgtagaccagcctcaataattcgggggtgaagtagaccttttccttattacaaatcatttatctattcagagggaagttggcgataagtatcaaatgtcggatgataaaattgctcttattgttttatggaacgaaacccacgactctaacggcgggtgttaattccggaacaaaggccatcaacagcggttaattctaattaactctgacggcatgtcttcatccccttcctccagccgagatagaagactaatcctctattctttctcctctgtttctcttggtacataacactactctgctctgagttgcttcataattcacagtcctcagtacctgtggacattggtattctagatgagcagacctccagaactccgtccatcagagtagctggcaatcaaatttccggtcgaggagcgtggttcttcacgcgactactgtctgcttcctttgcatcaacgtctctacttccgctgcatcaatgtctgcttcctctacatcaatgtggaacgattttattaactataccgattaaggactagattttcaacatggtcgatgatgctaacacagcgggatgtatcagaacgagtaaccccctgacactggtgatttcatggtcgatgatttcatgaaagatgattttccttacagttttcctttacaactaaaaatacatgtgcagagtttttctctttacattctcgaagatatcacgaaatggggtatctcctaacttgtgttaaacatgatgtatatttgtacctcttcctcgtaataattctagacatggacagtaaaaaaatttcacgatgtactgtatttgattcagatactattgagtgaaaattaattaggcccaaataaattgggcagagtaaatcacgtatctcgatcaatgcaatcttatgtgctctgctcccaaatcgtctgatcgagtgcatatccccaccgaagtactggatgtttgacagcccatgaccaaaaatgtcttgtcgataagcagtttgtgttgaggctagctggctactagctcatcgatgatcacttcaactgccgataagacaatgcactagacacttggtgctgaattcccaatgcctctatttcatagcggaattcgtcacatctgacttgtaatgacaattgccattgcctttttgaggtaagagtcctatttgttgcagtgatgggcatatcttaggctctgatgcaaaatgagagagcgatgttgattgtaagatttattttaccattcttaaaagagcaagtttacggtccttgatgtacataccaagagaagtatcatattttccagtataaaagtttgatacatctagatactaaatatctcaaagtaccagaaaatttagtgtaaaaattgaagtacctcgatacacattctctataatggtaaaatttctcttattgtgacatgttactgcagttaccgtggactgtgcttgcagggaaaattaaagtcaatattaggggaagctgatcgtgctgaactactgcatcgattgtcgcatttatacaccgcgcttctataattcatataaagttacaacccacgaattcatccatcttttttacgtatttaacatatacttttacatttatcccgcagcaaagctccagacaaattcgtggacgaatcctgcgtagccggcgccatgttgtagacgactgtgtggccaggcattcctgggtcttgccgcgcgcatcgcgatatacccgtcattcagtcgccttgcacctaaaatcggcagatggtgactgagatacacgcttgcaacctcgcactaaactcatggtgcctctctttcccattattggacatgattgttcatctagtgtgtgttgctgaattgtaggcatgcatttgaccaattattgatctgcatgccccccccccccccccccaataagggcctgtttagttggggaaaaaaaaattttaggtgtcacatcggacgtttgaccgaatgtcggcaggggttttcggatacaaatgagaaaactaatttcataactcgcctgaaaaccgcgagacaaatcttttgagcctgattaatctgtcattagcacatgtgggttactgtagtacttatggctaatcatggactaattaggctcaaaagattcgtctcgcgatttccttcctaaatgtgcaattagtttttgcttttatttatatttaatgctctatgcatgtgtccaaacatttgatatgatgtttttgacaaaaaaaaattgtgaactaaacatgccctaatgtgatgagagaaatggatgatgcagcttctgtttttattttttctcaagggactgtacactggtactgattcttttatatatcggtatgaactttctctagttggtaaggatgcttgaatagcagtggcagagccgcatcaaggttagaagccaaaacggtgcttattagaaaataaaaaaatatctattggtaaaacttttatatatttgtttgtagcgactttaaagccaatgctaaaaattacattgaaaatatctcaaaatcaagttcgaaaattcaaattttagcttttgctttggcttattatactaactgatagggctcataggtcaaggtcttttaaggtactccaacttacctttacggaacctatatatggagataaaagatattcacaaatcttgattatttaggaattgttttgtgtcgtaaaatatatttttgcacattatttatctttccaagcttatttttgcatgcatggagccttgaaaaaaattaatgcacgcagccctgaaaagtgtctagaacagaaattttacttgaaatatattagcaatgttgtttccaaaacacaattttaaagaaaaactataaattagaaatttgaagtgtttcatatgtttataaaaattacttaaaatttcataaaaatgaaacaaaaaggttcaactgattttaagtatgaactttgatatttaaatattatcctacaaataaacaaatatatcacgtacaaaagttaaaatttgctgatgccgttcaccgtataattcaagatatgctttgatgttaatacaaatatgattgtagaaagggaaatattattgtaatttgaatttcaaatatgataagaaagattagttctgttacgttattgccttaaaaacaaccatatccatgacgcatgataataaacagaaactgaagataatattcttgtttccttttttgagatgtgggatatcaagcattggatcaatatgaaatgaatggaactaataggaagtcacatggagcgaaaaaaagcccgtgaaaaaacatggccacatgactgttttagtttttgcattggagtgccctgcgtaagcttcaggcccattcgatctgatcaccaattacaatatttctggtgctgcgccctgggtcgttggaggcttgatgcaggactgaattgccgtgcggacgtcatatatccttttttttttttaagaattaccccgtacaacatatacactcacaatgcacgcacactcatccctattaacacacgcatgcaaaccctacccctatgagcatcttcgaagactgggccggcaaatccatcctggagattgacgaagtcaccacaggcacctcactgtcgacgggtacgtcgcctatcactgaaaacacaaagccattaaatcctgaaaaattcactcccataaggacactagtaaaaaacctctataggtgccggttgggaactggctataggtaccagtttcacagccagcacctattggtcgacacctttgtctcaattttattggtgccagttctaaaaccggcacctatattattaaaaaaataaaaaaaagatgacaccaacactgccgccggcctcctccaccggtgccaccaccacctcgctgggcctccacgctagcacctagccgtgcccgcctccgcgccgccacctcaccgggccggcctccgcactggtggccaccacccaacgccacgctggaggggggaggtcctccaggagagagggggctggccagatccaggcctcctccaccaccgccaccccagcgtcagttgccgcgccagtcgcgcccgcgcccgcgccacgccgcccttgatttggagagaagagggagggcccccggtccggcagaggaccgccgcgccagccgcgggagaggaccgcagtggcacaagaggcactagcttgacttcctgctgcctccatttcctatgtaccgagctatactagcttccactgccatgactacttgctctcttcattcacatatgacatatctcatttttttttctgtcgtcacgcaatttgatctttaagaggggggatgatgaagttttgtgttgcatggccactgctgtgataaatgttgatacaaatatatatgtttgctatttaatatcactggaagtagatgggcatatatggggaatatatatgaacatgtacaaattaatatccaccagctggatgcacgagaaattaagcagtaaaaactaaatgtatgaaagcaagctatccacttagagagtaacacaactacgcagtcagaaacgaacatcttggcctggagagcgaagagtacggcctgaaacattgttcacataaacaggccatctgttttcatcgaataaaatctgctaacaaatcagattaggaacttaatttatttccctcagagaatacgactcataaaaaaccagcctatctattttacgcgaaagaattcaacccacgaataaatccaacttacgttacttttagaataagaattttgtgcttaaaaattataagcggaagaaaagtccatgctttttgggccgagctaatttcttccgaggaagttagcacatcaatcggccctcctcatatgcaaaataatttagctgaataaatttagcccacctcattttcgtgaatgaaatcatctgacgaataaaatatgccgattgtatattatacagtacttccttcgttacagaataagtttattttttttctcttcctatttatcctaaaataagatcatttttaagtaatcatttaatcggggttaattatcaaagtcaaaatgtggaataattacaacgagatttcataaagtgtggttataataatctttttggttttctactggtatgtgtaggataagtgaaaaataaatctattttgggatgaagggaatgtcacctatacatgcaaattttttcctcaaaagctgaaagtagaaataccatacactgtaataaccccccccccccaccctcataattttagtaaaaagttaaaagagttcgggtctaccttaacatcaatagcaaaataaaaattttaaaaaaataaaaacaagccgcggaaaatagggtaaatgcggataccatccaaactgaaggagggccaggtctcaagctagctgacctacacaaccaaaggccagataattaaactgaaaactcagctaagaaacagaaatcaacaatcgacaacattctcaactcacaccacatatatactacgtgcctacgtcagttcgtcgcaaagagccattcaccacaatttctctgatccaaatcaatttgcatcacggcgcatatgtagaaccccgttcagttgactacaatagtaagccaaacgaatgcagcgttgtgtgccgcaatgtacgtacagccatgtgtatttgcttgacctggttagggccatggtttgaaatttcagaaatttcgtttatttcaagcccccaccggcaaaaacacatgtttcgaaattgcaaaccctgaggcaggctgagatgtgtgatctcaaagctctagagcaaagcttggcagcactgccactctgcctcaatcggtacgaaacgtcgcaacaaagcacagagatgttgcatgggaaccatatctgctactctcacctcttgttctcgcaaacccagtgtattgttgttgttttctcaagagggagtagagatgtacaatttaactccgatgcgcactccagcttatgactagttttccgatgcctccttttcctatagaagtctgtggcacttcatcatccttttcgattaacttacattgaaattcgtaacagatgaacatgtatggtggggatgaacatgttgcatgggtttttgcctcctttgcaatatagtatataaaagatatgccgcatgtatgttttatggtaagaccagcacctacaggtattacaagtcctggttcttgacaaaggtgttggttctaaaactggcacctataactttcggcattggtaccacaaaattgataccgattggtaaaccggcagctaaagccggttcctaaccggtactaatatgatgttatgtactagtggtaggtgcagcagatcaagatgcgcttctatttgcatttttactattgctagattagttaatttattcatatagagtgagaccactcacctctttttttcaagtcattcaaatgataatgaaaaaattatgaaatagaacaatatgtgattaccacttcataaatttgcgagtttaaattcgacaaaattaaaaaaataaataaaccctaacaaatatgtgcactattaacaataatatttaacatttaaatttccatgtttatggagtgatactccaaaaatctgtaattaatataagtaaaattactggttattttagagagattaagtatgatgagaaaaatacttgagtacccctctttcaaccatggatggtggagggtaagattgaagaaatttgatgagaggtgagtttgatagaataagtaagcacatgatgttgtctccacaccgtcgtttaccgcttcacatatctagctgtcacaaatgcattttgattagttattctgattaaaccaacccatccaacaatattggcatatgcctatgcctatgccgtctaaaaaccacaactgatttcaaggctcctacttcaccacccatgcatcttctccgaggttggccgcttgcgtgctcgttcttgtcagcggcgaggccattacaagcagccgaattcgaagagcctggaatcatgcctccgctaggcgctaagtccagttggaagtagaattctgtcagttgatcagttattcagattagaccaacacttctcgtgtactctacgctcgtcttccctctacagatcccattccttgaaattgtattcccggtgcctccctttccctatgcatttgacgatttaaggagcttgtttaatttgtgtctggatcatctacaattcctttggaatgggaggaattcaactaaaaaaacatcaatccgagagggttttggtgttctttggttcaccaaacaattcctatgtacatcgtgtatccagatcggaccttctcttctgaccaaattttgttgagacttctatatatcatagatgaaccacctacgcatatctatatctataactaatataaatattcgtatttttccggtcgtcacacctaattttcgtctgtttttcgtccatacacaatcctattcggttagcaatagcgatagaaaaaattgcaaaaaaaaaaccactaccgccggaggagaagagaggcggcggagggagcgccgctgccggatccgcccgcggtggccgccaccgccgacggatccaccctcagacgaagccgacgccgtcgtcgccgtcgacgccaccgtcgctgtcgacgccgacggggagagggagagggagagggggagggacggccgtctccgccacaccccgccgtcgctgcgccatgccggcgagacgctagcgtggggaaagccgccgccacagcccgccgtcaccgcgccgtgccggcgagaagggagggagaagggaagagaagcggcgccggtggtgggagaggcggccagctggggggagggggagcggcgggaaatggggagagggagcggcgccgccggaggggaggagaggggagcggcgccggtagggagagggggagggggagaggcggcatccgtagtgggggaggcacgtccaccggctgggggggagggggtgggga

SEQ ID NO: 4784 - DNA, 21828 bp, Oryza sativa
gggggaggggggggagaaaagacttttttgggtttttctttttacaaaaccattttaactttgtttatttcttcttaattatcatttgtgctctgaaaattccactaaaatttatttacgcattttaggcttttaggaaatgtacaaaaatcctccaagccttatttgacttttaactttgcacattttaattgttggaggctttcacacggattttaattattctaggcataattacgaggatgtattttagagtcgttttgggacgcgacaagttcgaggccgcgatacgccggcggatcgaggtcctcaatcgcaaccaatgcgagcaggaggggtgcggtcgggcacaggcgcaacgggcccagaagctggaggagcgggctcgagcgctcgaggagcgggcgcgtgcgttggaccagcgcgagactaccttggccgcccacgaggcaacggcggccgagcggaatccaccctttgcctccgcgaggaggccttggccgaacgcaaccggaccaccctcgccgtcgaggctttagtggcccgtcgcgcggaggagttgcggctctgagaggaagcgtggcgggaacgagatgaaccgctggcgggatggcggcgcgccggctaggcgagcagctcaccaagtgtgaggaggccgttgctaggcgtgagacccgccatctggaaagcgcccgtactgaacgcgcggcgatggcggcgagggtgtccgagctgggggccagggagaaggaactggcagcgcgcgggcagcccggcgacgccgagttggtcagccaactcaccgcggcccaagatactcttgccaatctggggcgcctggtacaggaccaggctggggagatcgcggccctccgcctcaccaacgacaccgggcccggccaactctacgatgccatcgaatggctggagcacgcaggacgccgtgtgggcatctccatgcgccgggacaagaagctctcgcccaccaggccggcgctcgcacttcggctggacgagatggcggcggacctggagaggctggagaaggaggtcggcgatgctgtgaagtcgtcgtcggtttccttggcgcgggctgcggtggagcttgtcctcatgagtcatcaagctccttgtgacctcggtttccttccgtggtgcgcgctcgaggatttccccctggggactgaggcgaggacttgggagcaggttcgggatgcggccgacgcgatcatctcaagcttcgagaggacggcccctcggttcaacctcgcgcttccctcagacgaggagagcgggagcgacgacggcggtggcgatgacggcgacgaggattggggcaaggtggtcagcggcgccggactcggaggcgggggcactccatgactacccccgcctcttctcctttattttgttatgtgcttgtggcgaacgcttgaaactctaggccatcgtgccatcctggttgtaaataaagcttcccccttgcacctttacattcttgctttctcttctgaatgtctgtggcaaggaaaaaaccaaggcgaacgcatttagttgacttctttacgatcaggttgccgtttttactccctttgtccccccccctcgggctcgttctggtaaaaaggggggaattcgcacttggtctgcggcacctaggtggtgaggggcaaggccgtcgctccgggggagccacccagcaggactagccagaccaggactacgatgactgggggtcggggatggccatgtgtaggccctttgagcccctagggttcgccgcagcccgaggcgtggcccgcgttcaggctccccttcggtgattttcaggttacccgacaccacttagggtttggagcaagcacgaatcatccctaagccaggacgagccataggaaggagcaaaaaagggcgtgcaacagcttttgattaagcagaaagatttattgctgaggaaggaagtggatacaacatatttaacagtggtagccaccggccaagcccgcacaggtcgagggatgtgcgggggttgtcccgagccctaagaaagcaaaaaacgcgcgacattatgagtagaaacggcggagatgctcgatattccaggggttaggcaactttgtgccgtcctccgtggctagttgaactgagcccggctgggggacaccaatcactttgtatggcccttcccacagtggtgagagcttgctcagccctaagcgcgactgtatgcggcgtaggacgaggtcgccgacttgtagtgatcaggtccagacgtggtgccgatggtagggccgcaagctttgctggtagcgcgccactcgcagggccgcgcaccttctctgtccttccaaatagttgaggtcatcgcggcggaggtcatcctggttggcctcattgtacagcgcgacgcgaggcgaacgcagggaaagctccgagggtaggaccgcctcggcgccgtacaccaggaaaaaaggcatttcccccgtagcgcggctcggggtggtccgatttgcccacatcaccgcgggtagctcctcgagccaagaatccccgtgcttcttcaggatgttgtacgtcttggtcttgaggcctttgaggatttcaacattggcccgctcgacttggccgttgctcttggggtgggtgggcaaggcgaagcacagcttgatgcccatgtcgtcgcagtagtcgccaaacagctcattggtgaactgggtgtcgttgtttgtaatgatacggttgggtactccgaaccgggatgtgatgcccctgttgaacttgagggcggaatgcttgtcgatcttgacgaccgggtaagcctcgggccacttggtgaacttgtcgatggtgacgtataggtgctggtatccgccgtgggccgctttgaagggccctaggatatccagaccccagaccgcgaagggctaagagagcgggatgacctgcaaggcctgggatggctggtgggtttgtttggcgtcgaatttgcacaccttgcatcgccggacccattcttgggcgtcttgcaacgcggtcggccagtaaaagccttgtcggaaggctttaccaaccgacgtgagtgaagctgaatgagccctgcactcaaaatggtgggcatcggcaatgagctcgatgccttgctcccgagagatgcatttcaagaggatcccgttggtagcacgccggtagagggtcccttctacgagcacgtactgcttagagatgcgcacaagcttctcagcttctgcgcgatcctcaggaagagtgttatcgtcgaggtacgcccggatgtcagtcatccaaacgacctgacgaggggggtcggggtcgaccccctcgggccccgaggcctgtggctcgccaggcatcggggcgaggaccgtggcgccaggctccctcagggggtccaactgcgccgacgactgcaggagcctttcctcgaaggcccctgggggagtggggctcgtgccaacgcgatgcgcgacaaatcgtcggcaattgcgttgtcgtgccggggtacgtgcctgagctcgagtccatcaaagttggggcgaaaattcaggggccaccggacgttccagagacttgccacgaaggccctgcaaccggtccctccaggggtgaacgcggggggcgggccgcctcgtgtggaggagcgcgacactccggatgaggaggcgccctcccccatgcgggcagcactgcgctcgtccctgcgtcgctcgatgttgattcgagcattgctcggcgggcgggccgtcatgacgtgtggaggagcgcgacactccggatgaggaggcgccctcccccatgcgggcagcactgcgctcgtccctgcgtcgctcgatgttgattcgagcatcctgctcctcgtagaggccgtcatgacgcctccagcttctcgagacccttgacgacgtcggggccgtcgatcgccacaaagtctgggctgaccgacggtccctcctccttgctgatgaggaaagggcggtgggggtacgcgaggtaccagtggcggcgggccggccacccgcagccagctgttgctgggcagtggtgaccaggttggccacgtcgtccaaccatcgctggacaggagtctccggcgccgagtttacggggggttgctgtagaagggctcccgccgcttgaagtgcgcctcggggcgagccgccgtcaccgtacgtcaggcggcatcgtgccccgacgctgcgcggtttcccctcgcccggcggcggggagagggccgagccacccgaccaggtgggatcctccctccgtggggggtcgcggtggggaggagtcggagagttgtggcggcggtggcgggggccgcggctcccgctggcatcctcactcccggagggagtgggggtgtgcgccaccacttcttcctccaagacctcgaccatgatcgttgaggacaaagagaaacttggggtggaaggaaacaacttctttctcaaacgcgcgaattccccctacctggcgcgccagctgtcgaggaatgatcctctctagcgggtgatcgtgagaccccccttttgtgagttcggccgggggaaagggcgcgttgatcaagagtgtatgtccgcctagagtcttccgagaccgcgcgtgagagctgggattatacaggttcgggccgctacggagcgtaataccctactcctgtgcatgggatttaggatggagtgttacaaaggttcctaaactccagggagaactctaactcttcttggtggagctcaggctaactgagagtcgtcccctcctcttggtggggaaggtcctccttttatagttcaaggggataccacatgcaccgcctctacctactccttcacgggagggggacccacaccgcctgggtagtactgccattcgtgccttcgcctagaagctaagcaaccgtccgtccttgagtggggcccagcgccgtcccccgcctgacacgggggacgcccttgtcattcccctttaaaagaatggagacttttggcgattcacctcaaatagagggagctcctgacggtacattgatgggatgaagcatacctgcccccacttcgccgagcacagggcggaacgtgggggcaccgccgcccgtccgatcggatgtgaccggtcacaatccggtcatgcccgattgacgcaggtcaatcgggcagcgccgcacgtccgccctcaccgcattaaatgtggcgaggggcggttggggcaccgcgcattgatggcggtccagcttcgaccaccacctcactcactcccccaccacgtggcggccgggcgagggcctcagggcgaggcaacctgtcacacccagaaattctcgaaccagaatttctaagctgaatgtgcattaaatccctgtccaggaccagccaggatacacaaacgacaattgttgacatacagacccacatcttacaaaaatataaaagattacaaatgtagcgggaaagattaaagcgagctaaaccgggaagcttgacttcagcagcgggcgactccactccacaagcaaaccttgacggcagcaacgaaaccaacctctctgagacgactccaactgagaagaacttcatctctggtgtgggggaaaagagagcaagactgagtactacccactgtactcagcaagtcataccggaagaggaggtatgatgcaggatataaccaaaggaagctaggggttcttttgcataaagcaggcatttcaaaacagtagttgaaagcagtaaaacaactgtagaaattaagcaatattaaccaatcactatccaacgctacaccacgttgcaacaggcccaaccaaccacctgaactacaccagttcattaagctaaactaggggtgagactaatcacggtgaatctggttgatcgcccataaccgcgggcacggctattcgaatagttttactctggccagaggtgtacaactgtacccacaagacacgattccacacatgtcgccatgccccgaagtatcaccatgatactgccaagggggaaatcgtgacaagaccctccacataaccctcccctaaccatccacaccacgctaaggtttcacccccaccccttaaaaggcagtgggcggtcccctcttgcgccgcggtgaatccggcagctggacaaccggacaccccggccgacccaactccatcacgcccaccctcgccaccggtgcctaggaaagggtcgagctatacttcagatcaagcagttacccactcccgcttgtggtaagcacggtaagtctcccagggtttcccgtgaaccggtccttaactgctatgggtgcgaccagcaaaaccatgcacccatagcccaccattcagtgtattttaattaattaacacccttgcggtggcaccaatctaaagctatgccaatagacaaagtctatgtaataatgtgatccctttttgtgtactagtggagctaagcatggctaagcatttcctaaaccaacatctaatcattttgatacccaggttatcaatggcatatggtaaacaataaatggctgagtaataggacccatcccacatgacattgtaaaagaatgcaacatttaatagaaatgcagggtgtttgtaaattgggtacaatatgatcaaatgtaaagcatgacttgccttgctctcgcactgatgagaccacagcaacgtcttcgagaaaccgcggatcgacgaaacggccgaaatctacgcgacaaacaaagcacacaagcaaaacatgctataagactactgaaacaggaaacaaaaccatttttaatggattctttgcatttttcttgatttactgagacttgaatggacttaaacggagctcggatgaattacttatgaattttagaagataaactgtgtttttactaataaagaaaagtccttaatcaatttattgcgcaataatacccagggctgacgtcagcgaaggggggggcggcgccgacaggtgggccccgcttgtcagcgcacaaggggagggagagggggctcgggcaagtgggccccactggcagcggcacaaggtggccggtctaccatggaccgggaccacacgggtggtccaccgccggtccacgggactgacggtccggatcggcctcaaagacgatcggacggcgcggggaaggcggctaggcacggctcggctcggcttcaaagccgaccggcagccatggcggccggtggcgacacgcgcggtcaccggcggtgaccggcggcggcgcgcgagagccggcaatggcaggcgacggtgcgggaggcggcggcggacgacgcacaggccggcggcggcggacgaaggcgatggcgagcgcagggagcggtagcgcgtgcgggacagagggaaggagggaggagaggagctcctcaccgtgagcacggcggccggcgcgaagaatgaacacggcggcgatgaccggcgatgcggaggcacggacgggcggtggcgacaccctagagaagatggagaggcgttaggagaggggacgacgaccacggcggcttgaattgccggccggagatggaggggagggaaaaactcaccggctcgcgaggggagaggcgctccggtgggattccggcgacgcgaggcggcggccgggaaagctcttgcggcggcgaagctaacggcggcggcggtttggcgcggcggcgactctagcagtggcggcgcgcggccgaaggcggcgacaagcggcggagctcgggtgtcacggcgcgggcgcggtagggggcgtgggagacgacggcaaatggggaaaacgagggaggggactcgggggagggtttttataggtgcgggagggggcggacgtggccggagaggtggccgatttggccggcaacgtgggggtggagagagagagaatggagggattcaaattcgaatcccgccccttgcgagcgcgcgcgagggccgggagatgggggggagagggcggcgacgtggggaggacgcgggagcggcgcggcgtgggcgcgggaggagcggaggaggcagcggcgcggcggtttcggcggcagcggttggagcttcggctccagcggccggaggtgggagacgaccgacaggtggggcccacttgtcggcgtcccgagagaggagggaggggcggcttgggccggcccacaaggaggaggggccgcgggagagggatgggccgacggcccaacgaagaaaaaggagggaaaagaaaagaaaaagagaaaaaggattttcctgggatttaaaattgcactttggtgatttttaattggttaaaattatttccaaggctctgaaaattccactaaaaatcttgttaatgcattggagcacggggaactcaagaaaaattccaccacgctatttccgattattaattgcatttattaactagggatttagctctaggttaattaagataatttcttcgggcaatttatttaaccaatttttaaagcaagaaaagggggggaaacttcagggtgtgacacaacccgagggcacgaggggcgcgacgtggcaccccgagtccccctggctgcctcaacgttgtccgaggtgcggggggagggcaaggctgcatggccgcgtggatggacgggaaggagacttccctacacttcgtatacccccgggcccatatcactgacaatatgtgacagtaatgttattcttattttatctataatttactcttttatctatatttgatcatgtttctacaacagtgaaactggtgtgtcgaagatacaattttctctcctaaacttttctactttcttgcagtcttcaattgattctaagttctttaccctaatttgttgtttatagtgatatcactatgtcaaatgaatcgtgttaggatgcaatagatttatggaaaataagtagactattaatgtgttgtatgctgcaaacagactgccctcgctagtgcaaagtacctcatagggctgatgttattaagactgtgtaaaaggttgctgcagtttgtgatgacctccattgtaccacattgtctaagggatctgatgatagcagcaacatcaatgaagccgtggaaatgagcaatggcaggaccttttgttgtttttgctgttgctactactgctacaactaccctgccatggtgttaacgccaaaatttagtaagccccgaggtcatcatcggcttagcaaccatattggcttcagagtcctggaattggccaatgagaattgtcactcgtcggcagtcagattcttagtggattcggttaagaaaattaatcaattaaatgaagcttatccagaaaaagttgagttcaaggaggatgcgacatgacaatttatctattaattaggaagagttagttagtttccttttatttttacgaaagtgtgtttagtgtctttaggacttgtatcttttcttttctctttagaaaagtttatgtcttgtccaataaggactagtatctacccatgggtatagatatgtacacatggggtctttgtaatctatctccatagatcaatacaatatattttcggcacatcgccacccttttactttcaacgagttcttgtttcgagttgggttgcatcggttttgatctcagacaaggggtaaagcttgtcatggcggcttgtatcggcgggattagggcttacattattttgacactctaatctagctaatgcatctgcctatttatcatatgtcttagttaatccaaatcgatgatttaattacctgtatcgaccagatcttttctagggttttgctggtatcgacaaaattgtttcatcgatttagattaggtaaggtatccaccaccctgaaaatcagttaaaggcttgattgtttagactttatgcttcttttcacacttcctgcttgttaacagtgaaatttggtaagcctcgaagtcatcatcggcctagagtcaatatccgcttcagagtcctggaatcggcctatgggaattatcaagtcgccaatagttgaattcttagtagattcggttaaggaaattaatttattaaaggaagtttatctagaagtgaccgagttcaaggtggatacggcatgacagtttatctattaattaggaagagtttgctagtttccttttatctttagaaaagtatgtttagtgttcgataaggactttatgttttccttttatctttagaaaagtttctttcttgtccaataaggactagtatctacgcatgagtacaaatatgtacacctggggtcattgtaaactatctcatagatcaatactactcttggcgcatcgccaccctcttttctcgagttttttacttatcacaaccgaacttggcacctgacgcagggttgcatcggctttcaatctccggcgaagaggtaagtcctacgttccgccagcccaagcaattatacctaccggctacgttggtgttgttcaaggctgtattgcttcgatctcttggatcgctctagtttggttgatatatttgcctacctatttattatatatcttagttaatctagtttggtagctcaatttacttgtatcggctgggatctactttagggttttttgccagtattggctaaatcgctttactagattagattaattaatgtatccataaccctgaaaattagtcaaaggcttgattgtttagactgtatgtttctttgcatactttgcgatgcatcatccctagttgtgcttagaaccataaaagctaacctgtctttgattataataagggtttcatcggcgtttcagccgatgagttatctggacgttgcatcggcttacaaggattacatacaagttggaattagccgattacaacaaagatttcactgtgtatctaatcatttggatttaatgctatcggacttccagcctctcagggttatggataccacatacataatagtagttgactaaatctcggcaggacccaccacataccatgttttatacggaaactgacttcggatatggagggagttccggataaggaaagacaaccagagttctatatggaaacgacaaggactactcagattgtatccatattggtttccctagttcaacttggataatgggacacctatgggtataaatacaaaacccctaggaggagagaggagacgatcaacacccaccacaatagacggaacaacagaagccacaacacacaagccaacatatgccaagacaagacgccggatatcgacttcagggataagtacggctagtcccatacggtgtctccggatactgtcaggggagacgaaagcgctatctctgatcttgtcgggcacggattcgaggaggaagactaccctgttgtcgactacgagtcagaccttcagactgccatgtcgacaacagttagataggctaccccaaatattgtactggtgtgattatggtgaataagagcaacaaccggcttcggccaacaggatgtagggttattacctgacaactcaggggcccgaacctgtataaaaatcctcgtccccgtctcttttacctcagtctcgcgtatatcctagcaccgacgatccccatactatacaaataccggaatcgcaacatcaaacgtcgacacagccgatgtatgatttaaccatcggatcacatattctatgatattattgtcagccgattgatttacattggattatattgttattttattatcatcagccgattgtctatatatcgatatttactcaagtatcagactctgcattgaacatatagccgattattcaaaaccctatcgacatcagctagtatcggcatcggctggaattactctatcggcttgttagccgatcgactttttgatctattgtctacatatcttgtcagttgcaggattaaactaactggcacgctcgcatcccatcaagatttaggacctgcattggagctaagcagacatcccagtccttcgtgttgttttccacgtcaacacatggtacttcaaagtaaaaaaaaatgaagtgtttgaacctgttaagaatgtcaccaatacactcgtcaagctgtttgaaagcaaaacatcaaatttcatatgttcaagccagagaactacaccacataccacagtatcctatatagcatttaacatttccgtttcactcctagttaaagaaatggtgaaaagggctttgaccacttatattctactatatttcttttattatagttgattaacttattctactatatttttattcatttcactccaagtaaaataaatggttaaaggggctttgaccacttaaataaattcgtcgtaacctgtgtttttatcacaaaacatgtcagtgttttatcaaatacaaacaaaaccatgtatacacgagagaatttgttcatctggtagtgtttacacaacacatacacatatactacctctttacttgacattttaaaaattgacatactctccaatagatacgttccatcattagtttttctattaaaaaaatggctgtgaaagtaattttcatgacaaatctgtaaatgtcatcttcacatattaagaacataagcagtattacactatgaactctttggtgatcaataaattcatgtttccttaccagaaaaaaaatcatacaccataatgaatatcttttgtttacttcccaacatgccaaacaacgtatgtgagattttcttccagttgtttttacctttctattgatgcttatacatgcattgtctatttatagtgattctattttactctttagatacaatagtaactatcaaccaaattctctcttcacctcccttatttcactatccctggaggtgcaacaatttttttcttgttggcatcaaaacagtttatactagatgatgccccgcgcgttgctgcggaacttcgtatttagaaatggaggactacatggggaggtcacagatagatgtaatagatagcaatccctttaccataaaataatttatttatcttgtaacaaaatatagttgccatgtctaaataaaccataagagattccttatctcgtaatgggggtttatttatctacaaaaatatagttgccatgtctaaataaaccataagaaaattccctatctcgtaataacattctctttcttgagaatactaaccacttgttagagtggaaatattgtgacgatggaaacaaaataacttgtagaattctggactgaaagaattcatagaactgaagataaatagttgcactaacctgatgaatctcccaatgtttgagagaatgtttaattatgctgtgacaaagaacatcctttatactctagtcataaaaaaaattaaagaattaaattacgtcaaccacaaaattgtatcttataaacctgaatgtcaagtaggaacatcatatagcaaagaacgattagcatggacagatccagggaacaatatgtacctgaattaggttcactgctgaaataatcacggtattgacctttcaatcaatcatagtcaattagtgaaaatctgatagttttgttatggaagaaattacttagcacctcttacaaagcaggtatatatcctaggataggcatataataatatctggaaaagccagtgaccattaaccaatgtgaggcaattacgcattaccgaatatattgttgatattttcttgactgaggagtcatattggtggaagtacatgttgtagttgctgatttgggtgggaatgccctggggattgacctcagccgtagcccatagctgctgctacaatgataataggcaatctactaatagcaatgatctgcaagcggaattcagaaataaaacaaattataggtgcagcaatgatagaaaattggtatgcatacctgtgatcttagcgtcctggtaccatattggctcatctaacaaaatgtaacgatcgaataaatttcaatccgtttgaacagggacggtagatacctaaagaagagcccaaatcaaatcgcttcgataatcttagggacaacaggaacaggtcaatttatcatcaatctagcatgactaacgaaacatagaggtcctctcaaaaaaaaaagaaatatagaggtcaatagattgaatgaacatatgtggttcagaagagtaagaagcatacctaggaatatatacacatgcgatttgttgaatgtgaggaggcgggtgaaggtttgaggggagggagaggcagggagaacaaatcgaacgacagtttccagtgatcgagacatggtaataagaagcaaatagaagaaggcaagtggtttggcggagcttgatgcggatttgccgacaaagaagctgaggagagttgtctccattattgtcttcatgtcagccatcaaggctgctcgttggtggacaccggcgttttccatttcctgtccctgagaagatgagcagcctggggggtggtgcctagccaaggagagggagcggagcagtcgggcgaggaatcgccggggaggaggttggggaaaacgatctattgggcttttgacacatggatatgggcctctcctggatggctcatggctctatcgtttcgcttcgggtcgcttcagcgttggtacgataggcaacatgggtgaccatccagatctgatcaaacggctgtagatcaagtagatgacgtggcttaaccacaactcagaaaattgataataactacactaagtagggatcacttgtatggtattataggatgcatagcctccacgaagctacgatggcaaacactaatacaagaggaaacaaatcgctttagagtatattgatcatcttcaccaactgttacaacacatattatacaagtaactaaaagtcaaaaagataatttaaatatgagtaatgcttacatttaatccatgtcatttgtgaactatgtatcatttacgagagaaacaaattgttgtttcattaaagtagaataccttcaatattttccaagcacttttataaaattatatgctcctcttacatttataatttctggttgaaccttacattctacaagtacaccatagttcaagcaatggttgttatgcattaattctctactagtactaataacttattgttgtaaaaaaagcataatatgtgatgcaagtaggacgacatgcatatttgtatactccctccgttacataaaaaacgaatctaaaaccatatgtgacatattctaatactataaatctggatatatgtatgtccagatttgtagtcctacgatgtgttacatccggtactaggttggtttctttggatgaagggagtatgtgagtatttttcataacaaatttataaatatcattttttacatactaaatattaatgttttattcttttcatgtattaatgatgcatgccatttgtttgcggaaggaaatggtattatacttgatggtttgcaacttcatatgtttccttcaccagacaactctttgcatacatatatagtataccataaggaacatttatgtttattttaccaacatgtcaagtaaagtaggtgataatatcttcgagctgttttctaacatctcttttcttacctatttattcactgtctatttctactgattatgttttagtttctataatgggaactaatggccaaattctctcatcacttcctacatttttttcttcgtgtgccttatttcactaaacaactgcaaaatttctttcctagttagcctccaacaaactgcaatggcaaacactaccacgagaaaaaacacattgctcgaggacatattggtcatcctcgaccaacggtaacatcacatattatattactaaaagtcaaaagattatattgcaaacatctctacaagtaacgcttgcattaaattgtatgggtttaaagcaatgcttcctttgcaagagaaacatatggctatttcggcataaaaaagaatttcatcatctattttccaaacaagtaagaaaataaaattttggtcctcctaactattgcgattagttttagtccaacccaggattatttcactaccactattcaccattgtaaaaatcctatcatatactcatccgttccgaaatataaagtgtttcctgtaaaaaaatataagtatttctagatagattctctacccgacatctattagctttgaaatcattaaaatgatgaaaactatgaaacccaaaaatccttatattttgaataaaaaggtaaaaattacaataatatgccattttttcaaaaaaaaagttaatgcaaaatgtcgaaaaataaccaatgcagaaaacctataaattctatgacgtgtagggtgaaaaggaaaaaaagaagggaaaaactgaatccctctgtccctcccgtctccttgccttggctataaacccccggaaaccacaaggcagagagaaggtccttcccttcccacataggggaaaaaaggggaaaaaaaaaagaaaagagaagaagaaatcctccgaaatggcggcgtccggcgagggggcgtcgctggcgtggcggcgggaggggaggacgggcggcggcggcgggtgagctacttctacgagccgtcgatcggggactactactacgggcaggggcacccgatgaagccccatcgcatccgcatggcgcactcgctggtggtccactacggcctccaccgcctcctcgagctctcccgcccctacccggcctccgacgccgacatccgccgcttccactccgacgactacgtcgccttcctcgcctccgccaccgggaaccccgccctgctcgacgcccgcgccgtcaagcgcttcaacgtcggcgaggactgcccggtcttcgacggcctcttccccttctgccaggcctccgcggggggcagcatcggcgccgccgtcaagctcaaccgcggcgacgccgacatcaccgtcaactgggcggggggcctccaccacgccaagaagggcgaggcctccggcttctgctacgtcaacgacatcgtcctcgccatcctcgagctcctcaagttccacagggtatgcctttgttttgttgggatgcttgccttggttgtgttgtgtacctgtcctgtgatcggaggaggaggaggggcattacgatttggaggtcgttgtctaaatttagatgcgaattggaatggttcccgctgatggacgcgaatatttgagtgcattgggtttgtgtttcggtttagtttttattttttagtgcgtggtgaagaagatgctaagacttggggagggatttggtggtttgacttccaacactgcgaggagaaattactattgttcggatgcctgattaggtgattgtagaaatttaaagggctctatctctttctgtgagtgcatgcacgcgttcatgctcgtgtgtttgtttaatcttgcaataggattccatatttgctttcagtgttaattgtttgttttcattggatttagatatatgaatgatttctatgtttttacctggcccgacatatttgaggaagtttgaaacaaatggtgcattttggggattttgctgagtttttatgagcggaggttgcttatgttactagtgacattatgggcatggttattgtcttaatgttgtccaacattttatttgtgaatgcttagatagttagattgatcaacattaaatacagctggttgagttgtctataaaaatttaaaaatgctttcagaatattataacttggttgggatgtacaaaatatgttcgaacacaaatcagctcaaggctgcatgttagaagccttaacaacacccaaaaaaactgtgtgaccgaataaagtagttatcatcttttcttttataaatcagctttgcagccacattcctagtgattttgcagctaaattttaactagtttgtatatttattgagtgtgtgatattactgttcatatggttactttttctgtcagtaagttgtttatctgatttgattattaggtattggcattagttttaactgaaaagaaggtgacatagatgtgatgtgaaatggttaatatggccaatcttactgggatgtatctttaatggtccattcatccattgttagcaagaatattttttttctgtgatgtgaactaacatgtatatcctaaatggaatttttatatgcatggattgttttggaatatgtggtattgctggtgatatagttgtgttggttactttactgctagacaacattttctttttgatatgcatgcagcattaatctttgtgatttggactttttggaaccatctgttgattgttttctgaccatttatcagtaactcagtccagtattacttcacagatacttcatccagtttgttgctcatatgactggctttaatgtaattattcgcatctatttacaataaatgttgctgctgaaatatcatgatctatatgtgtacctttcacttgtaattcatttagtactactccctccatttaaggttatatgatgttttgactttggtcaaagtcaaactgttttaagtttgactaagtgtatagaaaaatatagtaatatttataatactaaattagtttcatcaaatcaataattgaatatattttcataacaagtttgtcctgggttgaaaatgttactacttttttctacaaacttggtcaaacttaaagcagtttgactttgacaaagtcaaaacgtcttataacctgaaacggagggagtaattatttaccattcctggagaactgttttagataccgtactttccaatataataagtcctgaacatatcttttaaattttttaatcaccaggcttaataaaatttggaaggcatgtgttgcaaacttattcagcatcgtgatccatgtttcatcaagctttagtgtgttgattgtggaatacatcaagaatttcatcttggctttctaaaccacaactgcacttctctgatgctattgaatattgctgctgctacaacagtcctatggctacctaatttttctgatagttatcattcttcttttgttgtagcgtgtgctatatgtagacattgatgtccaccatggagatggcgtggaggaagctttcttcactacgaatcgagtcatgacttgttcctttcacaagtatggggactttttccctggtactgggcatatcactgatgttggagcaggcgaaggaaaacattatgctttaaatgtgcccctgagtgatggcattgatgatgatacctttcgtgatctgttccagtgcatcatcaaaaaggtaatggaggtttatcagccagatgtagttgttctccagtgtggagccgactctttggctggagacaggttaggttgcttcaacctgtctgtgaaaggtcatgcagactgcctccgttaccttaggtcattcaatattcctatgatggttttgggaggtgggggttacaccatcagaaatgttgctcgctgctggtgctatgaggtcttacttttatctcttatttcatgtacaactgattgaagttgttggtttcatgctgaacagttctgatggaatatggttgttgcaatagactgcagttgctgttggagttgaacctgataacaagttaccttataatgactactatgagtactttggtcctgattataatctccatattcaacccagaagtgtggagaacctgaattcgactaaagacctggagaacataaagtaagtggactgtttctatcaatatgctgaatcatcttttttttttctcccataagttggcccatcagcttctgtgtagggtgcctcaagcgatgttttttagtagttttctcagcatgtcatttataatggtgtttccatattcactatctatactgttcagcatatcaccattgctataaaatgttggaatgtctctgaaacttcacaccttcaattaatgtttcattttttaccctgtatgaatttgtgactgtatctttttgaagtgtgttcccatattctgtaattttcaaatgtagatcatgtgaaaaccactttcatcgctccttgcactttgttgctagggtccattttctcactgcttcttgtgttcatttcctttctgtagtggttaatgtatttttgtcatttgactgatctgcaggagcatgatattggatcatctctcaaaaattgagcatgttccgagcactcagttccatgacagaccatcagatcctgaagctccagagcaggttactctcttggcataattttgtattattctgttaattcgttttcttgctttgttgtgcaaatttgagaatgtgctcttgtaggaagaggaggacatggacaagagaccacctcagcgcagtaggttatggagtggaggagcttatgaatctgatacagaggatcctgacaacatgaaaactgagaccaatgacttatctgccagctctgtcatgaaggtttgaacttatgcttatgagaatctttcttccatcctatagtgtactttgttcttgagaatttctagttgatgccgtaatagtgatgaatattctctgttattgacgttaaattttaaccatctaactaatgaattaagtttagattgacaaagtgagcactcaagcatatactctccattccaaaatataaggcactatcatccttaacccaaagaccaagaaacaattattttcatctcttcgtttggatcactctaataaatacaattcatgcacctaataagattagagatcttgaggataaaggatttaaaaaacaataatttagttgagaagaggtgctagttaattatttgcatgcatgcacgccttgtattatgaaatatctgaaaaaaaaatggttgtgcctaatattttggaatagagggagtatatagcaataacaaataaaatagcttgcagcttgttatggcaaaactccgtatgttgctagcgctatttttggaagatcatagtgcctaaagttcagtgttattcgtgcaggatgaatcgaatgatgattcctagaagagatcctgcgattctggttctcagcactcctgatttgtacgtgcatgctgaagaacaaggaaagtatctgaagatgtctgatatctgcgcctgaccattttgcaaaacaatgaatgcttttttgggtgcttctaactttcaagcatgtcggtaattctggttagtcggcggcacatcctcaaatggtttgtgccagaggagtgtatgctagaatgattcttgcgctgatatggatttatagttcttttatgttcatacttctccgatgtgttgaactcataccgcagatccgcaatcagttccccctagcctgtccaaacttattttttgtggcatttgaaatccatctgaaccgcattgtcattcatattttgattaaagaatgcctgaagggaaaattagttcaagtgaattcccagcatagctgctgcggctgcttctttttttttctttattttttgaaatgaaactgctattatagttgtcgttggaaggcgtgttgaactgttgattgtccattgttggtcgttggaaggcgttgtccgttgtcgttgaaaggcgtggtcattcggatcaggtgtagttgggggcaacttcatgcattccactgcccgctgtgagatcgaatctaaggacattattcattcgatactataacagctactgtaggtcactgtagaagcgttgctgtagctataatctggtccgttcatcaagaaagctgatggataataattcatgttgtagcttaacttgcagtggcctgtgttgacgcaaaacgtgtcctctgctaacacacactg

SEQ ID NO: 4785 - DNA, 10481 bp, Oryza sativa
aaaagcatatcaaaagtcattttggtcttcctaggggctttagaagttgaagctccactcttattctccttccaaatgccaacctccggcttctttggcactatcgtcttaggccttggttcgccaatgaccactccttttcccttagtagattcggcttactccggccgaatcaacaccttcttatcattgaaattaattgtgttcaccagaaaaggatcatgatcaagcttcatcttggagccatcggtgaacttcaatcgtccttcatctatggccgattgaacctgtcgtcgaaacacattgcaatcattagtagaatgagaatgagaatcatgccatttacaatatgctcgacgtttcaactcttcttgagatggtatgacatggcctttaggtaatataatttgtttttcttgtaaaagataatcaaagattttgtcacacttggccacatcaaaactatatttaacctcactttgccgatctttgcgaggagtcggcattaggttagagcaaacaaaaggcttgtttttattagtccatgaccattcggcaacatatatatcatgatcaccttcctcctcactatcactagcctcagggtaatcaatcacattaacattaggctttttgtcatatgatctaacaagttttttattatccttaacccggctttcttgagccagagccctttgcataagttgactaacatcaagaaattgttggtgtcacgcccggaatttctatccaaaattccaaacgcttacatgtgtgtgaaccctcgtccaggaatcagccgaggcacataataacaaattgataatagagtacaattattactctaattaataagcgtataaaatgtcattacagaggtagatagttcctctcaaacaataaagatctaagcagcggaaaataagataaacggcgcagacggctccactccacaggcagcttgaccaaagctacacctaatcctccacaccatcagcctcattgtagaactcttcctctgatgaatgattgcaaggtgagtatatgacatactcagcaagccacgcagcaaatatgcaagtgcacaggataacaaaggatggcatagtagggtttcatttgcaaaagcagcatttagcaaacatttgagaatttagtaaaacagttaagtaattaaaccatattaatccaacgctatacaacataccctgttgtataggcccaaccattctgaacaaccatcccggctgcacagttctatctccaaaccaggaatgtaccattccaaaccaggagctaatcaaattattaccaattatagcatcatttactatggtgagaagtgtgagactaatcacgaaagacattgttagacccgcccataaccgcgggcacggctattcgaatagttttactctgatcagaggtgtaccactgtacccacaagacacaaccccacatcatgtcaccatgtgcctcaataccaccacggtacctcggaaaggagttgtgacaataccccttgcataacacaatccactgcagcgcaccttcctggatcataatcacccccttataaacaaggcatggactccccagcgacccccgtgggcttatctccgccacttctcagtctggtgccccgcaatgaaccatgctatacaaaagataaagccgttgcccacgctggcttgtggttggcacggttaatgtttcacaaccgaaactcgtgaaccggtccttaattgtcatgagcacgaccatcaaaaccatgtgctcacaacccaccattatcaggttttagttggcacattaattaattaaccaatcacgattgaccatcgtgaactatcattaagccatcattaagtaatagtgaatcttaagttatcccaatagtgagctaatgtttctaagcagggctaagcaattatatctaatatctagttgaaccaatataaataaagctcaactagtcaaattataataacccaaggtatcaaggaataaagtaatcaagaacaaaaagggctataacaaagaataggttaaacccacccaatgacatttgaaaataaatgcaatatttgaatagaaacagtagctttaaacgggatcaacatgctcaaagggttgtttgggatctgtgtgacttgccttgctggccttggaactcttcaaactcttctccggcgaaaacggactctccggaaacgacggaatctaaacagaaaagagcaaaaacaccaaaacaacacataaacaagcttgaacagtacatgtggatatttttaacatgtagatctcaattttagaaaaatttagagacttgaaccaactaaatcggagctaagatgaattagttatgaatttttgaagattaaatcggattaaaacacttatatagattttaattgaattatgacgcaataatgaattatttttgaaaaggaaaaggaggattattgcgtcagcgggctagggttttggtggaccgggcgcacggcggcggttcacgcgaacggacggccgagatcgacttgatccaaaacggacggccgagatcgaacggtccacgaccggctcacgggagagggcgacgatgacgtcgacgatgacgtcaccaccggcggcggcggctcggcggctcagacggctcggacggcgcacgctcgctggcgaacggcggcgcttcggcacgaacggagggcaccaacgggtagagcgcgacgcggcgaactcaccggtgaccaaaagagcagcggaagaccaacggacggcgacggcgacgaggttgaaacggcggcggtcttcggtttgacgacggcgacgatgctccggcggtctccgactgtggcgaagcagcggacgaggacggcgacgacttggcgaccacgacggcggttttcccgagcgacggcgacgtctggaacggcggcggcgcacggctggagcgacggcggcgacggcggctcgaagctacacggcgctagggcgcaacggacgaggggaggcgaaggcgagggtggcggcgggtagaggagacaccggggaagcttataaaggggctaggaggcggcggcgaaggcccacggcggccggcgacgagatggaaagctcgagctcggagagagaaaagccgatccgattcgaactcgaatccaacgatttccaaaccgatttagccgatgtttccaaaggagaaaaggtagaggagatctcggggatcatttcccctcttttgattcggccggagaaggaaaggagcggccggatttggaagggaacggcggcggcggcgcgctagggttcggccgggcgacggcggctcggggaagacgaacccccacctgtcagcgagcgagggcgcgcgcgcgcggcggcggactgggccggactgggccgaggagagagagaagggttttgggcccaaaagaagactttttaaaacctttttcaatttaaattatttcttaaatgtaattccatttattaaaaatacttccttagctcaaataaatcccagaaaaatctaggaattatagaattaagcaaagtatttaatgaaattttatctgggcccattttatattggaatttattaattaaaattagatcttctcttcaagacttttaaaaaataaattctaaaaattccatttaaacaacaatttatatattttgaattttcagggtgtgacagttggccatctagtctttctctaagaggagcaattaaaccattaaaagcaagaccagccaaatctctatcagttatattcaagctataacatcggtttctaacatccctaaatctcttaatataatcaatgacaggctcattatacttttgcttaaccgatgttaaatcacataacctaagctcagtttctccagtatagaaataatcatgaaatttttcttctaattgagcccaagtatgaatagaatttgccggtaaagaagtaaaccatgtaaaagcattaccggacaaagataaagtaaacaagcgcaatttaaaaggatcactattagcctcaccacattgcgccaaaaattaacctacatgctcccatgtggtcttactatcctcaccactaaacttggtgaattcgggaactctataattacggggaaacggcacattatcataataatcaggatacggctttttgtaaaccctagcacgattcctagtttcaattcctaataatctcactaattatatcctccatattattaggcccttgttgatttggcggtggatttggtggcctaataggttgtgtttgtggcgcaatatgattatattggctttgtctagtatcaggaggataccccctagtaacgtcattataagcattaggaacatgtgggggaacttggggattatttgcagtagtagatataggaggatcaaatgttctaagatgatacaaataactagcattagtcattggatctattccctgtatcggaataattgcgtcggtctgaccggcccagggcccggtctgaccggcatccagaggcgtggtcggaccagcctgagtcccggtctgaccgccggggtagtacccgttctgaccggctgtctggccggtcggaccgacggctatgttgcggtctgaccggccgtgtgcgtcgctccattggttctactacccgtttgatctataggaggttggttagcagtggtagaggccttatcctttgacatgtaatcggccataagagggccgaatttaacccttaaaaactcatcaaatttaccctcaaaagttgcatctaacttatctttaaaagcaatcatagatgaatctattgtagatgctacttgttgttggatagattgtgatacctcatcattgcttaccaaatcaggagcgagcttaggacgtggcccgggcttgatgatcacgccttgacgagtcctagtgcttgccctcatcaacgcctcccgtgtgagctcgttgatgtactcctccatagctttgcggtcttctccttcgaagtcatccaatgtgaccggtatcatattgatggctccacctccgtcttggatggcggcttcgtcatgacgaagtcgaaattgagttgacgatgaacggatctcctccccagcggagttgccaaaaatcgtgttggcaacttttttgacaagttgacaagcacgatcgcagcaccttaagccttgcggtgatcctagagtcgccaaccacctcgatctagcaaagagctaaacctagatgggttttgataactaaaccggctagcggagccgatttctaaataactacctgtctcgtgggcaaaacggaaggttttcaggacaaacctacaaagagatgtcgcactctcgcagcgtcggcagacggtttacggcgcaaaccgacaaagatggacaaactaagagaaaactaaaagcaatacgaaaaaacgattcgattgattgattgtagattggttttttacaatgaaccggtcatgtcccttatataggggttggtcttgccctctacaggccctcctccacgtccaacttgaggtagaaaccaaacgaaacccgaaacatgccttcccgagcaaggaaacctcgagacccgacaaaacacaatcggactcggacctgccggtcagactggccacacaccgccggtctgaccggccctcaaccggcggtctgaccgcccaacacacggcggtcagaccggcccactcggaggaaaccggtagacttccaaattttggcaatctttcctattttaatcctaggtgccaaatttgggtttaaacacatgcccccctgcctttttgatgaacaacgtgaatctaaaagcatagaacatgttttggtcttaggacgataatccaattaccggccatagtacctcctaagcgtcttgccaaacgctcgggaagtatttcttcaaatatttcccgttgattgctcgctgaaaatgctccccttgaagtgtctccaaaaaatatgcgttccctcgaacaatgccgcacactcgataaggaccctcccaactaggagaccacttaccgaactccttggaccgagtacccaaaggcaaaattgtcttccaaaccaagtctccaacttgaaacaactttgctttcaccctcttgttgtacgccttggccaccctcttcttctctttctctatctcttccaatgccttcaagcgcttgtcgatgacttcatcaagattatctcccatcaacgtcttgtaatcttcacttgacaaatcattttgcttgatataacgaagagaaccaagatttacctccaccggtaaaatggcttcttgaccataaaccaactcaaaaggagtgactttagtagcaccatgtttagatatcctatgcgcccacaatgcttcagaaagcacctcatgccacctctttgggtgttcctcaatcttctttttcactaacttcaacaatgtcttattactcgactcggcttgtccattagcctgagcgtagtaagtagaagaactcaacaatttaataccataagattcggtaaaactcttcacttccttagacataaaagaagcaccttggtccgtagttattgtttgcggaataccgaatctatgaataatatacttcaaaataaagtcaattacctccgtatgagtcatattcttcaaaggcacggcttcggcccacttggtgaagtggcttcggctcacttggtgaagtaatccgtagcaactagcacgaacctatgcccctttgatgacgaaggataaatttgaccaatgaaatccaaagctcatcatcggaatggccatggtttgattatggggttcaacacggcggcaggcgccaattgaacattgccgaaccgttgacaagcttcacatcctctataatatttgaagcaatcatcaatcatcttcggccaatagaactccgctctcctaagcaatcaattcatcttgtgggccgattgatgagttccacaaattccttcatgtacctctcccatagccactttagattgatcttcatctaagcacttcaacaagacaccatctatatttcggcggtataaatcctcatcaagcaatgtgtatttgaacgcttgccgcagaattttccgatcaaccttaagtgtgggatttttcaaatatcgaatcaaaagaattctccaatctccttctgcttcctgggcacaaatgtccgaattcacagttaattcggccactatattgattgaaacgtgccccccagcgctctgcccagaaccggtcagactggccacacagggccgttcagaccgctcagagtcgccggtcagaccggcggcatgcggccggtcagactgcccctggtcaccggtcagactggccgagcaatgccggtcagaccgcccctggtctccagttttgccaatttcgcacaaagatttaaaatcaagcaccggctcttctaatatcagaaataatcccttcttcacattatagccagatgcttgttgtgccaaattatttgctctagaattatcatgcctagcaatatgtctaatagcaaaattatcaaaattggcaataatatctaaacatgaatcaaggtacctatttagtgatctgtccaagcatttgtagactccggcgacttgttgcaccatcaattccgaatcaccaaaagcctccacgtatttagctccaaccatctccataacttgtaagccgaacaataaagcattgtattcggcttgattatttgtacaataatactccaaacgaaccgatgcttcataacacatgctattaggtgaaaacaaaactacccctatgccttgaccttctttgcaagaagaaccatcaaaataaatcttccaaggtataacttcaactaagccaacttctccctcataagcaatatctatatgatggtccactataaaatcacatacaatttggcctttcatagatttcaatggttcataagccaaatcatatcctctcaaaagctaacctcaaatcggctatgtatccctccataccatccgatttgacaacaatatcatcaatgtagatctctaagataatgcctagcaaatcatggaagatcaaattcattgccctttgatacgttgcaccggcgttcttcaacccaaaagtcatgacaacccactcaaacaaaccaacaaatcccggacacctaaaagccgtcttgtacatatcctcttccgccataaagattttattgtagccggcattaccatctagaaagctaatcaccttatgacccgaggcatcattaatcatcatgtcggctataggcataggatactcatctttgggagtggctttatttaaatctcaaaaatctatgcaaactctaatcttaccactccccttcttctccaccgggactatgctagaaacccactccgcataacgacatggcctaataaaccccaccttcaacaaccgatcaatctcctctttgactcggtcatatagcaaaggattaaaacgacgaggtggttgcttataaggcctaaaacccggtttaattggaagccgatgctcaacaagctcacggctaagacccggcatctcatggtactcccatgcaaagcaatcaacatactctttaagtagctcgataccttaaccttataataggctctcatgtttttgtttacaaaagtcggccttggtttagttccatcacctatatctacttcttcccaaggatcggccgatgtaaacccttttccaaacttctctacttcatcaaaatcttcaatggtttcaccaatatcgttctttgtagaccgatattcttgcaccctcttttgtaaccactctaaattagcctctttactcattatacaaatttatatggcttagccgtgctacactagccggctttacagagataggtacaaatttgccatcggagatactaataaaatcatagctagaaagatccctccccgacaagcattggatattcccatgacgccactcaaaagtagcatcggccattgcaacctcggtcgatgtatccgcttgcacaatttcaacatcattgccgtcccattgaattaaacattgatgcaaggtagaaggcacacaacaattggcatgaatccaacaacgactcaaaataacattgtagttaccttgcacatcgacgatgaagaaagcggttggtagcgtcttgtttcccacggtgagctccgccgaaaagataccctttgcctccgttggttcaccattgaagccattgagaatcatgttggtcttcttcaactcatcatcctcacgccccaatttcttgaataatgagtacggcatcaaattcacggtggcacctccatccactagcatcctagagaccggcttcccatcaacatggcctttgagatagagaggcttcatatgacggtttgattcatcgggcttctcaaaaaccgcatctttaggacctaatgaaagttgagcaacctcggcttcatccatagcacaaaactccataggcaacatacaaaccatgttgatatccatgtcttcttttggagatgattcacttttatcaaccgattgtttctccttctcttctacatcaaccggcttttccttctctatggatttatgcctccataccggtggtggtcgcaactcattgaatcttttatctctttgttcttcagcctttttctctcttatttcttgagcccgaagacgttgcaaccttctcttttgagtagccgtcaaatccttaggcatccatctaggattcggctctgttccaggaggtaaataatgtcccctaataattttgtttgaaaacgatgaagccctcacatcgccctttgcaattctcctgttaaaccggcgctggagcccggttagaccggccgtagaccaccggtcagaccgaccagatgcgccggtcagatcgacacttggcgaacggtcagactggcctgaggcgtcggtcggaccgctgtcgggtcggcggtcagaccggcctgatggcccggtcagaccggccgcatggctgcggtcggaccggccagaaggcttggtcagaccggccgactgcgaggagctggtttcggcttcggattttttgtttgaagatactccaattccatctccagaaggtattggcacatcatgagaccccactttgatggtaattacttctgaagtccttgcctccaccttgatgcgctttccttccctcctttcttcattggcccggttcctgccataaaaccggccattatttggtgaagacaaacgctcatgaattggccttcttgatcctccccacccttggttgaattgcattggaggcatatgattgaacattggcggcgttgccccccatggcatgtaataaggataaggataacccggcggctgcattggataagaccccatgacatgtcttgtggatgatgatatggaggtgaatgcgaccgtcttggtgaa

SEQ ID NO: 4786 - DNA, 2466 bp, Oryza sativa
aacagtgagtgccgtgtgtgttttctgcattcctctaaattgacacaaatcttaattcatttgcagcttttaaatgatcgataattggttggtcgcatgcttttaatcacaaaaaaacaaatgcacagtttttgtttgttgaagactacagtatcaggtcctgtttggatcaccctgtcacatcggatgtttgacactaattagaaatattaaacgtagactaatgacaaaatccgttctataaccctggactaattcataatatgaatctattgaacctatttaatccatgattagcctatgtgatgctatagtaaacatgtgccaattatggattaattaggcttaaaaaatttgtttcgcgaattaactatcatttatgcaattagttttattattagtctccgtttaatacttctatttagtgtccaaacatacgatgtgatacggactaaaatttagtctctggatccaaacaccacctcagttctcaataagtacaattttcatttgaaactctccttctgatggcagatgtgaattgaagtccgttgtatagaaaatggctaacatttcgaaatgatttcatcaaaatattgtgcataacacagaaagaagttagtaatatatgtttatctatattgtagttattcacttggtaatgattaggatgttactttacataagcagtatgtttgttgttaactaacaagaacaatgttttcttcacgccatgacccatgatgtgctggggaatctttgatagtacaaaggatgagcatataactgacttttgatgtctgttgtactcatttcgtactatgaactcctcaaatactttgattagatttgaacatgcatcttcatttttttcttatggcgattcctatattaatttatgtttaacataaattgagaatacttaattagaaaaaacctgaagtgctgacaagcttgtgccaaatggaaacaaatgaatgaaactatcccagtcttaattctgaagaacggcctgcacaggctttacaaaattcagataaaaaattatagtaattgtagcagttaattagaaatagtaaatgtactcagtggcaaaaaaaagaacagcaaaacttatagtagtagtattttgaccaactaaaggtaggaatgtcatgtctccttaatcatggctgtaagttgctggttgttcaacatggaataaactttgcaggatgcacatggcaagatctgagatttttgtttctttattcgataatgatttgaccctcctccagaatttactctcttttatcgggaggtttctttcagatcgaagaagatctggacatgctgaaacaaagctgctctgaataattattaggtaatgttgagtcctgggtaatagaaaaattcagcgatgaattaacaagtgttttcaggcaggcagtagcaaccttgttctttgtgagttcacacataagtgagatgaatcaaccaagtccatggttcttgtatataataatcttgagagatttggctcctgatcatgcagttcattacttctcatgatctcctcacatggcagagaaaccattcagaaagaaagcaaaatggattaaactaggcacgcagattgaatcaaccatagattgattcagtcaaaggacaagcagctatatttttctgtattctagttttggtataaatcataagtaatcaattgcttgagtaacatattagtgctaacgaatcatggttgctgattgctgttgcacatcatgacacgctttttctggatataattttggataattgcaaaataaagtttgaggagaccacataaagaccccaaaacaagtaatcctaacttaatatatgtatacttgtttgcactaaaagtacaatgatggtacattgctcaattattcattaaaaaatgagttttcttatgaagaaacagcgttggaattgagtacaaagttgacgatttacaggcttttgaaattcttgcatcgacagacatgggttccaaccaatatattgactatgttaaagaatagtccctccgaatttttttttatagttgttaccaagcatttatttcattcatttttttaaaaaaatctaaattattaaaaaggtgtgtatggcatgttaaacataaacataagtattaaacttcagttcatcataatctattatttaaaaattattagttatcaaagttgccaccgtagtagttaacggcgataaatataaagaaatggagggagtactttgcaattacatatactactttcaaatctcaattcgtcttcttttttactctcagcaagtagcagcatggggagctactggaataacggatcctgaaatattcttaactttagttctaactaacttacaaagtactcaattgatcagctgacagcgatcgatttgtgagtaatttttctctaacagcagagtgatctcctaaaaggt

SEQ ID NO: 4787 - DNA, 4605 bp, Oryza sativa
caaccaaataagataagttttcaaatcattgcaagtttatgttcttgattgagcacgattattggacggctaacaacatgattgtgactttgtgatttattttagctctgaggtactgatgcatgcattgccctaattacaggtaaatcttttattcaggtaattatgttatcaagatagttaattaggcgccataatgtttttttgtataattttgtgatcactacattttacctgatatgacttgagatatagttttgagtttggtcattaggtaggctaaacaatgcgtaagtcatcaacctcttcttcagtaaaatatgtttatctaatatattctactcctacaattgcgttgataattgccatatagtactagccattatgcaactaaaacaggggcaactccttacgtgtcaccaagcatatatagttagtttttagtgccttgaaaggaattcatcaaaccatgagtggcaaatcaaattgtgctcagaagagcctcaataaacttctgctgatctgcactctaggcagctaatctttgatctgtatacttcctgcatttcatccacaacttttgtttggcatgtggtaattaagaaaaacaaatgacccaattaggtgcaatcagcacaagtaccgataaaagaccatgttaagataatttcaacatcctctggtgttgcagatcacaggacaagatcaaagatccattcttttcttttcccggtgaagatcaagatctgctgaaaaagctgaattaaacaaaaggcaatcaagcagcacacgaagtaataatttggcactactaagctgaataaagaaaggtaatcagcacacgaagtaataatttggcactattcatttgttcattttcacacgctctgagcacattatcctcaaccctgctgcctttttcttttctctctttcctctttttcatgtccagatctgcattctgatttgatgacatacgaaatgtgaatcttctgatctatgggatggagtggtgaacagaatttgaggaaaatatggacgggcacacggcactacgtcaaactggttggcaacttgtgatcatctgaacaattgcaacaggagtgtacaatatgattgcaaaatcacggtctctgctgccagtatatccatattttgcaatgatctaaatatagatgacaagatggacccgaatatgccatatccaggtgtgatataaatggaagatgtacacatttgctgttactgtagtaaatcagatcgagatcaagaaagaccataaagaaaccaaattaaaactggatcattcagctttgcaggagtcagcgtgaccttgtattccttgtttgtttagatcaaacattatttcgttaaatttgaattgttacaatactctctggagaaagtttacttgtaaactaactaattgattcagcatttgtagaaaaatatgaccgtattgttggagccaaactgcggaaaagtagtacagttctcaggagactaataaatctaacttcagaagaagaggaacctcaacatatctcaatgatcacatttgatccatgccagctcaaaaactatgcagcacgagccgtagcttcagacccagtgtactcatcaggcctgatgaacacaaaactttggttagtagttgattatatggggagaaaaaaaaagcaatgaagaattagggataggtcaaattaaactgaagtcggatgagaaaattagcaagaaccataaagttacattgcaaacaattgatgtctaaaagaagagattgctttttttatgggccatcagtttgtttggtgcatctgctgttaaaggacaagaaggtttatagtgcatatgcactactgcaaaagattaatcagataaaattaccatccaccccaccaaaaccccaaaaaagctcaatccattgttgttgtgacaaatatattgtacctttgaactccttcaccaacttcctttgacaaatcattcaggacgctctgaaaatattgacatcaagaagcaaaaccattatgtaccatgaattcacaattcaaactagtacataattataaaaaaggaaaaggttttatcagttcaccttgatgtttgtgctatcgttgtcaacatttttgctccaaatgcacaacttcttcaaaatactttcttagtcggccttccaccattttctccatggccatttgggatttcctggagctttcagcctaaaaagtttcatagtagcatgtcattaaatctcacataacttgcatgcagttcagtcatattctggatggatgcagtccatgtgtccccagaagatgacaaaagatattgctatttaattcatggaaaaataaacataactggtatcataaacttctaatgtgattcacattgtgttccattgcatagctcatctctgaattttaacagcccagctgtcttgcttacataaacataaaacgatgtgacaggaatactaattccattgtgagtcaacagtttcctttccttttcttttaattataatgagttaggacttgtcgcaagatatgcatttttctctcaactataggtcattattgcccatgtctgttgttctgttaagataacatcataacacttcgtacggtatgaccttatgatacctgatatctcacttaatatgtaaagcacacgtccatttctgcaattgtaagctaattatatagaattacggcgatgctaaatttttccggtgcaaagaaagtagcatttgtcagaataaggtacttgagtccggagtatgcccctctcattttcaacagctgaagcggagaccagttcttttgataaaaacaatggttttgttgcaacgatatgcattgcaatagatttcccaactctcttaagagcatcaaggggagcattgctgtcttctgcctctagtgtgatcaagccagcaagacgacccaacccttatttcagaaaaaaaaaaactcattcattcagtgaatgagaaattgcaccatttaccatatatcaaatagaacttcataattctgacgaacataaaatatggattgctggtaggaatcaaattaataacgcgagcaagcttagccagctcagtgtaagaggcaagtatcactaaaatcatattactaccaatggttttacaaaagtaaactatgagcttgcatcctactaaataaattttttaaaaagctaaaattcatcactggacaatctaagagaatagattaactacaatttagattaaggaacataatgtccagaaagtccaacaaatttggatttctgaaaaatgaacccaaaagcaccacaactcattcactattgccaaatactagtaaggtgcccattgcaacagcttggtggagggcctcgtctgcacaagtaataggatcacttctagctatgttaattaggagcaaggccaactctgcccccaactgatttgtcgtcagtgagcccccctgatccgagtgttaaaccaaataattcatccaactattgtaatcataaattatgcatgcaaaataattgtacatgccaatcaaggaccagccagcaaagtaccgattggatggaaaagcagagtttcctttgtcctcccctcccacccattctgtgcagtgagacccatccttcccggtagaaaatctagtataaaaaatcaaaatagcagacccagccccaatgcaacactgaggtgttaaccatgcaaccgccatcgccatcttggctgtcgtgtctagggatgtaatgctgaggatcgaatactaacacacacacacacacacagagaggattgcccatttggtctttttctgaaccagttttctaatggaagagttgggtctcgcgctgtgcacgatcggtgggagacaatagtccactttttagagtagtagagatgcaatgtaattaaataaatgtagatctaatgctgttataaatccaaaatcattatctctattccactgatcttattcataggaaatgaagaaaatgtagtaataattagatcagcaagcagtaacttactaccaaaacagaagacaccacccaggcaccagaggtagaagtaccaattcccatctccccttgagcacagcacttgtgccttcaaatccaacataagaatttgattaaatgacaggaccaaaatctcatatagagatgaaatagtcagggaatttaccatatttatgttgaaacaagccacaatgtcctcctacaaatttgaagttacataaaaaaaattgagatgcaaatcaatacaaaaagaacattgaatagttgacaggaaatacactcaaattgacaagaaagattggttctatcgacaggcaaaatatcacacaagctactacttcagtaaataaagttgattgatacttgagcgttgttgatgcttttacacaaaaaaaaagagtattgtagatacaaatatacaataactaattgctctgatccttcagaatcagtgctgcttatagttaaaaaaaatggtccattaagatatcaattaagcatggtcatcaactaaggctgagttcgttttgagggttcccaaccccactccctcgttttccg

SEQ ID NO: 4788 - DNA, 11886 bp, Oryza sativa
tattaagtatttacaaaagctgaatgtttctttgtcctaccaaaaagttgattggtttttcatgatttctgactgatgttttctatttatatgctaatctacaatgttcttatctgtatatttcttatgttctttctgtagaggaatagatttggcccattggaaagagcagctacaaactgaagcagaaccagccaaccttgacaagtttgttgatcatttgtccgagaatcaattattccctaacagggttttggtggactgcacagcagacacaagtgttgcatcccactattatgactggttaaagaagggaatccatgtcatcacgccaaataagaaagcaaattcagggccactggacaaggtaatttttttgcctatcagcaggctttgctatcaaataaatgcatatgcctttttatttttaaatagttgatcttcaaatgagcatatattttttatgactgatttattcagtagaacatggttaaacatattgatggaactagacacatgtcagctttgtatggatgtgagaagagtcatccacagtttttagtacagttgaatttacagtgctagatataattggttgcctttattgactaatgaacttatttcccctgctgcacagtatttgaaacttaggactctacaacgtgcatcatatacccattacttctatgaagcaactgttggtgctggccttcctatcattagcactctgcgcggtctcctggaaacaggtgacaagatattgcgtattgaggggatcttcaggtcagtttgagcacatgattacattgtgtggcatatcaattttcatatgctattataacgcatgggtggagtaagatacttaacagatacttttatttagtgaatttagtgtgatgctgcctgataatatgctctgctgattgttcaactgcagtggaacattgagttacattttcaacaattttgaaggaacaagagctttcagtgatgttgtttctgaagcaaaagaggctggatacactgaacctgatccaagagatgatctgtctggaactgatgtagccagaaaggtacttcttccatcataggcttatcaacctacataactatacttcctattgactactctgcataacctgcttctattggtggttttgagtaacacgtcataagagatggaaaataattttatgtgccttcatgcttcaggctactctaccaggctcctcagtctttacactcttcagttgtatatctgtcttttcttttttttcttttttttttgcggggcagtacatatctgtttgaatggcacttaggttacactgttgaaaataaataaaagggaaccacagtgtaggtactgaactggaacaaattatatttttgtttcctcttgagcctaatttatcacaacttccttatctaggaacaaattgactgtctatgttttcaagatataaagggttcactcatggaccttggtaacttgagtttagttttcaccctaaatggtgccttttcacataggctgcttctattggtggttttgagtaacacatgacataagagatggaaaataatttcatgtgccttcatgcttcagaagacagctatagaaaccttgtcaggctccttttttcctttctcctctttgtgccttatctctctttctctctctctctctctctctctctctctctctctctctctctctctctctctctctccctcttatctgccttagctgctccttgccttggctatacaagcagcctctcagttggccagaaaccaaggctagatttgctcaggggttaatgattggggtactgatgattggagtaaaaattataagaggaaggagaactgagagagagaatatacaccgaatatttgatggatgaattcatgaatatttgctcaggagttaaagacttgcatgattgataggtgcacaatattgaattcgtttttcactatgctatcttctctatccttttcagttttttttataatttaaacaatatatggaagaacatcaatatttcacacttgttttgtgagaacatttattctttgttcaattggttttttttttttttgccaatcaattacttttggaacaggtaataattcttgctagggaatctggattgaagcttgagctttctgatattcctgtaaggagtcttgtgccggaggcattgagagtaagattgcatccttcttgacgactataccttgatattaacactctaattagatttctgttatgcagtcctgttcaacagctgatgaatacatgcaaaagttaccatcctttgaccaggactgggcaagagagagtaaagatgctgaagctgccggagaagtaagtagatctgtttccatgtctcaaagtaaccgttattgtttgctgatattttcatatcacctcatgattacaaaccatgctgtatttcaataggcttcatattagttgttggttcagtacttattgttcgaaatttatgatagaaagcctgctgaaattattatatgtattatatgttgtcaaaatgaagggttaatattatcatctatataactactgattttcagtaaacattattctgatcgtgttgtcatttgctctgaatacatcaccatatacttctccatgcgagattccaatctaagggactagtctaaaccatctattcgtttaggttttgcggtatgttggagtggtggatttggtgaacaaggagggcaggtcgagctgcggaggtacaagaaggaccacccgttcgcgcagctatctggctccgacaacatcatcgccttcacgacgtcaagatacaaggagcaaccgctgatcgtgcgaggcccgggcgccggtgcagaggtgaccgcaggaggtgtcttcagtgacatactacggctggcctcctacctaggcgctccctcataagctttgtagcaggaagcattttctgatggtggtcaagatggctttgaatcttgtaaggttgcctggtttcttcttctcttttcctttgcacaagcattctaaatcacagtgaggaaataagcctttgttctgtagtgatgttcgtcaagggcaataggtaggagttgtgcaggtcttgttggaaaacaattcttgttcgttgcaataatggtgtggtcgtcaggtttgtttttgatggtgacgctagtgaggtgagacggcattacaagtgaagaatcaataatgcaaagcttcgaatcgtgatgatggaagaaaaaaaaaatccaattgtgcaatgctgcgtaagacctgaaaggtggcaatgtctctgggaccgattcgatcgaccttggaggttcactttacatgtcttacgacctttaatcctgcagagtttggttacaaaagggcttgggattgaattagaatccattggttcctacatgtcttactacaccaacaatcattaatcacatctcaacctaatactagcggaacaggagcatgatgattcctaaaccataggttactccatgttctaaacttgaaatgagctcacttggttagataaaacggaggtaggttactccatattctaaacttgaaatcagctcacttggttagataaaacggaggttgtgcattaagagactcgaagcggcatcatgctggtcagacttcagagagaccggcgtttgtacaggaactgaagtaggatagtgtcatgtgtcttgaattgaagtataaataaattgactgtctgtcacttactaatttgagtggaaggcatataccatgtatggttttttatgacgtggagaagagggaatgaggagagggagaatagtgtgtgtgtgtgtgtgtcattatatacccttatactatgtattatctatatgatcaaatcattaattacacgaatctcctatagacaactaatttaattaggcgcatgcagctgcagtttctgtgtttttctttagtgtagagggctaacatttggcaaggggaaatgatgtactaatttttgttatacttttacatagtttcagtacttatttggcaaggtggcaatatcaaacttttaactcactactacacaaaaaaatgttgttatagttaatacacgaaaaataataaaatattaatatttgatacattgacaaactaaaggattatctttttttgagaaaaagatgttttttagaaaaatatatatacttttacatatcattagtaatgtcataactagaaaaactaattatcaaccatatgtgttaagctttcctaaggaaaaccatagatatgccctaaataaaaggaaaacaatagggttcccatataactaaggctgcatcctggagagaagtattctccccgcatacgaaaaatgaaacgcctcatttgtgcataattgattaagtattagctaaaataaacttaaaaatgtttattataatatatttttttcaacaacttgcccatatttttttaaagaagctgtttaacgcttcgtaaaacgtgcacgtaagaaaatggaagggtgaaaattgggaagacggagcactgaaatttatagctacacaagttttccgttccgcatatattatacagatgtatgatgtaaaaataattatattctccattcatatcaaaataaattaatctaggattgggtggaaggtcattcaacgaatctacacaagtcatgggctttgtttggaaagagctcaagatattctaagaagcagctgggtggtagctaacttctgataatctggaaaatttaggtttcttagcttttggcttctagttcttttctggattttataattatagcttattagaatctaaatgaaaagctgaactgtttaggggagaaactgtaactgtcagaagtttcccaaacaaaccctaattggtttatttcggaacagaaggagttgatagcaactgtttgaaccttttatgcccttaaatgccccctaagggatctgtgaacccctacactttttagagattaggctcatatgtagtttggttcatattcaggtttggatagaatatgattatccatatttgcaagtatatggtgatcctgttttttagttggttgaatatgaccatcattatttttttttgttagatggatgagaatggatagaataaaaacaataacatattaattaataataaaatatgttaattaacaataatataactataatatatactaattaacaatgaaatagactaagaggaaaagagaaaattgagaagatatgcaaaacgaggtgagctattagcacttgattaattgagtataaactattttaaatttcaaaaatagattaatatggtttttaaagcaactttcctatagattttctttttgcaaaaaacatactctctctgaaacgtttcaggttataagacgtcttgacttcggtcaaagtcaaactatttcaagtttgaccaagtttatagacaaaaatagtaatattcataatactaaattaattttatcaaatcaatagttgaatatattttcataataaattttttttggttgaaaatgttactactttttttctacaaacttgatcaaacttaaagcagtttgactttgaccaaagtaaaaacatcttataacatgaaatggagggagtaccgagggagtaccgtttagtagttcgagaaacgtgcgcatggagataagacaaatctcctctcaatgtcctgctgccaaaacgcaggttctaatcaacactaattttacaagtcaactactaaatagcaacaaaatacattttgctaattaattgctaactatcaagattaataaaggttgatatcctcatccagtcaatttgactagatatactcatccagtttctttgtgaaatattttctttccgtttaatcccatcatttccctatttcccaccatgtaaggccgtgtttagcttgtgtaccaaaattttttttaagtatacggacacacatttgaagtattaaatgtagattaataacaaaataaattacagattccacctgtaaactatgagatgaatttattaagcctaattaatctatctttagcaaatatttactgtagcatcacattgtcaaatcatggcgtaattaggctcaaaagattcgtctcgcaatttacatataaactgtgtaattgatttttttttcgttcatatttaatgctccatgtgtcaaaatatttaatgtgatggaatttttgaatgtttgaagtaactaaacactgcctactaaacacactgaaaacctggatcaccatctttcatccaaccaaaaacaccctatagcagcggtcggggcagggcgaaaaggtggtcgcgttcgtcggccaaaagccaaagtttgaccgcacaaaacagcgagtctacaagcagaagaaagaatcatcgttgctagctacctgtacccctttaaatttgccccagcaatttcagctcaattttggatggatgcgcccaacttacttcgcgtctacttcaattcgcaccgccattcttcctctcagcatagctaaagctagctcagcatcgtcatgctccaaatttagtccaagatgaagtctttccaaaatccatttgttttgtccaaagaaatctttgccaaaatttttctactagtataatactatctcctgcttcggttgctcttgctcgcttagttaaataatactaaggacagtattctacttggccgccttcttcttcctcttcgcctctacctgctgcatgccgctttaccccttctcgatgcggggttggattccgacgagatacttgagccgacgagaggtaatctgcttctctcgccttctctctccgttgtaatatgttctttgtcctcgatgtgtttccgattttgcttttcgcggcaaaagactttcggtgttgctttttgcgagggtttgtgttagtgttcttgatgggaagattgccgggttttttttttttttgctgctttgcttagcactttttttttatgatttcttggacaattttggagccatttcgtttagtttgagttctttcggtgtttttgacgcctgtgaggtttcttttattctctaaaattttcgccgagtttggcgttctctcccaattgtttcttcgatattttcttgaagaattgaactgggtaatttcattaagattgaattcggtgcgaagtttatgtcaggttgttgcacacgaatgatttttttttaaattttttttgcagtttgattcgaatcgaagctcctagtcttctttaccatgtgaagaaatcaactggttcagcatcaagaagcagccatggccgccgttcgcgtggtggcgccggcgccttcggtgctgctgcttgtggcggcggcggtggtgctgcttcacctggctcgcgccattgccggcgcggcggacgaggccgcggcgctgctcgcgttcaaggacgcgtccgtggccgccgacccgggcggcgcgctcgcgggctgggccaactccaccacccccggctcgccgtgcgcgtgggccggcgtctcgtgcgccgccggccgcgtccgggcgctcgacctcagcggcatgtcgctctccggccgcctccgcctcgacgccctcctcgcgctctcggcgctccggcgcctcgacctccgcggcaacgccttccacggcgacctctcgcgccacggctcgccgcggcgggcggcgccgtgcgcgctcgtggaggtggacatttcgtcgaacaccttcaatgggacgcttccccgggcgttcttggcgtcctgcggcggcctccagaccctcaacctgtccaggaactccctcaccggtggcggctacccgttcccaccgtccctgcgcaggctcgacatgtcgcggaaccagttgtcggatgccggcttgctgaactactccctgaccggctgccatggcattcagtacctcaacctctcggccaaccagttcaccggaagcctcccggggcttgcaccttgcactgaagtttctgttcttgatttgtcatggaacctcatgtccggtgtactacctccaaggtttgtggccatggctccagccaatttgacatacttgagcattgccggtaacaacttctccatggacatctcagactatgaatttggtgggtgtgcaaatctcacattgcttgattggtcatacaacagactacgtagcacagggttgccgcggagtcttgtcgattgccgtcgattggaggcacttgacatgtctgggaacaagcttctgtctggtccaataccgacgttcttggttgaattgcaagcactgaggcgactctcactagcgggcaaccgattcactggagaaatatcggataagctgagcatcttgtgcaaaacgctggttgagctagacttgtcaagcaaccagctgattggcagcttgcctgcaagttttggacaatgtaggtttcttcaggtgcttgatcttggcaacaaccagctctctggggacttcgtcgaaactgtcatcaccaacatttcttctcttcgtgtgttgcggctgccgttcaacaatattacaggggcaaatccactgcctgcacttgcttccaggtgccctctgcttgaagtcattgatcttggatccaatgagtttgatggcgaaatcatgccggatctgtgctcatcattgccgtcacttcggaaacttctcctgccaaacaattacattaatggaacagtgccatcatcactgagcaattgtgtcaaccttgagtctattgaccttagcttcaacctgctggttggtcagattccaccagaaatattgtttcttctgaagcttgttgatttggtcttatgggcaaacaatctctccggtgagataccagacaagttctgcttcaatagcacggcattggagacattggtgataagctacaacagcttcactggaaacatccctgagtccattaccaggtgtgtgaatctcatttggttatcacttgccggcaacaacctgactgggagtattccctcaggattcggcaacctccagaatcttgccattttgcagcttaacaagaattcactctctggcaaggttccagcagagcttggcagctgcagcaacctcatctggcttgacctcaacagcaatgagttaaccggcacaataccgccacagctagcagcacaggcggggctcatcaccggagcaattgtctctggcaagcagtttgctttcctccgtaatgaggctggcaacatctgccctggtgctggtgttctgtttgaattcctagacattcggccagaccgccttgccaatttcccggctgtgcacttgtgctcctccacaaggatatacactggcacaactgtatacactttcagaaacaatgggagcatgatcttccttgatctttcatataacagcttgaccggtacaattccagcgagcttcgggaacatgacatatcttgaggtccttaacttgggtcacaatgaacttaccggtgcaattccagatgcattcactgggctcaaggggattggtgcacttgatctctcacacaaccacctcaccggtgtcatccctccggggtttgggtgtctgcatttccttgcagattttgatgtctccaacaacaacctcactggtgaaatcccaacatcagggcagctcatcacatttccagcatcccggtatgagaacaactctggactctgtggtattcccttgaatccttgtgtgcataattcaggcgcaggtggtctgccccaaacttcttatgggcataggaattttgctcgacaaagcgtgttccttgcagtgacactctcagtgctcatactgttctccttgctgattattcattacaagctatggaagttccacaaaaacaaaacaaaagagatacaagctggttgctctgagagcctcccaggatccagcaaatcaagctggaagctttcaggtatcggtgagccattgagcatcaatatggccatatttgagaatccattgaggaagctcaccttctctgacctacatcaggccaccaatggcttttgtgcggagacactcattgggtcaggagggtttggtgaggtttacaaggccaaactcaaggatggtaacattgtggctgtcaagaagctgatgcatttcacaggccagggtgaccgggagttcaccgcagagatggagaccattggcaagatcaagcatcgcaaccttgttccattgctaggttactgcaagattggtgatgagcggctccttgtttacgagtatatgaagaatggcagcttagatttcgtcctacatgacaagggtgaggctaatatggatctcaattgggcaacaaggaaaaagatcgcaataggctcggccagggggctagcattcctccaccacagctgtgttccacatatcatacaccgggacatgaagtccagcaatgtgttgcttgatggaaactttgatgcctatgtgtcagactttgggatggcgagactcatgaatgcgctcgattcacatctcactgtgagcatgctttcaggaacacctggatatgtgccacctgagtactgccaggatttccggtgcacaaccaagggcgatgtgtacagctatggagttgtgctcttggagctcctcacagggaagaaaccgattgacccaactgaatttggtgacagtaatcttgttggctgggtgaagcagatggtggaggacagatgcagtgaaatatatgatcctacattgatggccacgacatctagtgaattggagctctatcagtatctgaagattgcttgccgctgcttggatgaccagcctaaccgcaggcctaccatgatccaggtcatgacaatgttcaaagaatttcaggttgactcgggcagcaatttcctcgatgacttctcactcaattcaacaaacatggaggaatcatctgaaaaatcagtgtaaatgcttctggttcttgcagattttgattgttaatggaatgtaagtaaactagtttaatcattttaacttacaggaaagaaaagtagccccttttggtaggtgaatttgcagttttggtttcagtcaatgtacataatacacaataacaggaagagacacagacacaattgtaggcttcttttgtgtagaagattgcctctttagttgtagagccaagtatatatatcttggaactaagttcccatgcttgtacatatgttttcctactgagaaagaacacaacacaagcttttgtaagttggaaattgcttatgttatgacatcgttctgtgatttgcatggtgatgttgcaatttttgcctactgtttgaacaatttgcttaaaaactgaccatatttgtcctttttcgtaataaataaaaatatgttaccacgtctatcttcagctctgattgattctttctgctgacaagcttaaaagaagtgtcttaaatctcaccatacactctgcagtaagtattttactatttcccctttacctttcgtttactgtagcaaataaaaaatttagataatagcaaatcaaaattattactgtggctgacatcttatttcttttagaaatcataaacttcatatctgctattgtcatcaactgttagtcttgttgacaatacattacagtgttagattttggttgtcatatcttgacaataatgaatggcatagtgaaggcatcatttccatgtactaaattttccaatctattttatttacaatattagttaaaacagattttgctagatttggttatttgttcctaatggtagttgttgacaaaatgataatcgtaatttgatattcgtaactcattcaccatttgcatttcagattccttga

SEQ ID NO: 4789 - DNA, 7765 bp, Oryza sativa
acgcgggggagaggcggcgacgtgggagggggacgcgggagcggcgcggcgtgggcgcgggaagagcggaggaggcggcgacgtggcggattcggcggcggttgccgtcggaggcgggtggctggaggaaggggacgacctgacaggtgggccccacctgtcagcgtcccggagagaggaggaaggagaacgggccggcccacaaggggaggccgagcgcgggcgacgggtggagtggactgggccgacggcccaatagagaaaaaggaaggaaaaaaaaaggaaaaagaagaaaggatttttcctgggattaaaaattgcactttggtgatttttaattggttaaaattatttccaaggctctgaaaattccactaaaaatcctgttaatatattgtgacatgtagaatccaagaaaaattccacatgccgattccgattattatttgcatttattaattagggaattagctctaggttaattaagataatttcttcggacgatttatttagccaaatttttaaagcaagcaaaaagggggaaaacttcagggcgtgacaaacctaccccccttaaacggaatctcgaccccgagattcggaagagctggcgaagaggtgcgggtgggtggccttcaactcatcttctctttcccaagtggcctcttcctctgagtggtggctccactgaaccttgcagaatcttattactttgtttctggtctttctctcgctggtttcgaggatacgagttggcttctccacatacgtcaagtcttcctggatttcgatttgatccggacttgcctgttcctcaggaactctcaaacatttcttcaactgggagacgtggaacacattatggatgccaagcatgttggagggaagctcgagctggtaagcaacttcacctctacgttccaaaatccgatatggtcccacaaagcgtggtgccaactttcctttggtttggaagcgatgtactcccctgagcggagtgacacggagatacacataatcccctgtttcgaaagcgagctcccttcggcggttgtctgcatagcttttctgccgagactgcgcgattctcaatctttccctaacagctctgactttctcttctgcctcatttaaaacttctgtaccaaacaactggcgttcccctgtctgatcccagaagagcggagtacgacacctccgtccatacagtgcttcaaacggtgccatctgcagactagcttggtaactgttgttgtacgagaactcagcatacggcaagcttttgtcccatgctccaccaaagtcaagcgcacatgctctcaacatatcctctagtatttgattgactcgctcggtctggccatctgtttgtggatggtaagcggtgctgaaattcaaccgggttcccaattcttcttgtaatttctgccagaactttgaagtgaattggcttcctcgatcagacacgatcttcttaggtacaccatgtaaacacataattcttgccaggtagagttctgctaatttcttccctgagtaggtagtgtgcaccggaatgaagtgagccactttggtgagtcggtcaacgactacccaaatagaatcatgccccgatgacgtcctgggcaaaccggtgatgaaatccattccgatttcttcccacttccattctggaatctgaagtggctgtagcaaacctgctggcctttggtgttctgcctttactcgttgacagacgtcacagagtgctacgaactcagctatttcccttctcatgctgacccaccagaacttttctttgaggtcttggtacatcttagtactaccgggatgaatggaatattgagtttgatgagcctcggttagtatcaggtctttaattccttgttttcgggtacacacaatctttctcccatccagattgttccttgttcatcctcaacaaaacctcgggcttttccaactctcatgttctttttgagctctgctatttcaggatcacttgcttgagctatgcgaacctgctccaccagtgtgggctgtgcctctagggcagccacgaatccgtgctcaactataccaaggttcagatgttccaaatcgcgttgaacctcacaacatagttgctttacccatgcaacattgcagtagctcttcctgctcaaggcatccgcaaccacattagccttgccgggatgataatgtattcccatatcataatctttgatcagctccaaccatcttcgctgtctgagattcaaatcaggttgagtaaagatgtactttagacttttgtgatctgtatatacctcacaacggttactgatgagatagtgccgccaaatctttaaagcatgaacgactgcggccaattccaggtcgtgcgtcgggtagttgccttcatgaggacgcaactgccgtgaagcataagaaaccactttgccatcctgcatcaacacacatcctagcccctggcgagatgcatcacaatagacctggaaatctttcgtctgatcaggcaggattaagactggtgcagacaccaaccgtcgtttgagttcttcaaaactcctattgcattcagcagaccagataaacttttcttccttcttcaatagctgtgtcattggcttagcaattttagagaagttctcaatgaaccggcggtaataacccgcaagtcctaagaaactccgaacctgagtgactgtccttggtggggtccatttggtaactgactccacatttgctggatccacagctactccttgagcattcacgatgtgaccaagaaactgaacttccttaagccagaagtcgcacttgctgaacttggcatatagctggtgctcttttaacttttcaagtaccagccgaagatgctgctcatgttcttcctcggacttggagtagataagtatgtcatcgatgaaaaccatgacaaacttgtctagaaattccataaacaccttgttcatcaaattcatgaagaaggcaggtgcgttagtgagtccgaaagacataactgtgcattcgaacaacccgtaccgagtgatgaatgctgtctttggaatatcctcttcgcggatcctcaactggtgatagcctgaccaaaggtctatcttagagaacacagtagctcctttcagctgatcgaacagatcatcaatccttggcaaagggtacttgttcttaatagtgacctcattgagtgcgcggtagtccacgcacatcctcttggttttgtctttcttttccacaaagataaccggagcaccccaaggcgacgtgctcgggcggatgtatcccttctgtaactgttcatcaacttgcttcttgacttccgccaactcgttggctcccattctgtaaggcctcttgtggatcggtgcagttccaggtaccaagtcaatccggaactcgatatccctttttggtggcattgttgtcagatcatccggaaaaacctctggatactctctgactatgggaatatcctccagcttcttagtggttttctccactgctacctcttgttcttcaccagcagcctggtttaaactaatccctggcttctgcggcactggagactggaagattaccacctctccttttgcattggtcaacttgatggtgcggctggcgcaatcaatcactcctctgtgccttgccaaccaatccattccaagtatgacatctaggtccttggattcgagaagaatgaggttggctggaaaaatcaacccttgaatttcaactgtcacagatgggcagtagtgagttgtggtcatgccacctccaggagtatgaactcgcattggtatcttaagcttcactaaagataacccatgtgcaccagcaaaacgcttggaaataaaggaatgggttgcaccagaatcaaacaatattactgccggtgtcgagttgacggggaatgtgcccaatataacctctggtgctgactgcgcctcctctgcagatgcatgattaacacgggcctgaacgaacttgggtccggcacgtcttggcttcgggcactttccaaccgtgtgtccgggtttgttacaattgaagcagagttcgggtttttctcccaacctcttgggctgttctggcagagctggctgaactgattgagctggaatctttagtgaactcggagtagggttgaggctgtgctgctcactattgttgtgactgtcactatggtggttcttgttgaagttacccgggtggtagggacggtgctgccggataatcatggtggaaggtccaccgtgatgtcccatcgtgaaacgaggcttctgactcttcccctggggagtccggaactgagctgccttcctcttacggtttattttgttacagtgctcctcctgacggatagccttatccaccagcttctcaaagtcctcataatctctagagatcaactggttagtcaattcatcatcaagaccagacagaaacttctcctgcttctcggcatcggtacgcacgtcctcaggggcgtagcgcgcgaggaggttgaactcatgcaaatactctataactgttctggttccttgttgcagggaacggaactctctcttcttttgtgccacaattccctcgggaacctgtgctttattgaaactatgacgaaactctgtccaagtaaactctgccccagctggacgggtcaccatgtagttgtcccaccaaatagaagcgggaccttgtagctggtgtgtagcaaaagcaaccttctcctgctcgttgcattgcaaaagattcagcttcttctcaatggcatgaagccagtcgtgggcctcgattgggttggtggtgcttgagaaggtgggcggcttgacacgaagaaattctagcagtttggactgaggaggtggagaaccaaactgcaggttctgctgctgcagctgtgcttgctgctgcacctgctgcaacacctgatggtactgttgctgcatctgttgcatcatcattgtcatcatctgagtctgattgtccaacacctgagcaattgttgggttctcgggcggtggggacggactgttgtcagatgcaccgttggcacgtgctccattggtcggctcttcgctgccactggcgttgttcgagtcgcgtgaaccattccttatctccatctgaaggggataggtagaaatatgagaaaaggaagaaaaacagggggctcagaaactaatcttgcttatgaatttaagtgcaattatcttaatcttgattaaaacactgaaaaagaggcacgcaactcctaattgaggcagtcataccactgacacatgatatcgaccgccgactaacccacaagcaacaaacctaaacacgaaaactagcaagcaaacagactaagaaggcgataaagctaagggtggcgactctgaagcttggagcggcgcttgcgaacgagggataggactgacatctaaagtagacaagggataggaaccaatttatgctcaaatccaaattaaacaaagcaaaagaagactcaaataaataaccgagcaggatgatttttatgcatagaacatttttcatgaactcaaataaagacactaatgcaactaaacaataaattaatgcatagactagttgcatggaaaatgatgcgcataacattgcccccatcgaatatagacacgacctaatgcataaacccccaataaattcccgactgactgtcgaataaactccaactaaaatttttctaaagccctaggctgagctaattttttttttttttttaaaaaaaaaatccgacccgaaagaacgaccaagatttttcccgcaaaccaaagaggcaaaactccaaattttcccgaaacaattccaggtgcaaaaagggcatatgcagatgaaaaaggggttcagagggctcttagggtttccagttggcttgtcctacggtcaaggtcggctctgataccaacttgtcacgcccagaaattctcaaaccagaatttctaagctgaatgtgcattaaatccctgtccaggaccagccagggtacacaaacgacaattgttgacatacagatccacgtcttacaaaaatagaaaagattacaaatgcagcggaaaagaataaaagcgagctaaaccgggaagcttgacttcagcagcgggcggctccactccacaggcaatccttgacggcagcgacgaaaccaactttgacaaaacagctccaactaggaagatcttcagctctggtgtgggggaaaagagagcaagactgagtactacccactgtactcagcaagtcataccggaagaggaggtatgatgcaggatataaccaaaggaggctagaggttcttttgcataaagctagcatttaaaagcagtagttggaagcagtaaaacagctgtagtaattaatcaatattaaccaaacactgtccaacgctacaccacgttgcaacaggcccaaccaacctcctgaactacaccagttcattaagctaaactaggggtgagactaatcacggtgaatctggttgatcgcccataaccgcgggcacggctattcgaatagttttactctggccagaggtgtacaactgtacccacaagacacgattccacacatgtcgccatgccccgaagtatcaccatgatactgcaaagggggaaatcgtgacaagaccctccacataaccctcccctaaccatccacaccacgctaaggtttcacccccacccctcaaaaggcagtgggcggtcccctcttgcgccgcggtgaatccggcagctggacaaccggacaccccggccgacccaactccatcacgcccaccctcgccaccggtgcctaggaaagggtcgagctatacttcagatcaagcagttacccactcccgcttgtggtaagcacggtaagtctcccagggtttcccgtgaactggtccttaactgccatgggtgcgaccagcaaaaccatgcacccacagcccaccattcagtgtattttaattaactaacaccattgcggtggcaccaatctaaagctatgccaatagacaaagtctatgtaataaggtgatccccatttgtgtgctagttgaactaagcatggctaagcatttcctaaccaacatctagtcattttgatacccaggttatcaatggcataaggtaaacaataaatggctgagtattaggacccatcccacatgatattgtaaaagaatgcacatttaatagaaatgcgggatatttgtaaattgggtacaatatgatcaaacgtattgcatgacttgcctttctctcgcactgatgagatcacagcaacgtcttcgagaaaccgtggatcgacgaaacggccgaaacctacgcgacaaacaaagcacacaagcaaaacatgctataagactacagaaacaggaaacaaaaccatttttaatggattctttgcatttttcttgatttactgagacttgaatggacttaaacggagctcggatgatttacttatgatttttagaagataaactgtgtttttactaataaagaaaagtccttaattaattattgcgcaattattgccccagggctgacgtcagcgaggggagggggcggcgccgacatgcgggccccactggtcagcgacactaagagagggagagggggcggctggcaagcgggccccactggcagcggcacaaggggagagggaggggtggtccaccggctggtgggccccaccgggcagcggcacagggcgggagaggggcgtggct

SEQ ID NO: 4790 - DNA, 14427 bp, Oryza sativa
gtcctatatggttgctgaatcagcaaggaacccacgtgggccctacatgtcaggatgccacatcaacaccctccctcttccccctcctcttccttcctcctctctctcactcttctcttctcttctttaggtaagccggccgacgctgctgggaggaggccattggggtgaggcgggagaggaggcgatggcgggcgacgaggcggcggcggctacgacacgggagaaggcaagggcggcgcccggtcgtgaatggcgttgatggtgctgtgtcgtcggtggcggcgaagcgatcccgcgcgggcgggtgccgcgacgttgggcgatgaggagaacggcggagcaggcgggcgaagcgaggcaaggcgggtggagtggggcgatgtcgcgggtgggagaagcagtgcaacggcgggcggaagggcgacatgtcgaaagccggtgggacagtggcggggggagtggggcaacagcaggagcggggcggcaacgggcggaaaggtagcaatccgccgtcggccatggcgcgaacaccgtcgaggtcgaagggcggtgcagaggatggcagagatgggggcgagggtcgcaatggtgaggtgtgcgccctcctaatcctcgaaactgtcgtcgtcatctggcggcttgttaccgcgggctggggctagcaggcagtctcgggcggacgaggagcggagggccgcgctgccgtgggcggttcacggtcatgggctgcgtcatgtcggtggcgtcgggcgccgcgtgcggggtgtgtgggggagtgcggcgtgcgtgtgtttgttgcatcaacggcggaggtggaggtggaggggtgaggtgcgggatcgcggtgacgccgctgctgccggtggcagctcctccctcgctagccaccgcccttgcccgccgtactcatctgctctctgccagccgcccgtggagaggggaggagagaggaagagaggtggtgaggggaggggaagaagaggctgatatgtgggacccatgtggatcccacgttgagtcagctgccacatcggacaaaaccgctaagtgacctagttagcactggttttataagttgaggaacgcgttgtatctggttttgcggttcaaggacgattttgtaattcgacgacaagttgagggacctttggtgtacttgttcgtaaaagaaaagaaacaccggcccagtattgataagaagcccagacggaccaacaggccaagcccatcttatcccaagaaaaaaaaggggaaaaattactcctttctaagcgaaggcctaggctaaagaacagagaagagacctgctcttgcgatccttctcactctcttcctccccgagtcgacggccggccaccgacttgggggaaaccaagccaccgccgccgcagccgccgtaccccaccctccctcccggcggccgcgggccatagccgcgttctcccccgcgcgtctgcctgcggcgtggaggcgtggggggcgacggcgatggggtccatgacgatcggcgccaagtacaagaccacgctcaaggaccccggcaccaccggcgtcctgcgcatggtgcgtcgcgatcccccctctgttcctccctccctctctctctcccgcatagcgtcgcctctctccctccagctccgattggtcgggtttaacccttgcggccgtgccctactggatacacactccgcgggaggtgcggtgggtgtgctgattctgtggagggatgtcgcttgacgggagggttttgatcgggtgttggtcgcggtagtgtttgattgggtatgctagggcttctgatgctttcggaggggtttgtggtggaaaggaatcgaaccgatctgcggtagtcggatgtataagagggatgagcttctggagacattggtttagctagcttggtggttagttatttatgttgggttcatgtagtggagcgttttgtgcctagtttctgtggatcagatgcaatgagttgcatatctgtttgattcgctgatgagttttgcgtagttgcgttgtaaattttgcttgagtatttctacctgcttaatttcatgcacagcttgctgggtctaaatggcatctatcgtttgatacttttaattgtagaacgaggataagttcaccttcactccccatgatccacggtcagcgatgaagctcaatgttgatttccggagcatcaaaggtaatttcatttggtctatttatagttgggtacagtgggagtactatgaccgtcccagtggtttagtaaataacaaactgaccaattcgtgattgccatttgtcagaccaggctccatatttcttatatctgattccttttgtggataatttgaaatatgttttctgcaaaggcattaattaacgggaaatcaagataatatatagctattctaaggtagaccatgcatagtaaaacagatggattgatttgatgcttgtgaccaacttgtctgatgtcaactttgtactttctgtgcacatgcacttctgattcaggccacaagttcaacaaagtagatggtagcaaaccagctccaccattactgaatctttcaaaagactctgacaaggtataggcaattctaccttaaactttatcttgttgaatttctattcatgatctacatttgtttctgtcattgagaaaaattgaaatttctatgtgttttttctttagggtggaggctacatgtttgagtttgacaatgttactaaccgcgacctatctcgtgactttgtaggtaaagtgaatggaacctaaaatagcttcttttatttcagtttgatgtcaaatgtaggttatgaaagttagaaataacagtattttgttatttgcctgagtattgattattgtgtaagcatcaagtgggaaattgtccacttagtgtaaaccaatccaccagctgagtcctttttaccgattgacttgaagattctgaatttgagtccaacagtacatttataccctgacacagcatacaaataaccaatggctttctcttttcagctaaagttttaggtaagcaacaaggtacgataccgcctaaaccaaatgtgccccctgaaaattcagttacttcaactggtgaagaacagcttagtgctgcagaaatgcaacgtcggatgaaattgctgcaagaagataggtaatgtgattatgtggaacatcactattgtattttttagttacagcaacatgatgtagttatgataatccagtgcaaggccagtggttacttgttttttgcaaaaatatgatctcagatgaaacttcccttaaaactcttatgcgtctataatgtaaaaaaatttgccaacactataatggacaattcaaaatgtaagctatccactgaaaatctcaaattgtatgcggaacacagacagtaatatccaggcttaggaatataaccttggcaacagccttgagcgggaataactaaacaagtatttggtttattcagattttgttaggttaaggcagcattagatttttcatgtcttaactgcatctattggtctgtttcatgagctttgctgcaattaaacggtagatacctgccagattggcaaaacgaaataatagagataatatatgccttctatccagtttattttatattgaattatagttggcttgaaatctgtggcattggaatagcattgtgcatccatttccatttaatggcttttgcttgtcatctgatgttagtgtgatataaatatatatatttttgatttcttctttttgagaacatggttatgcagctatattgattaagttttactatatggatgaaattgtagttctcatatatcttacaagagaaagtgatgcaaaattatgcaaactgtcgcacccacaaaaatttacatggtgtattacaatcttgagcttttttttgggtcttcacagtgaattgcagaagttacatatgaagtttgttcttggcaatattctgcaagaatctgaattttgggcaacaagaaaggtaaaattcactcactcaagcaaaatatgtttcttcctgatatgcttgtttaatttattctcatgaaactatcatgtctttatgaacttttacagaatttacttgaggacgaagcaaataaaggatcaaaacaaaggccaggtttcaaaagtgccatgctagctgatgttaggccatcggctgatggtcgggtacgttatttattttgtgtaaattatggtttattatgttctagtctgttgtatcttatcttgccagacattcactttggtgatagctggtgatattgatgttatttctttctttttcctactcctctcacagacaaataaggttacttttagtctcactaccgagataattcatcaggtacgttcatttgactttgatgattctttaggacaggccatcttagtattgttttactgtttcctcaactgttgtaggtgcagttctatgctataagaaataagttatatctacagatctactttgtgggatggaatttcagaattactagaatctttctcattgcacaatagactctacacctatttggcagggctccaactcctgtattcttgcatatattgattcaagctaaaacaaagtggttcaagcttcttagcttttatatctaaacaggcttgcaatttgctgtatttttagtccccatatagaatggtttgatccctacttaagccattttttattcatgaaactatatgattttgttgtctggagtatacatccagcatgtcagctagatcaggccaaagggcttgtacggttgtaccacttgaaagcattcttgcatccatgcctaggcttacaagtctgtaatgctcctaaatcagggctttgtctaggtcattgggcttggctatgtttgctcaatataatacttgcttatgtttggcatgcattatataatgggtatgacttcaaattgttgaacaattcaaatgttctgaatataccttaatgttctgcagatatttgcagaaaagccagctgtgcatcgagcgtttttagattttgttccaaaaaaggcaagatcttacccatttgtattataccttcattctttgtttcgcatgtactttagaaatttcggtatgatggtgttgagtttatactatttctgtattgatgtaaatggattttttttttgcgtccttttcccttgatcctccatgcaatcatctccctcaaaacagatgtcagaaaaagatttttggacaaaatattttagagctgagtatcttcttaggacaaaaaatactgtggcagcaactgctgaggctgctgaagatgaagagttagccatttttctgaagaatgacgatatactagcaaaggaggcaaggttgaaggtacagttttcgatgtcttgaaatactgcttatattattccaattcatttgtgctattgcttgggagttggatttcttcattcctcttaagcggttctgttcttccctgcagataaaacgagtcgatccaacattagatatggaggcagatgctggagatgactacatccatcttccggtgcgtctgtattctctacttctgttgcatatgcaacttgatgaagacgaaagtgatatatctttattgagcaaggatatctgttctttttatcgaaatcatgagttgcttatcctgttttgataatattttgttgggcatgtaggaccatggcattattcgtgatggcagtaaagagacgattgataatgatggtgaattggccaggagaacactttcgcaggatctgaatcgccatgctgctgttgtgcttgaaggaagatcttcaggtaaaagttttggatctgtcagaaatatttcatcctttctacgatcatttgatactaaataattgtgcaaatattttcatctgttataagagaactgccctcaggtatttgagggtgcttttatttgtttgcaactgaatagacatttttttcgtgctaccctgttgattgaagtcttctgactattctttggaactgagtcttaaagaattaatttcctgataataattatataaacaactaccctaagctactagccacttgtaatttcactgtgctgttcctgtactttctccacagtggagttcatacgttgatgctatgctgcattttcttgctctgcatatgcctgttaacttttgcatctttaacatatatgcgcagtccagtatgtgactaaattggatgggtgcctgtgtgtttttgcagacgtggaattaactgatacgaagactgttgctgaagcaattgcaaggtccaagaaaggttacaaattatgtttcaacgtgttttttttggtagtaacacttctgtatttatgctgatgaaatattattagctgcagaaccaccttcaagttctatttctgatgataccaatcatgagaggttggtaaaagtggcccgcatgactgagatagaggatctacaagctccacggagcctcccatacgcaccactttgtataaaggtaaaaaatatttcatggcttcatcgtagatcgatgaatcggaataatatattttaacttgtagattatcatctcttatttgtcttattaggatcctcgagaatattttgattcccaacaagcaaatgctctgagatctttaggtggcaacaatgatggaagacatgctcgtaattgcaggctgagtacagatgatgcatttgatcatttgttgggccaaatatcttctataaaagttaatgggttgaactatccggttattcagtctgatgtggctcttaaggtaaatgattttacacagtacactaatatggatatttaattatgttaagccatctttgtggagtaggccatatctccctgaaataggcaacctccttaagctggtacattattgctaatagtctactacctccagtgaaaaaagtgatgtttcaggatgcagtcaaacatcatactttgcatattgggcatttttttactatgcattttataagtattgtacaataatttgattgttctaaaatttataattcattggtcaaagtcatgttttgtaaactaccaatgtcatgggtagtggccgagaggttgaggccctagtgtccctagggaacggttcccttgtcttacggtagctcacttggatagtctagactggatccttccctccatctatataaggatggattgtatcgttattctaattaagcaatgaatcagaattagtctcccccaaccctaagtccctctctcatccctttcagccgtcgccgcctagctatcctcccagtggtatttaccctctatgccctaacccataacaaccaatgtcccaaaagcacttttgtggcttaggaaattattgctaaacataattgttggatactaagatcaaggggaaatatagaacaagggtttagaaactagtttgaatagcacaaacttttgaaataactgtcttgttagttttcttacatgtactagaccagaagttgatgatgaaagctgcatttgaggaccatgttgatatccaaattacttgtgactggagggtaattcttgaaacttgtttggattttgggtgatgtagcatttcagattgtacaaacattttaagaaatttactatgttgaccaacaaagttttagttaactgtgcagtatgtagctatgagaaagcctctgcacatctgatttttccatccacacatgttctgcatgacgttgcactactgttactgtggcttctctattcttaagctattaaattgcatgagcaggaaaacctaactacctgcatggtatgggcttaggttctgaatgaattgaatgaaggaatttcacgttcaagaagacttaatcttaagaatcctcaagatagtctgcttggtcaaatccctcgacgcacacgagatgaacttatggatgtgagatgctgacttcattttctgtactgaatattttctgcatttatttgttttatgttttttagttcctgtattacagaattacttattgtaaactctgtttcttagcactgggcagctatccaggaattattgcagcatttttggtcatcatatccaataacaacttcagttctttataataaggtatattatcagtcccagacttttctgcaccattacgtaatttatgtgtagcatttggatggtaatcagtatcagtagattactgggtcacaataaatttggttcctatagtgattttgtcaatgtagttttcctttcctagagtgaaaggaaaattttgcccattaattatgagcggtaagttaactaaatattaagtctggcactcagaagaaaaaaagggttcccaaagtgaacagtttcaattgtggattcaggtggtagcagcatggttatctgttcactgttgcgaatttatttgtaaaagtaaatgcaacatcatgagaaattcatcatagcctagtttttatgtttgttttggctgtacaacagctctttttgttttttctgcatattgcactgaattctgtaagaaaaaaaatattactgaaagcagactaagtaattttatacttcattcatctgaaaatataaggcttattttgagttgatacatgaaatcaagtagggtatgaaactgaggaagagaagataaaatgactactctattgctacttaaatgaaatatctttgaaacaggatagggaatgttaatgagatgttctgagaaatgtaggagaatatgtaaaggcaaataaggaaaaccaccaataacttccaatgcatgccttatattttgcaacaaattttgaaaaattctgccttataaaaagaaacaaaaggggaatgcagtcatgtgggtggaatagctgtacaaccaagactaagccttgaactatatttgcaagattaagaattcagtgtttatgtttttgtacttctgtggcaggttcaaagaattaaggatgcaatgacccagatatatcaaaagttgcaggtaatctccatcacaattgcctctttatcttcttcgagttcatcatgtggagtaccttagtttttaccttttgagcatgagttactgataagatgatagctagctggaattgctcttccttaaactatagtttccctcaaacatgttacagaaatgggtttgtattgaaattgacttcaaactttcttatgatgttatggaactgtaccttgttttggtgatgaaattctcactggacccctattcatatgcataacttccacctgcaggatataaaggaatcagcacaacctgatgtgagacacgaaatatctcaactagtaaagcccatgacccaggttcttatctatatccttttttgtcccatttccaattttccatatgcaaaatagatttatttcagcttcattatgacgactcaatcatgctactgtactgcatgagtttccacattcttttcgagctaccctttgtttagcatttctttatgctcattgtgttgcagcttatctgtattagcattgcttgacagttgatattttaactactactacctattaactgttcagcggtgctcacttgctgtctttgtacacgtatcagcatgtcttctttcatttgcatattgatgatcttcttcaactgctgaaatgccatcaatctggttatatttactttccaggctttggatgctgccttcaaccatgacttggagcagcagcaaaaatcatcgaaatccgggaataagcccaatgggttttaactttagccgagaagactagcttcggcgacggattagggattgatttactgctagagcaagagggctacttgcagttctggaggggttacctccttgagccttgattctcatgtatatttacctgagctttatagtggtgggcataacgtgcttactaaacgccccaatttttcagtgcctgattcattccaggcatactctgggatggtttgtgttcatcacagttccaggtagaaccaaaattttgtgtacactttggaaagaaggaaaaaaaatgagcacgcgttgatgctgcgttccttacccgtcattctgcattgttcgtgcaagttgtagacgacaattttgatatggtcgagtttatgcatggacaatggttcactcttgctgtgttgcaagcttgcagtatggcaaacagaatgaaactgcaggattgttgctagttttctggtgaccgctggttaaagcatgtaacgttcaccgtgagcaaaaggcatctccgaccggagcgatctgcagtccacgggaagaaggcccaaagagaaaaccaaaagaaatggaaaaagaaggccgaaaaaaacgaaatgaaaaggaaaaaaaaaataattgcacgcccagtgggactcgaacccacaatcgcctgattagaagtcagacgccttatccattaggccatgggcgctttgttgctgtggggtccagctttaactaaatgtaagaattcgttcttctgttcctttgcttcgacagagagataatttggagtatgaattaatcatctaatgtctaaaagcaattaacatgatatgaattaatgagagaagaaaaaataatattaactaaggaagaatgaactatataggtatacaagatattataaaaaatgataaagatatattttaaaatattatgtgaattatgtgggatgatttaatatgcttgcataaaattctaaaatttaataaattatagaattataaataatatagcatgcttgcatgatgtttaagatgtaataattgttggtgaatgataatgtgacatctttgcatattgagttttaagattgagtgggttaaacgttatagtaagataggattagaaaactaacaagtgaggtggatcttgttttaaggaaaaatggaatttccttagtcaacgatagtgggcctgttcggtagcctattttcgcaactgtttgggctgtgccgcacaacccagccgttcggctgcagtggtctaggctgtgttgcatagcccagtcgttcggttgtggaaacggctgcaacccactccccgcaaaaaaaaagttggtttctcgcgaaaaaaaagaaagtacctatacatctttcgaaagatttttataatcgtatcacacagatttttaatctttatattaaaatctgatagatataataaaaagcaaaaagcaattaagaaacaccataatggacactaaattaccatatcctcaagaaaaagaccaaatcaaatataaaatttaaaatttacatgcgaagattcaaaaattacagtgtaacttacaaaagttatagtgtaagtttcataaattacactgtaacttacaagaaaatgcactgtaagtttgagttagaaaatcgagtgagagataagaaaaaaatctttcgagtgagatatagcgaaatccaaaaaaaatgacgcccctcttctagttcccatctcccagtcctatcgcgtagcccacactccaccctatcgcgccttctcttccatcgccacggcccacactctgccgagcgcgtctcgatcccctccgccttctctcccgtcctcctcctgccgagccacgccgtgccttcccgatctcctccacgttctctcccatcctcatccctccgagccgtgccgtgccttccggtcgcgcccgacgccaccccttcccatccccttccttttttcctctcaccactcccgatatgatcgattaaatccaataggatgtgaagttcatcttgattcagctgtgggggttgaggggaggggaagctcgacagtcggctggagttaacctcattagggtgtggttgttgaggggatagagtgcagccaagggaaacatcccgtcgggcaagacccacgctgtgtcgctggcgacgtcttctcccccagatccgtccaggtccggcagttaggaggtaagaatcatctcccttttgtgatttttgatcttgcatttttaggggtatttgtgtatggcaccattcgccatgtcaactcggccgaagggcaccttgtgcaggcatacgaactgctgatttgattcttggacatttgtaggaccgcaaccagaagcgctggcacataacctgagacgatatggcaccacggagcggttggcacttgtaaggtcacaagagcgacttgtacgtaggaatcctcaatctgaacaaacgatttccctccgccggtcgacatcgtcatggtctccacctgaagccgcatgatacaatctgcgtacaactcctgcacggcagaactaactcaaggcaagcattgctttctcatattagttatcagtgcgaaaaatgttttgcatacctgcaacttgatgttagtactgtgtttaagatctcaaaaactcctaagttggactacatgtaatgcaaaattacacatagatggctggtggtcgcacctattgggacaaagccctcacaaagatattcctcgacttatgcattgctgagaagacaaagcgcaatcacaacaagaagggtcgtaccaacataggttggcagaatttatatcgcaatttcagagaacaatcaggcaagaactatgacagtaaacagcttcaaaacaaatttagcacctttaagagacaatacaagctatggaagagcctaaagaataagagcggaggtgggtgggacaacaattctagcaccataaggtgcgatgatgattggtgggaagaccgtattgaggtaactacatgtgaatattgattttactacaaaactaatattgagtttttgttattgtctcgtcaaacttacattgtccatatctgacttgtaggagaatagggatgccagacagttccgtggaaagccgcttgaacatgaggatgagctgactactcattttggttgcatggacaccgaagaaggtacaatgttgtgcgtaggtggtattggcaagagaacaccaagcagtggaagcgatgacaaccttactccgatgtctaacgacaatgtcggcttgtctagtgctggccgtgtggcttaaagggcagggaaggagcaggtggttgaccgcccaccacccaagaagagtaaaaatatggagtactatgtagggtgcgtatcagagagtatgctcgaaagaagcaggaatgaaagcagtgtgctcaggggagagcaagatgagataaaagaattgctgcaacttgtagaagaggatggtgtggctcaaggatctgagttgtatttcatagctactgacctatttaggtcagctgcacgatgggcagcttttaggtgtatttaccctgcagagaatcgtaaagcatggctccgatggacttgggacaatgctaggaaaaagtgataccagtccatgcttagttgtcgcacacggtgtttgattgtatatacccatcgccaacacgacgtggcattatgtaatcggttgtttgaccttggcatactcttatgttatgcattatgaccttatttgctttgctactttatcatataaatttgtatcagtcggctagtcatttcatatagatctacttgtcctttctttattcttttttttacttgaaaattgaataaccatgttgcatcctcacctactgtagaacaatggaaaaatgcactacactgattttgtacatgcatacattttgtaacggaaaaagtacgaattaccccgctgaactatcgcagtcgactgaattacccccgaactcagaaaccagacatagctcaccttaaactattaataccgaacgaattacccccctcgacactgttcaaagtggttttggcttgagcttgcacacgtggtgctaacgtggcaatccagtcagaaaaagactccttgggcccacttgtcatatctctccctccccctctctctcctaggtccctctctctctctgcccggcccctctctctccctctcagataggcggctgcagccggcggacgggctcgggcatgcagctgtggacggcggcacggggggaggacgcggcagcggcgggtggcgccctctcgtgctccgtgtcaacagcgatgggggcggcagcacagcgcgggaggacgcggcggcggcgggcaacgccctgtcgagctccgtgtcaacggcgccgcgtccacccccgatggctgcggctgtgtctgcaccatgacgtgcgcgttaacggctcctcgttgtcgaactccatcccctcaaatgggtcaacgccgtcgtagacgacggcccgcgccacatacgccgccgccgccgccgaccttgccgagccgttcccggcggcgtcagcctccatctccgcagcgtagtcgacgttgtcgttgtcgttgtcggcggcggcggtggcggcggcggtggtccgacgagggggtggaggaggtgggggcatggtggggggggggggg

SEQ ID NO: 4791 - DNA, 11038 bp, Oryza sativa
  unsure (1)..(11038): unsure at all n locations
cgatcgatttgtgagtaatttttctctaacagcagagtgatctcctaaaaggttaatgttgctttcggagcagagtgtgaaccatcagaatagtcggaggaatgatggcaaagtttcagctgtttcttggggggggggggggccaataacggacatgatacaaaaattcagacaatttttattttcatttcaaaccattttcgtaacttgtggagatgcttccctctttggtatgacaacacaattctgttgctctgagctaaatagctaatagcatggtattgcatttgggcagtgccaaatcctaggctaattttggcataccaaaacttgcttctaggtttcgctattatttaggagtctgattttggtaagggttacttaattattggcttcagtccaaataattgaaagtgctattgtagttgtccaaaaatttagtagggaacattttggttgtgatccaaaatgccccttaatttaccaaaaagtgattaaatttttcatttcgaatcaaaggggcagctaagtccctgtttagaagagctcttgatattaattttccttatcccaactcctaatcttcaaggaattatatcctcaaataatcaggaccagatgtacaactatttggctatcagatttataccagatcctcaaggacaggattaaaaggaattggccataattggatgaatgaaatttttagaactatagataatgtgaggaactaatattgtaaaacagatggtttagactgaaatttattacaaaacttaaatatcatggcattgaaaaacacagatttaacgccttggcatgtacctcactagctaaatgtaggagctataagtagttgttgcctcacatctataacactaccttgcactatactcccttggtaaaaaaacacttttggatttgaatatggacgtagcatatgtccagattcaaatccagaaaatgttccttttttttaacagatagagtatatgcttgcgggtggcacccttgtcatgcactggtgcattggcacacccttgcatgagagaaaatataagaagaggtatagatggagtgctaactccaagagtgttacatttatttagggataaggtgagaggagaataaaggaaagaaggagagggtgagccactcttatacaagaagtaaggaaagagaaatagtggtttaaaatgaataaaataaaattatttgcacctaaatctaacatattacatctactgctaagcgagataacagccatcgtcatctccaagagaggtgccacatttggttacccaaatctccatttaaccatccatgccaaaagatttccacctattattgtgccttcgaatatgttgtttcttcatcgccattcaaccattcgtctccctattgttttcctaccttccccgtagtaaaccaagacataggtgaacttaggatatctagttgtgtctctaggacaatgttgccctgccctctttccaccaataccttggacctccttcaattctctagtgatgaagacttttgcctcgatggtgttccctctggctacaaagatcaattctcctccctctttccgtcattgctgcctgtagaacttcgagaggaggtgggcgaggtcagagttgagcaggcgcctgggaaggatgcactgaagtcaagctacatggtgttgagaaggagtcttccaagcttgagaccaacacgtacgcagatcaggactgaacctagagacggtagagcagctcgtttcggtagggaggtagcaatgctgataaggagaggccgagagggagaaggcgcgtgacgcagttcagcttagcgaggaagtagtggtgcttctcggctcgacaaaaaggcagtaatgttcatgtgggatgagtggcagcaacgaccaggggcggatccagcacgggtgcggcggggtctcgagactccactactaccgtgaagactatgagagaccccacgaaggccccactaaaaatttttatcatatgtagatggaaggggggactgtaactttatctagtttgctcagaccctactgctatttctttttggatccgccactggcaacgacgcaggtgggagagctgattctgcttctactactggcatgagacagagtgcaagagttagttatcgaggatagctagtcatacggcatgtcaaatttggtcaaccgctcctctcgtttagccagccggataagataaaattgtaaatagccactctgttgaaacccatccttttacatgtttactcttttctaatagagagtgatatagccaatctcttagagatgctcttaaacttgctatatgagcaaggtcaggcccaatacaatgcaaggccattcatatcaatatccaatttttttaaaaaaaatagaatagattatataatatgttatacatatgtatatgaaaaataaaaaagaagaccgtattcaacacatcataataaacaaataaataagtaatatatgatattatacatttcaaatattagtatattagctctaaaaaaattgcccctttacattttcgttatacaaccttagaatcctagctctgacgcttatatgagcatatacttagagcaattactataaggttcagatgctacgtacctctattaagagtaccacataatattagatgatgaggtggaggagagaagtgaggaagaagaatgagtcaccccttattcaaggggcaacctccacataaacaccaaaaaaaagtgcaaagagagagtgagatagtgtgagagtgaaccaacaaaaaaatatattagggtttgggtattagagacaatatcattactaaaaaaacgattttttatggtgttggtctatgattttcgctggcggaaaaataccaaaaccgccagcaaaattgtaacgagggagtaaggggcatcgacggctagcgaaaatggatctttgacggtgcccgcgttataccagccgccaacaaaaatatgtctattttcactggcggtcacttaagtgcgccgccagcgaacatggataattttcgctggcggttgtgttatacaaaccggtagggaaaatacagttattttttctggcggcccacttaagcaaccgccagcgaaaatagattttcgttggcggtagaaggaccgcttgcatagatggaccaccatctattaatatggaccacgcggcccaccaccaccaccaccaccaccaccagtccaccacccacccgccccctctctccagctcccctccctcccttctctccctcgcaactctcctccctctcttctccaccgtcgccatccatcctcaccaaccagcctctcctcttctctacccccaccagcactctctcctcctcccaccccacagtaggcggcggcggtttcggcgtggcgatgacgacgcgaggtgggcacgcggcggcgacagtaggcgcggctctcgggcgcctgcgggcagcggctcgcggggaggccggatccgccgccgccggaccacggggagggcggcactgacctcgacaccattgaccgtgctcccgctgctagatttgattttttttttctttttctttttctttttgcatgttgttctagatgatgcgcatgttttgatctgtgtaaatgatgtttgatctgtgttgatgatgattttgtatttcgtgtttaaatttggaaataagcagcgaatctagatgtggatttgaaatttgaaatcaatgaatcaatgggcggctgcatgggtatttacgttggcggctgtgcagctgcatgggtttttttttgggctcaatataaattttcactggcggccgatttaacactgtcttaagcaaacggcagcgaaaatggatttttgctggcggctggcttaagacgaccgccaacgaaaatggatttttgctggcggtcaataaccgctagcgaagatcttgatcttcactggcctttactttgtggcggctgcaaattccaccagcaaaaatctaaaatagccgccacgaaaaatagttttcgtagtaatgtatattatacaaattatctcttaattaataagtatatgacatggctaaaaaggtggcagtcatccctactataaaacttactcttaaaggttactctctccttttctcttctctctcagagttgctgcgtatctgttgcccttgccctaactaatagtagcagcagtaggcatcatctctagctagctagggagacaagcgattatgttaccaacctgaatgtccccggcggccctcccctttcccatccgatcaaaccaaagtgctccagtaattcctgacaataaagcgtaaagccactaataagaaacactccaatgcaagtagtaggcccagatttcctgaagaagcacacaccaatattcaagagaaagatgcatagtactctttaatttgtaaatcaagtattggtggcccctcttattacactgacatatctatatatgttttaggcttagaccatgcagattatcttcatatttttttagttggctttattcttagtccttgatactttcgtaggagaagcaatactatgctccgtgaagctacacttttaaaattggtagccagcgatcttttattctattttggatggcgtagtttctataaaataatgttataaattctacatgttttatattcagtattttagttggatatcatcagagtgagatggagtttgttccatgaccacgtggtttttatgtatctcttctcttgactcgttgaccgtgtgtctgttgatagagttcggggatgtaaattatttcccttattaagaataaattttaggtttaaacacagatactaagtaagcagatgaaaattaaaataagagaagaaaatgtaggtagagaaattatcatattttagaataaatttaaatgttaccaaaattatattgtagggcggataaaatatgaagcatgtatttagagcaagtttaatagtatagccaactgctagctacaaatcatctatagctaatgtaataactaattcatacattagttgcttactatactattaatatctggtcctacctatcatacacacattacgtcttggagtccgtactgcagctgggctacagatctgtagcctgctgctcctcccttttcctttatctttttaaaatatgtttataactggtttatagtctgctattgtatctgctcttaaatacgtatgtattcgtgtacaatagtatacttaagtaggtggagagagagacgacagagcacgcggaatgatagcccgatgatcatgcgcggccaaagcgagcgaatcgatccgagagaaagcagaatgaaataggcaggcagcatacagcagcaaaggcaacaacaatatatatactgtatgagagaaaaagaagggaaaaagattgtgggcgcggcgtacgagaggaggagaggcctgacgccgggaaacaggtcctcctgccggcgggacgacgtaccagtgcactgcagcgcggcaggcagagcgcgtagccaacgcccgcccaacagtggtgttgtgcctggctactgctggctttgctggattttccaccttttggtccttttacaaaaacttattctataaatgaatccaaaaaaacatattctaaaaatgatcatttttgcggtgccaacaatggtcatgatagcgccaatgacattggcactgtccccttcatccctcggtgaaagctaactcactaatgtgaagggaatagcgtaaatgttgttagcgtcgatgacctatttgaaaaataaataaaaaaggacatatttgtaaaaaatggacctatttgaaataattttttttattacaaataggtccttggcacagaatgacagtcactgaggacttatttgtaaatttttattataaacaggtcctttttcaaaaaattacaaattggtcctctgaattagcttccactgaggggctatggggatggtgccaacatcattggcgctatcatgttaggacaaggcgctacgatgttggtgtcacaaaaaggatcatttctaaaatatttttttaaaagataattatcactgtatgagtactaattactcgtatcacaaaatcacttcaatttttttcatattctaccctcaaccgtctttccactcttacctattgtcatggtcgacatcacatatcaatgcaggaggtccgaaacacaccgtgacgcggttggctggaagattgcggcggcaggtgcgtcacaggaagctgagtagcgtgtgtcggacggctacagtacaaggcttgcagattgataagattagcttgagtccgaattttattagcaatcatgttgagatttgtaagcatatttaaaggcaacatctatctatctattaattattatatactaaaaagtccattaaacttcctacaaacgctcttaagccatcatgtgtactcctacaaatacttctaaaccgccacatggcactttaacaaaccagtgggcctaataattttatctattataattttattgaaaaaaacccagtccccccctcccctctcctctcctcccaccatgggtcactaaaagtccattaaacttcctacaaacgctcttaaactgtcacgtgtactcctacaaatactcctaaaccgccacatgacactttaacaaaacaatgtgtctaataattttatctattataattttattgaaaaaaacccatacccccctctcctctcctcccaccatgcgcccaccctttcactagacgtgcttcctccctcccctcctatccaatctcttctttttttatttagttattaaaatttttgaacaataataaatcttaaataaccaaaattttcctatagttatttgttgttgtccattaacaattaaaaaaatataaggtgttctttaacctataagaaatataaaatttttatcgtatcctaaactttgcatatcacttagaattgttatgtaaattagggaaaaattgataatgtagattatacgatcaatttacaaaatatgcataaataaattaagttagatctattattataacaaaaataagaatacgtccatccgtacatgcttcatcttcccctcctatccaatctctctttttttttcctttagttattaaagctcctaaacaataataaatcttaaataaccatatttttttccatattacgttagatcttagtcacaaaataatctaattgtgattaacatcccaaaacataatacctccgttctaaaataccagtatgtttgttgatgaccaaatttggtagctccatgagttggattcgaagttggaaacgaagccgattttggaaaaaagcctgttcgggaaggctaactacgaacggcatcggctgccgctcaaatcggctacgttgatattggctgagtactgggcatgatgtaatcaaaccgacgccgccaatcttgggaaagtggccccgcaatcgtcattgggtgggattaaagctagtcattgggtgggattaaagaccttcatagctattgccacacaaggataggagtcctaagagaggcaattgtatctattaattaggacatttttcttgtttccttagagatattttggtaagggcccacctaaagggatcgttcgtattttaaattatgttagagataagagtcgtgtccagaaaggacttaccatgtactttgggtataaatatagcccgaccccatgtaatcaaacaacgtcagttcaatacacttcagcgcatcgccacccttttacttttcattgttcttttcgacgagtttttgctttcgagttgggctgcatcaggttcgatctccgacaaaaaggtatatcttgtcatggcggcttgcgctctcaggatcagtgcttacatcttcatgacactctaatcacatcttcgcaagctttcgagttatcatatttattgcataatctagatcgatctcgttatctgagcttcatcggctagcctctatcatggaaaatggccgataggctcagccttcgactttgatttaaattatgcggtatatctgccatcttgaatgagctttcatcggttcgattagatcttctgccactcttcacgcttaatgttgcatcggttaggttcgatctattaagtactgtcctgaggccttttatctaatctattctttgactgctaatagagatagtgtcggggtttcagctgatcttacctgatttagtcgttttatcttccttcttggttctaaatcgtctagatttaccccttatatgaagatcccatcctcttgaagtagatcaagctccctagtctctagattaggtcaagcttcctatatttcatttgtgctggtatcttggtataaggtggtatcggagtattagccgatacagattgggttcgctccatcggctatgctatgagcacgcacaatctcttctttggagcatgtttagatatggagcgatttatattgtctcggtgccaacaccgatctatcccagtcgctcgatctaagcatgccccatctaatggattacatgccgctgatatctacagccaatcgagtacaccgaacaatctccaagtttttacttgcctacgccgatccaacttaagttgcatcggcgtggcccccaacaatatgtcatcggcagacctgtcgataggctatcgttgatggatttaactctttgttgtttcatgtcttgttggttgcaagatcaaaccatctggcacgctcaggacccgaaggcaaatttcccggacctgcactgtaattaagcagatctcctaggcaacaatgttaaaataacattacctttattaaacaaaataatgttgattaaataatacataaaaatattttgacatcatttatatctgtaataattaaagtaatcaacaataccataaaataaaatactcttattatgattagcattccaaanactataactgaagttctaaaatataaatgtatctgaataatgcaaataggtgtatcatgacaaatattttgcaaataaaatcttaatattgaaagtggatacattctagaaagaaaggatcaaatgtgttgttgaaaaccgtatcgttatcttataattaagaagaataggggggcatatttgtcggcattttcctctttagtctttggagttcaaacctaactaatcttagtataaagtatataatatccagagtactcgacccatatagggtttttcttatgtatcaattctatgtccacttttcttatgtatcaattatatgtcacactcaaacatatgtatcatttctacttataattaaactgctattcactaatcgttgagtcaggaatattgatgaggtgattgtttattaaattgactatatattcgagattcaataaacctatatatgttgtcaagtggtaaagacgaaagtcaacttgcaatatagattaaacacaaacagaataggtcaatctcatgaaataaaataaagctgcatcgtaactttttgaaatcgaaaaaaaaacatgtatccataacatacaccctacatataatcaaagataaccacggctaatctcattggcatataacctatgtatttattgattcattaaagcatataaccaattggagaaattattagattaaaaactcatccttaacaaatcagaaaaaatattcgagttattttacctatagtagcaagctatcgtagggtgctcaactttgtagctaacgaggaagggaaattactatgttacccgcttattaaataagggttaatttgatccgtgccattgccaatatgcctatttagataaatgccattacattcgtctattcgtaattgtgccactcaaattttacaaaattggaaccatgtcatcgtcgtcacgttttccatctcccccctcatctgcaaatgggactcacccatccgattcatctttctttcgccctcacttatcttcatccttccccatctctctatcacggcgaggagtgaacaacgcgggcaggacgggagggggtcggcgacgggcgtacattaagtaaacggtggttgaatggaacaattgtactttagagtcacttatattttgggaaaaattgactcggtttatggtataaataaagacatctatggtatacaagaaaaattgttatttaatttaaaatcaaataaaaataagaaatgctaaatattagaaaagaaagatacatagtataaatgatatatagtttaatttgtagaaaccaactcaattgttgtgacaccatatactttctcataaattcaaaactacacagtttgatttaattttagtttagaattttttatgttgcgtgcgtaactataagaaaatcataactaacttcaaagtaatccctagcaaattggaatatagtcaaaaagtatttcaataaaaatcacccacaaataaattaacattggtaatgaaattttaaacagattaaataaaatacctacgtatgtgcgtgggctaccttcctagttagatggaataaagcaagccaattcaatctgattctctcatctctcattctctgctttctcaagctacccaagccagggccaccaatgtcacattcttatccaattcattcatacgccagggctcataacacctatacaccatttaataaggagacataatagtttttcttcttaaatcataatatgtactaaaaatatataattataattattttaggacggagctagttgaaatctgcgttgtactgtgtaatttaaaaaaaaaagaaatactcaatccgatcctaccaaacccaaaccaaacctgcttcttcagttcttctatcctcttgcaccttatgacaacaagagcatatattggtagtttatctaacccaaccaaatatttacccctatattatactctagcttgatacagtacttcttaccgtccttaattttccaaagccgaattattttga

SEQ ID NO: 4792 - DNA, 24436 bp, Oryza sativa
attttatttacaatattagttaaaacagattttgctagatttggttatttgttcctaatggtagttgttgacaaaatgataatcgtaatttgatattcgtaactcattcaccatttgcatttcagattccttgagttacaaactgctggtgtggcgccatgcaaagtcatagaggtacatacctgcctaccttctttttgacatttcctgatgttacttgccgtcttggcctaccatggcccattgctgtggaaggcatatatcatgatatcggttcatactcagcaatcccttattgtctaaagttggacagtttttgcaaacatatttgcatttcttttagaaacacagtacaaacgcagacactcacaacacgcgcactgcgcacactcacccctatgatcacacacacgcacactctatccctatgattacctttggaagactagaccaacatatctcgagattgatgaagtcatcacggaggcacggacgccttgctgtcaacgggtacgttgcctactactgaaagaataatttgtcctaaatacgagaaccgggtgggttggttccaccacaaggattttttttttttttgctgtcaataagatggctgcgtgctttattaatatgtgtccaatgatgcctatcacgtgtggtcaaaattaagctgaaagccatactcttttgaactctgagtactagattacctcattacttgactcttccctgatgatgataaatcagggtcaatcagcaatctggtagcattatgatattatcaacttggtgtaattttcttccctttcttgattattccgcgagaaaaatgatgaatctgctagctttatgcgacagattttcaatcaacaaactcatcagtctaaattcttttggtttttttatatcaagcacggtgatcactaatcagatatcactttcagggggttgcttgcttccatgctgtggttcaaaggattcggtgttaggttacaggtaagatgcgttggttggcctgaattcttcgcgcgtgcgcttctgacagcgtcatctgggcatgggattggatcagatttccacagtcaccatttcactcatgccgattattataatccgtaacggtttattaataaccaaaaaagtaatttgtgaataaaaattttatatatgtattctactattcttagcgatttaaaagcaaatactggaaaataaactaagatgaaaaaaaatcccaaaatcaactctaaaataaagttttataattcatttttcgctgcggcttataagctgaagggtaaacgatagagttgttcacgctttcaacctgaagaaatcattcatggcattgatgcttttccttccgtccatgcgtaaacgatagagttgttcacgctttcaacctgaagaaaatattttcttagcttcctgatcattcatggcattgatgctttcccttcagtccatgcgtaagatagaaggggatctgtgcacgggtgttgtgtcaagttaggtgcaagactgaagacttgcaggacagtgaccccttgtctcacattctgaatttctgatgagtgaagtgcatctggtacaagagtggtttgttaaagtactaatcaagttgtgccattttgtaattcttttcgtaatatgatcacaaacctttacacttggcaaccccagtttgaccaatttgccaattgggttaaaggacggagattaattgtaaacgttaacaacgtaaagttcaagcttgaaattactttgagtttgtcaatatatttcaaattagttacatacagctattgcttttggagctttggtagttattaacagtatatatcactaataaaaaggtcaaaaggtcgatttaatacaattcatcgaatcaaattatgtttgtgtataaaaaccatgttatcaaatcatatcactaggcaccatttaagtacatactctgttttgcatgttatcacaagataacctagcttgtagagtttgtacttctagaagtgtgatctttgtgtttccaaaagcgagatcccatgcacactattgtcatatatttgtacctaaaaattgaccttaaattgggtggattgccaacgccaagtgggttaagaaaaaaaaggaaatgtgaacatgtatactcttttggttgctttccgtttaacttgagcagttcagataacattagggcgaaaatgcactgaggatcacattgatatggatgaaacatctggaaaagtaatctctatggtagtgtttggtttggggaccaagtgggatgggttagacctatccctttttttaggatgggatggttccggttgtgtgtttggtttgtggtataggatggttatagttttttgtttggtagaagggattgaggtgggatgggatggacagtgtttcacggaccgttagaatgggggacggaggagcaggtcggcgcgagcgaaggagaggcagcgccgcagcggagccgagcgggaggcggcgggagctgacgacgagcggcggcggccggtcgcggaggcggtcgcggacgaggcggaggcgggcgcggagacgaggcgaggagcggtcgagcggcggcggccggtcgcggatgaggcggcggacgtggcagagagcaggcgggggagggatgggtggccgtggcggagtcgagtgggaggcggcgggagctaacgacgagcggcggcggccggtcgcggacgaggcggaggcgggcgcggagacgaggcgaggagcagtcgagcggcgggggccggtcgcggatgaggcggcggatgaggcggcggacgcggcggagagaacaggcggaggaggacggagcggcgccgggagagggagcaggcggaggagggacgggcggccgtggcggcgccgcggcggagctgagcgggaggcggcgggagctgatgacgagcggcggcggccggtcgcggagacggttgcggatgaggcggcggccggtcgcggacgcagaggaggacggagcggcgccgggggagggagcaggcggaggaggacggagcggcgccgggggagggagcaggcggaggagggacgggcggccgtggcggcgccgcggcggagccgagcgggagcagacgccgttctctccgtcgaagtgggatggattggtccggccgattttggcggaccgtttcgtcccggatctgggaggaatattcctctccagggaccatcccatcccactcacctctcaaccaaacacctctaaaagtgggttcatcccatcccatcccatcccatcctctcaaccaaacactacctatgctatcgcggcaattgttcaaagtcccgaagaaaaaccagatttactaacggattatctcatctaattgttggcttttctataactttgacgtgtggtcttttttctttagttaactgatgttgcattgtggtagttagaaatgcttcatatgaaagccttttctcgttaaaaaaaaaactagtggcagtggtggtcgtgattatttttttttccgattacacggaagatgcacattactagccgagtgtgtctctcaagatgttgaagaggccaatggcaaacttctaacgtcacaacgaattattgaaagccacccatcttctcgatatgatgttttaataaaatactcctaaaggtgtttcacaaaaaaaaaaactcctaaatttttgttaatattgcacaagagtctttccacaccacttttatctaatgtagaaaggcttaagatgatcaaatgggcgtgaatatgaggtatgagcttatgttaagattgttcttgcaaaaataaatgttaagattgtgtttttcaaacactatcattctatcaagttcttccctgtaagaaaggtggtgtttgatgcgaacagaaagaaaacccactcattcgttccatgcagcaagtatgattactttttatactatagcgagcgcccaggtttatatctattttacaaaacgattttgctaaaacatatggcgaagaatttttgggagaatatcagtccatttcttgtctgtttgatctgatgtgggcctcatttttcggcctaacctagcaaatgggcctttagcaagttaggcccagtataacttctgtcagaaaaaaatgggcatttgcaaatttaccaccggttttttaatattgtaaagatgccactcgaatgacagttctagtggcatttttgcaattttctagtggtaaatttgaattgcctaaaaaaagggtcaacttggcaggcctacagatagttggaccttttgaagcaccctaacgaggggccgcctaatgggagccccccccatccccctatacactgctctcttccttcctccaccccttcttctcttcctaatacaccataaatttaaaaaaaataaaaaacacaaagttgaaaaaacttatgtatagaaatactatataaaaaaatttgaattcaaattcaaattaaaaacaggtatgtaaactttgggtctataaactaatatttgaattcaaattcaaatttgaattggatatgtaaacttttgatttataaactttggatctaaaacttttaggtgtataaactttagatgtatagaaatactatatataaaaaatatttgaattcaaattcaaatttgaatcggatataattcaaattcaaatttgaatcgggtatgtaaacttttgacttataaactttgggtctataaactttaggtgtataaactttagatgtatagaaatactatatataaaaaatatttgaattcaaatttaaatttgaatcggatatataaatttttgatttataaactttaggtctttaaactttagatgtgtaaacttaaggtgtacaaattttagttgcataaatttactaaaataggaaagtaatgcggtgccaaaaaaggaaaccacgtggaggagaggggggcgccctaggggtgatcgccccttagcaatctcgccctaatgactacttcctctgttttctattataaaactttctatcattgccaacattcatatatatgtcaatgaatctagacatatatgtttgcctagattcattaacatctatagggatatggacaatgctagaatgtcttataacctgaaaatgaaaaggaggtagtataaaaaaatctaaactatttaagagagattttatttatgagaaaaggtgcaacagccaaaagcttctcaaacaggtgttccgacaatgcaatggcttgtgtggtttggttccaaaacttagccctgctaaaacatttataacttcaatagtaacttatacgtattcgaattgaagtcaatgtgtgccagattaatataacttgagaaaccttgccttactatgccaaaacttaagcttttcacattaccaatattttgtaggctaccaatccaacatgccctaaatacacttcctgcaatgcaactctcagtgtatttttcaattgatatgattgtgttttctattcaaagtcatacaagaaatacagttccttgattggtatatatgctaaagacggatgagcgacatacacaatctacccctccatttaaaaatatattaacttttcactacacttatctagatttgtagctaaaaattgttatatctagattcatagctaaaaattgctatattttaggatagagggagtagcaaacaatatatggcacgtgctaaaatgtgtactccctccgtccaacaaaagataaaccctgggttttcgtgtctaacatttgattgtccgtcttatatgaaaattttttataattagtattttcattgttgttagatgataaaacatgattaatactttatgcgtgacttttcattttaatttttttaaataagacagacggttaaacgttagacacggaaactcagggtttgtctcttttttttggacggagggagtacttgataccatttatattaagggttaattagatacataccattaaaaatttaccagttttaaagtatgccattactatttacgtatttataacgatgacattgttgtttatttgtaatctcaatgataccattaagatacgtattaacgaaaacactctcatcttctacctccctctcttccctcatcctgtcatctttctctgctcatgctgctgctgctgctctagatcgattgaagatggatggcaaggacgcttgctgcttctgctagctcgacaggaggccaaaaatggctgtgtgctgcaccggcggaaaggggacccacggcgacgagcggcggtgcttacgatgcaaagacctagatctagagccgctgcggacggagcggcttgccattgtggacgacgacggcggcgcctgggcgccgaagacctgatggaggctcgatctgcggctgctggttgccacgggctgcttgctgcttgcttgaagatgaaggggcgaatgagcttgctggggctagtttgctgcttggagaccacgacgaagaaaaagactcaaatcccatcgctggtgatgcctccctattgctccccgactgggtcgagccgtgcgcatctgccgtgggaattcggagcgccagacagcactgcgcaggccgttgtgccaaatgaccttgtcagatgcagtgatggggaagatgaacagtggagagaggagaggaagaaggaagatgggggtaattctgcccaaaaagtttaggaaatataataaaggggcaagtagtggcatatactcactccgtcctataatataagggattttttttacttgtactgtttggccactcgtcttattaaaaaaaaattgaaattattatttatttttttgacttactttattatccaaagtactttaaacacaatttttcattttttatatttgcacaaattttttgaataagacgaatggtcaaacaatgcaaataaaaactcaaaatcctttatattatggggcgaagggagtaccaaataaccacgaaattataatgctatggttacaaatagttgaatactaatggtatattttaaaaccaacaaatttataatagcatgaacccttatattaaaccctagttgtccatagctaatcttgtgatgattctaaagagttcatgaatgcgtctttacttaacataacatgggccaacttttatttggagtgtctctacgtgggcctaaaacaatagtggtttcaggccgaaaccacattgtcattaattaagcgtatcgattgttgttttgcctctaaaaaatcgtactcctagtatatctttttctgacgataaacagaatgcggttacccttggtacccactaaaactaaaactcaacgtgcaagcatgccacatcatcacctactaataattactattctagcccatttaaaatcccatgcaagcatgccacatcttcactcactagcaattactagtctagcctattttaaatctcatacaagcatgacatatcatctataatattatattatagagatcaacaagtatgtgtcaaatcatcttcctcacattattttctcagcatttcatctttcatcatttcgacaatatttaacatatactcatccgtgaatcccgcagcaaagcacggggtatcacctagtataatagatgattctccgtgttttgcttggagaattattaagtaatctttaatatatttctttaaagagtaaacatgatattatttattaacaacaaataaaactgtttatcaagccatatttgaagataaataaatttaatatagattgcaaataaaatattaggctattggccaatataagcatcgcaataagcgaaatataggaaaaatgatgaaaagtatattagtaatactaatcataaaacaaactaaataatactccacgctttgatgcagaatatatggatgaatatatgttaagtattataaaagtgatgatagattcgttaaaatattatgaacatgatatgagaggtgatgattagatatgtttgcatgttaatttgtagaattcaataaattaagatgatattgcattcttgcatgagttttttgataaataattattactagtggatgataaattgatgatgtggtatatttacatattgagctttaaatttagtggcttgtaatttttataaaaggtatagataaatatggaagtttatgcactagtgaagacagattgtgccagcgaatgcaggttttcgatcataaaggtcctccaagaaaaaggtttttataaactcgattacctaaagattataattaagcttactcagcatatcaaaaggaagtacaatacgtgcttccaagaacactactacataaacgatttttctgtataagaatcctatagtttgcagagggaccgtatctggtcccatttaagaaaattgacttgcatttttgcagattttttttaagaattaatattattttaatggaaaatcgcaaaagtagaggccatccagggaaatcgcgaatttagaggcctgtcgaactggtgtagttcgataggcccctatcgaacggtgagcgttcgactggaccctgtcgatgtgcctatcgaacagagggagttcgacagggcccaccacccggcgccgcgcggcctgtcgaacagggagcgttcgataggtccctccaccgcccctatcgaacaatgggctttcgacaggcccttttaaaccgcgtgcgcctaggccgcgttgcttcttcgtttttctctagaccacatcgccagccgccgccgagagtcgccactgtgtcgctgtcggcgccggagggagtaaggggaggggctagcaggccggagaggaggcgccggccgggaggaaagggttggcgacggcctccaccagtgaagttaaggtatacattactaatccctaagtacgaggcatatgaaagtttaataaaaaatggcttgtgatttgttaattgtttcgcattgttcaatgttagtacatatgatttgttagcatttgtcattgctaaatattagtagagatatttaagtaatcgtatggttaaattagttgttagttaatacatgttattaatttgttgtgtgctaaaataggtagaaggtactatattttatttggattattaaagtagttgtttgtcaataatagttgtaagttagtacatggcaatgtagtataaattgtaatagggtaattatcgaaggcttaaatgattaaacgttagacaatttgtcatgttttatcaggatgtcaggtgaaatgcccattcgtctgtattacggtgatgctcctatacaaatatgtgatagcggggtggatttgactgtatatgacttccatgatactagtctgaatgcactcgagcatatgggtttgaacgacgtgttagggtggttgtataatatgtttgggggtagatccagtgctcgataaatttgtcttaaaagccgtgtgatcaataagggttcaacatggatggcagtggagagtagtggaggttgcatcaactgggagttggaggaagtttgttagtaaagtaagggagaaacggtatagcctagtaaagtaagggagaaacggtatagcctggcaatactaatgcagaagacaacatgtgttgatcgatcgggggagtcaagtcatgccatggtggaagaaactccattggaaggtgcacaagcgaaaaatgtttggcggattgagcaggtcgaggggaagaagtagtagagggtaatacacaagcagaggtcattgttcgtgacaataatcgtgaggccgacgactcggacgacgaagaaccggattcgcctatgcgtgttgacgtagcggaggagaatgaggcagtagtggatcagatggcagtggaaaatgaggaatacattgcacttgtagtggaaggagaagatacaacactgtgggacaacgaaaccaacatacccgatgattagatgaccatatcgatgagtcgtatgaatattaacgatggtttagatgcccactggtgttatgatagtaagcaggtgcaagttggacatatgtttcatgacaaaggtcacttacaagatgcggtgaagaggtggacatttgaccagaagcgtgagtttggggtgaaggtttcaactaggacgacgtacgacgtgaagtgcacacaggctggatatccttggagagtgcatggttacaagccacaacatgacaatttatgggtagcttcaagggttgagcaacatatgtgtttgttggagaatacccgtccggtacacaggaacatgactgcggcatttgtggcacaaatggatattcaaaggtggttagaaaaacatctttgtcccctttcacaataatacatgacatagagaaaaagtatggatatgagatatcgtacgacaaggcttggagggcaaaacaaaaagcactggaaatgaggtttggaacttatgaagattcttatcccaatcttcccccactattggaggtgatgcaggcaagaaacccgggcacacacatggctattctcgacgaggtgaatgaaaatggggagaatgttcttcgtcgggctttctggtcatttgggtgtatgatagaggccttcagaaattgcattcctttgctttgtgttgatggtactaggcaagtacagaggaacaattctaatcgcgatcggagtcgatgcggatagccatgtcgttgctgttgcttttgcatttgttgaaagcgagaacacatcaagctggctttggtttttgcggcacattaaattgtgtgttgttcgaaatagaccaaatgtttgtgttctgcatgaccgacacgccggttcaatatttttaatcaatgtgcaacttgttcaatactcttaataaatgtgcaactacttcaataattttaattgccttgcttattgtggaataggcggaatttgttgagcacgttcaagtagagttcgacaccctgttgcaaagactagagacgagacctccagtcgtcaggcctgacgatgtggcgagcgtccttcgcaacttccgtgcctgtgctgccgcactactttgtcgtgtctcctgcgggagcgcagcagatgtggtgcagctgtcggcctgtagggcatcaccaccactaccccgttgttccagcgtggatcacagtggtctatccacgttacgttgcgggtacgaagcagcccacacatctcacagtcgtccttcctttcagcacaccccagcactggagtacaccagggggtcagctggatcaggggtacccacatcgagcacggcacagccacgtccgcaggtattccaaactccgccttatgttcaccccacccagggagcatctgggttggcacacctcccttacatgccaacaggggacaacgtgttgaacacaccggcatggggacttcatgtcactccgcgtgcgctagatcaaggccacacacagcacacatgtaagtcattttaaacaataacacgctttagtttctaattatatgtatcattactaagtatgccatttttggtttctccctcttatgcaaacagatgatgagtactcccctcgcacagcattcattgaggacttcttttccactgagcctcctcaaggggaagcagggatggattattggcacgcagcacctcaggtcacacagccgacacaggagacaaaggccgttcaggcacccgaggtgacaccacagcagacagcaagagagaggcaccccccgatattttgacatatcccactgagcagattagacgtaggaagaagggggacctagcaagcgtgcgaagggaattgatcgcccttgacttatctatttgtattaaaatttgagacatttatgttttatccctactatttgtcaacactttattattaacttagttattatcattactgtttcataatctttttcagatgaattcattttttgcatacccttccaatgaatcaggacaaatgattcgcttcgaactttgcggcgcactataggacaggtgcataaatgcatgcacgtggtgtgctatctactttcggtgcacatgtccctttgtggtccaccccatttttcaactttatcaactgcagagttatgaaagcgaccatgcgagagctcgactagtcgtgatcacctttcagtatagactgctcgctcgtgcccgtcaagtctatccacacatcaaccctatcttcaccggtacgcttcctgcagttgttacggcactataaatacataccttgaccaaacaagagctcatcaagtcctttcctctttacatttcccattgtcttcagcatcaagttcaacacaatggaagctccattctgcgagcatttagactggcggagagatccactcgcaggtaggggtggaaacaagccgagacgagcctggcttggctcggctcgtgaaagcttggtgcaagggaagctcggcttggcttggctcgctacaaacaacgagctaaaactgcagctcggctcggctcatttatgggctcgagctggctcgcgagcctggcatcaagtaaatctcaagcaggtctaagagaaatggagcaacattttaccacatagaatgtgtaataaagtgatatttttctttaatatgtcatcacaacacataaatagataatatgacaatcaaaattattattttcaacaaataaatagttagaaaaggtgtaaaacttgtgcatatgacactattgtactgagccaagcgagctcacgagcggctcgtgagccggctcggccttggcttgtttcagaaacgagctaggaaggaggcttgggcttggctcgtttggctttcaagccgagccgaactatgtgagcccgagccaagcctgagccgagctcacgagcccaagctttttgtccacccctactcgcaggtctatttccaccatggtgccaccgtccaatcttgcccttggccgtgatcaatggtttacttcatgacatcacttactactgaaatccacggtaggagatttttccaatgcccaaacatttaccagggaactgttcaatccattgttatctctacatttgcacatgtttaatacatacatcgctaaccacatgtctacaatatctcgaattttcagacttaccatagtttatgcgacttcgttgagtgggttgatacgatgaatccacaacgtgacagggcacgcccatatccatgcagcgaaccattatcggactacctaaggaggaaggatgagtacgaacgatgaaaaactgccaaatccttacaatggcaagtaaatccactgggactccccacttgacgggagcgtccagagtgtaggtgtggagaccgttgccaggtgataaggtccgttcgacaacgaactctaggacagagatgcttcgtgtgtcctaacattgtcgacgatgattttgttgtaagtaccactaatttttcactcactctcattacttctgtcatatacctacatatgccaacggtcattaatttctgcacacaggaagaagaccgcaaatgtagctatgtaaagtggattgatacgacgataactcaacctaagacaaccacacaattcattcaagcgtggatggagtacgagcgccaggtttagtccgctagcttacactggagatcaaatccattaggtatacctgaatggtctgatcatcccaaatgcagttgtagagatcgctgccaggttgcaacgtccttctcacaagatacatatggcaggcggtacttcgtctgtcccaacatagacgacaacttcgttgtatgtcacatgcttaattattaatttacattttgcttcgcgttcccataacatttatttcccattatctaatttgattgattgttcaggggaatccaaggatgtgtgcttttacttcatggatcgacatggtcagcccgacgtatgaaggcggaagagtaactaaagctgaaacgcaaacataatataagagattgaaggatcacgaagttgcattacacacacaacgacgtagaaggggtcaatagagaagcttaacccctaatcgctctagttcggccttttgttatgttatgtttgtaacatacccaagcctgtaaacctgagaactaaatttaatttaaatgcatcatgtggttgtggagtggttttaattgtttttggatcttaatcatctcatcatatgcatcttgataggcctagagtcacaaaaacaattaatctggtaattatatgcatccaaaacttccacaaaaattctcaaaaaaaaaaaccttgatatgtcagaaatcaacccacaaattttcagagtttttcagtaaggtttgctaacttgttgatctcctttaatctctccaaaatcctgaaaagaactgcttagtagattcaaacttgctctctctgtaaaatttatttcaaaacctctttttgaagtttggtttcagccaaagtcttctactaactttcttctaacaccctgaggagtggcacaccctggatcactctctaaccctttcttctctccctccaaaaatccaatcagctgctaacttgtcacgccctgaagttttccccctttttgcttgctttaaaaatttggctaaataaatcgtccgaagaaattatcttaattaacctagagctaattccctaattaataaatgcaaataataatcggaatcggcatgtggaatttttcttggattctacatgtcacaatatattaacaggatttttagtggaattttcagagccttggaaataattttaaccaattaaaaatcaccaaagtgcaatttttaatcccaggaaaaatcctttcttctttttccttttttttttccttcctttttctctattgggccgtcggcccagcccactccacccgtcgcccgcgctcggcctccccttgtgggccggcccgttctccttcctcctctctccgggacgctgacaggtggggcccacctgtcaggtcgtccccttcctccagccacccgcctctgacggcaaccgccgccgaatccgccacgtcgccgcctcctccgctcttcccgcgcccacgccgcgccgctcccgcgtccccctcccacgtcgccgcctctcccccgcgtctcccgccctcgcgcgcctcgcaaatgggcgggattcgaatttgaatcccacccctctctctctcccccaccttcccacgtcgccggcgcaataggatgggttcccggccacgaccgcctccccctccgcctataaatcgttccccgcgtcttcctctctcgttttttcgcactcgccgcgctctcccgtgccgtctaccgccctcgcgccgtcgcacccgagctccgccgctggccgccgccttcggccgcgagccgccgccgctagagtcgccgccgcgccaaaccgccgccgccgttagcttcgccgctacaagagctttcccggccgccgcctcgcgtcgccggaatcccaccggagcacctctcccctcgcgagccggtgagtttttccctcccctccatctccggccggcaattcaagccgccgtggtcgtcgtctcctctcctaacgcctctccatcttcccctagggtgtcgccgccgcccgtccgtgcctccgcgtcgccggtcatcgccgctcgtctcttcccacgccggtcgccgccatcgcctcggtgaggaatcacctttcctccttcctttcctctcccccgtgagcgccgccgccctccgcgcgtgcgtcgtcgtcttcggctgccgccgccgccttcgcgccggtcgccgccgtctccccgcgccgccggtcaccgccggcggtcgtgcgccgtcgtcgcctcgccatggccggccggctcgagccgtgccaagccaacagccacgcccctctcccgccctgtgccgctgcccggtggggcccaccagccggtggaccacccctccctctccccttgtgccgctgccagtggggcccgcttgccagccgccccctctccctctcttagtgtcgctgaccagtggggcccgcatgtcggcgccgccccctcccctcgctgacgtcagccctggggcaataattgcgcaataattaattaaggacttttctttattagtaaaaacacagtttatcttctaaaaatcataagtaaatcatccgagctccgtttaagtccattcaagtctcagtaaatcaagaaaaatgcaaagaatccattaaaaatggttttgtttcctgtttctgtagtcttatagcatgttttgcttgtgtgctttgtttgtcgcgtaggtttcggccgtttcgtcgatccacggtttctcgaagacgttgctgtgatctcatcagtgcgagagaaaggcaagtcatgcaatacgtttgatcatattgtacccaatttacaaatatcccgcatttctattaaatgtgcattcttttacaatatcatgtgggatgggtcctaatactcagccatttattgtttaccttatgccattgataacctgggtatcaaaatgactagatgttggttaggaaatgcttagccatgcttagttcaactagcacacaaatggggatcaccttattacatagactttgtctattggcatagctttagattggtgccaccgcaatggtgttagttaattaaaatacactgaatggtgggctgtgggtgcatggttttgctggtcgcacccatggcagttaaggaccagttcacgggaaaccctgggagacttaccgtgcttaccacaagcgggagtgggtaactgcttgatctgaagtatagctcgaccctttcctaggcaccggtggcgagggtgggcgtgatggagttgggtcggccggggtgtccggttgtccagctgccggattcaccgcggcgcaagaggggaccgcccactgccttttgaggggtgggggtgaaaccttagcgtggtgtggatggttaggggagggttatgtggagggtcttgtcacgatttccccctttgcagtatcatggtgatacttcggggcatggcgacatgtgtggaatcgtgtcttgtgggtacagttgtacacctctggccagagtaaaactattcgaatagccgtgcccgcggttatgggcgatcaaccagattcaccgtgattagtctcacccctagtttagcttaatgaactggtgtagttcaggaggttggttgggcctgttgcaacgtggtgtagcgttggacagtgtttggttaatattgattaattactacagctgttttactgcttccaactactgcttttaaatgctagctttatgcaaaagaacctctagcctcctttggttatatcctgcatcatacctcctcttccggtatgacttgctgagtacagtgggtagtactcagtcttgctctcttttcccccacaccagagctgaagatcttcctagttggagctgttttgtcaaagttggtttcgtcgctgccgtcaaggattgcctgtggagtggagccgcccgctgctgaagtcaagcttcccggtttagctcgcttttattcttttccgctgcatttgtaatcttttctatttttgtaagacgtggatctgtatgtcaacaattgtcgtttgtgtaccctggctggtcctggacagggatttaatgcacattcagcttagaaattctggtttgagaatttctgggcgtgacataactgcactgtcaactgctgctaaccaacactgtcaatacatgttcatcactccatcaaacctaaaccagagacttctaacccaatccacttcagcacatttactctccacatcacccctgaccaagaggatatctagcccagatttcttgctgcacaaaatccaccttgaatcccctccaaagatccttggcaggcaaccctctttgacagcctccaaggctattttcgaatttctttcactgacagtgggccccacaccctctgggacccacatgacagcctcccactctcccctcacagcatccaccgtcccccatgcccaatggatgcccaaggaacacaatgaaagcaccagcgacctctctctctctcactcccccactccactcttccttatatcccatgccaaagcaccagaagcaacagcacactccccacatcgcgttccaagtccaagaaaacacaccccacgcacagaatgcccagagctcggccgtcttacccggctccggcgacttagccgttgtcgccgtgcatccctggtgagttcctctctcttccctcctatggaatgtgacctacgcatcacgctgagctcacccgtaccccttttgccctaggaccaatctgtcgagcacgtggtgggcgtcaccgtcctcgccgccggccacccgaaccgccgacaccgctccggccgccgttcctcaccaccgaagcaacaccaagctccggtgagtttccgccggattcctcgtgcatgcaccctctgtggctcatctctaacacccccgtactctcgaagttgcagttcgcgccttgagttgacccggcgacgccgacgccggagttttaccgccgttggccaacaaccaccacctcctccgctccctggacctcgctgcctccgtttctctgcttggtgagcaccctggtaccatatgagagcacatgcactaaccctttgcactaaccaagcctctgcatacacatgcatgggcataccgagacacaccgccacttatcggaacttcctatggtttgtgatatgatgaaattgattaatgatatgtggtatgtgatgattttagcgggtagtctatccaatacaacggtgtcgtgcctcgtgaggtattccgggctgggttccttacggcgctaggttaaagcgtgggcccgctacctagtggcgctaccttgctagtagcgtgggtaaaacacacatcgtgctggtgcaaggctagacaataaacaatgtaacggttccgttatgacctctagatcacactcaatgtgtagagtgtggtgataccgacgggtatcggaaaaactagagcgatccatatcatgtgggcttaaaagttgtacaaactctgcagagtctaaaactaatcgattagccgtgctcacggtcatgagcggcatggtgaagtgtcatgagtataatttgtgattttgataaactcttgtgaacctggaaaatggttggaatgttttgtttgtgaacttgggtaaagttcggtgaatggtgatgagatgatggagagtggtgatgatctaccttgaggggtagatgtgtattatttattcattcacattacaagttttacttactctatactattgttataaaattccgttgcgaaacatgttgtgaactaaaattggcatttatgcaaattaacctatacacagcttatccttgaatatggccaacatgtagtatgctaggattgtttccgacttgccagtacattaatttgattaatgtactgatttcttgctttctattacttgtttatgctcggaccccgctgcaggtaatgactgtttggatgaggagtttgatgcagcttgtgatgttgcagatttctaggatggttctaactagggatttatcctagtcggtttgcctatgggcttttgggtagcacgcttaccgcatgaaccaatatttatggcttgtcaccaagtactacttagaaccttattaagattatttatgcttattgcttagaaccacttattatttggatatcatgcttgagatgatttatgtgagactatgttgcattcctgggcaactagtcccacatgaggatgggtttgaaatggttgagataaccggggaatatgcctttgttgagatcgagtctctggggtacgcttttggtcgccaccattgagtggttgacgggcgtatgacatagatgactagtgtggctattccaatggttgtgtcttctatttcatatctgatggcttagagcctatgtagtgcactcttcaagacatgtcggggtctgtgatgaggttggatggttaccgtatttatttgggctttatttgagaccccatccatctagatatttcgcgctgacatgccttggagcgttgcaccacctaggctttgggacgtcctcacaatgttgttgtatgcctcatgaatggattatgtttatctatgtgttagctaatgtttcattctctttttcatctattaagctcatttgtgcatccgctgcaatctcttcgatcccctcctattctttatccgtccttactaaataaattgcgacaaagccatgaaaccaaaaatatatacaaataatgaaactaaataatccaaatattttaaccaacaaataaatactacaatttcccataaaatatattaaataaacaaataaatactaatatttcccaccatacattatcaaaaccctaaaccctatacatgaaacattaaaataatctttccttccttacacataaaatattacaataatgaaacaaacaacatattattaaaaaaaaatgggcgagtggaccagtcgaacaaccgttgttcgacagcttagcctgtcgaactggtggtattcgacaggggcctgtcgcactgcccctgttcgacagcccaccctatcgaaatgcccctgttcgacaggccccgtcgaaatgccactgtttgacatgccctgttgaactgcagccgtttgatcgccttttcaatcacgcgccggccgttcgatatgtgccctatcgaactacacccgttcgacaggcccctatattcgcgatttcccccggttggccactacttttgcgattttccattaaaataatattagttctaaaaaaattccatttttgcatacggttgcttaaaacgttcgtatacaaaaattaattttcacaggcggacctcttaacatacccgcatgcaaaaatgagtccattttcacatacaggtctcttaaatagattttcacatgcgggctacatggagagcacttgggcccacacacttttccgcaccattttttctccttctcctctttctctgcaccacacctttttttctttctcttctctccacgccataactcctctcccactccctctcccttcccccccttctcttctccggcggccgaagcggtggtagctggagcgagtggtctgcggtgggctcgaatgggagactggcggaggagcggcgcatcgacggtggcagccttccccccacgcagatccatcggcgggctcgagtgggagaccagcggaggagcagcgcatcgacggcggcagccttcctcccacgcggatccggcagcgatggcccccctccctcatggatctagcggtcccctctctcacgtgtgtggcaggcagcaaggtggacgacgatgagcatgacaaaggtggtggtggcggcaacgacgacatcagcttggggctagggtttttgggtggtggcaggctagggtttcggctagtttggaccgcatgtgaagatgagatgttcgcatgtggttgcgctgcccacatgaaaaaaatactgttcacagacatctaggtgcatgcgggccacccaatctcatgcgaaaagtccgattgcaaaattgatttctgtactagtggtacgccacactctgttttgtttcatatcccatgaatttcagtgtatatatttttgcggaaaaattcaatgaattttttgagagaaaggttcaacttatatgatgatgaccctatcgaaatagacacgctactaaaagagaacgtgctggttaactcaaatggacgacgcactacagatggtcctgattcttttatatgttttccccattgaattcgatcggctggcgaagtgaggtcggttcggtgtggtggaggcctcatgctaccacttttggatagaggtaactgagatggtggatggtggataaggatcgtatcgggttcaggtgtaaccgtgtaagtctagactggcgaatcattgggccgatagtggtgatgcctatgggttaccataacccccggacgttgtcgaggtgcctccctcctgcttctcttgacataaatctctatgggcaaccatatctaggttcctatatgagcagcgacggtatatttggcctcataacctccatggagacattgtttttgaagactttgtcttgtggtgcggtgttggcattggcggtgattggccacgtatagcagcggtgaggttggtgctaggttccccgtcttacaggcttgtgttttgtgaggttagcacgtgctttctgggcgtacgctccggtgcacggacaacctcgacaggcttctattgttgtaattaaaaattttcttgtaatcttaataccattggatagtctcttcttatgccatcccagctaaaaaacatgaaattttaagcgaaattaatttgaatataatatttctagattgatatccttcttgaataattttgaatttgtttgtttttagattgatatccttatagaataattttgaatttgtttgtttttagattgatatctttctagaataattttgaattttacccaagttcatgggttaggcgcccggtttaattagggtgttggacaaacttttattcgaagtttgaaaagatattattactgttcataaatgctctcacatagggctattgcaaccacccactcgggagctagggaggaaaatggtctgaaacgatcgcaaaatagcctcaaccatttccataaccttatttttcttggaaacaaaatcaaatacggtaaagtcggaaacaaaaactatatcggaattattggaaaaccagaaacgaaacaatacatacggaaacatgtcggtgcagatcgtaaaccggtaacaaatacggaaacattaaactatgaaaacatatatttaactttacataagtatgttatatgtataaataaattcaaacttatactatataaattataaattaacttcattttaaccatgcactcaagttagggatttgattaaagagtccgtcaatctctaaattatgggtcaagtagagacatgccctataaatcatatttagaaatacggtaattaccatattataagaaacggtaatttccataagaatacgtaaatacagaaacgatcggtataacagcaaaaccatttccgtttccatatggctcgcccttaccggaaacaaacgtcggttggccgggaattaccattaccgttttcaccccccccccccacccccccggttttcacccctatcgggagtagttgtggttctctgaatgaatgaagcttcggttatattctgttagtcttaaaatatatcaatctcgattaaatataaattcagatttatagtatatttaatctatattgatatattcaaagatggagggactagttctgaaaaatacaccagtactgaaatgtgaactgaaaacacagactgtgaatgcagcctctttggacttatcatttgcagggttgcgtgcctttcggtcgctgccagagatagtatgtctgactgatgtcacattgtgtacgtaaaagcaatgcaacgaggacagacaaggactgcgccatcatgttgccactttcttgacacaacagaatgggaagctcattcaccgtacaatctctcataaaaagtcttattactaactgaactcatggcatgacattacagctacagaagactggtggcaactggcaactgaacatcaaacaagtccaactatcatatctactgatgaattgatctcaacttccattgcgcagcccagcgaaaagaaaaaaaaacttccattgcgcagtgaaatttcaggttaattagaaacaattagtagtgatcactcagttctgacaaaatccctttgctagagcagaagacacaactttcacaatgtaatcattttgatgattacatttctctttgcctctcaattcctgatgcaaggcactttccataattcttacaatttcccttacaattttgccataccacaggatcacataaagaaaatttgtttggcaaagagaactcgatgcttatgtttctagatgcagacaatgacatatgtttcacatccattcccatttttacctattctacatttctttttgccatccatcctaacatcctatgctaacatcaaggatagacaagcctcttagattcagaaggggagctgatattttgctgtttctgggctcctgccacccattctttgagccaatccaaacaccgaatccaagtgtctgcactcatcaaccatgtcctatgcataattttgccgccaaatgtactcctgagtcttatttctcaatgacatgtgttgttaattctggagttaggtctctttattacgcacaaaatcttcgtctctgtgtaaggagagtcaatgcaggaaaacagtgagatggaatatgcatatgatacgccaatccatg

SEQ ID NO: 4793 - DNA, 6322 bp, Oryza sativa
  unsure (1)..(6322): unsure at all n locations
ctctctctcaatgatggtaatattcaatgaagacctactagccttgcccaccctttatttgttaaggttggggaagggaagaaatgtatcctacattttctttgtttatgcattaaatgtgttgctttcattggtaggatgtgagctaacaaaggaaaatcaaccttttgacagattttctagtctttacacacttagcttagataaatggcattaccaaaaatcggagtcgccaaacgaacaagatttgccaaccaaccaagatttgccaaccaacatattctttagacaactacacaaagttgtctataacacgtaatctacacaatcacaatatgccccaaaggggtatggacagataagcaatcagagtcatagcccagaactagcaattccaacatagttggatgttggaatatttagcagcatatgctgcaaattttgaaggatatgtgatgggtgaaaacaatcaccatgataattgtttacaatctttctcatcattttggtacatggttatcatagacctctaatccatatcaagttgtaagggataattgttccacctatggatattgcatttagtataagtgttgtatatggctctatgttctattagtgaaccatattaactttttattctcgttagtgtccatgtgacgaggactgacaaggtcagctcaaggccgaggatgttactccgtaggtcgagacatcaagtggccaagacaaatcatgatccgtgtgttctcattctttgttcctttagctgattgcagtgacacgatctatagtagatgtgattgctacctccaaatttatctatgttattcactcataaattaagaggtaatatatacaatgtcacccctaatacacaaataccaatacctataatactcccatatccttcttggagtttgtgtggaggctacctcttgatttaggagtgactcatcatctctcttctccacctcatcacccaattctatgtgtcacttttaagggtaacatatgaagcattatagcacttaccctaaccacatgtacacaccactgtttgtggagccaatgattgacttcccccataccaaaaaacaattgtttatgatagaggctgaatgagcaggacctacaattttatgggcaatagtagaaatctaattattgaccatccttgaaaataaattaaagctatagttcgagagacaaatttatctgtttgatagaagtggcattcttaatcttggaaatccaactaatgataccttaattgattattttaatgtcaagagtccatttatataaattatgaatctggaaatggttcctaataccccataggttgagtagtagaagtaaaaatatgcccaaggagagggtctcctctgattagctaagcttgttgcagcttaccaaaacgatgatcaatagcgggtccaataggatgaccaacaacgctagggctgagttctttctccaactttccaactcacctccctcacattccgcgcacatgcttttcaaactgctaaacggtgtgtgttttgtaaaaagtttctatatgaaagttgcttaaaaaatcatattgatccatttttgaaaataaaattacctaatactgaattaatcacatgctaatggaccgctcaatttttcgtgcgctagaaatgtattcccaacacacaacaacgaacccagcctaggactatgatacaatagaatcctgcatactctctctatcaaaaaaaataaatttagaattggatgtgacatattctactctgtccagatggaataaaaacaaatctaggtttttttacagtgacagattaattccatgtgcaggtgaaaggtctacacaggtagtcaacttcttttgtctttatcgttgaaaaatcaattatgagagaagcctgaaccattaaaatggggttgcgggagagcacaaggcattacaatttacaagccttgtgctgctaggtaaaacagcagagtaccccatttttcgtatggctaaggctgagtttaatgagaaggtgaaagagatgatcgggaagatacgcaaaacgaacgatatgagctattagtatatgattaattaagtattaattattttaaatttcaaaaatagattaatatgatttttttaaagcaacttttctatagaaatttttttacaaaaaacataccgtttagtagttcgggaagcgtgcacgtcagaaaacgagagaaatcttctataaaatcagtcttcatcacactctcagtgagaagcctgtttttgacaatttatgactcctgtattgtgtgcagtatatatgtatctttattatgcctatgtatgttggttgattttgtcgacttgtgtcgataagggttaggagaggatctaaaccaccggtttccttatcctaacaagaaacaaactaagagataaattcgttttttgtgtgatcggtacagaaaacagaatcctaaactaattgagataacccccgagcctcaccaatgtcgcctatataaagaaagagaaggaaggagacagacgaccaaactctctctctctctaatctcaaaccctaattaatcgcccgatcgatctaggcactggaaggggttcgtgaggcatctctgcaagaagaagaaagaagaacggcaatggcttctaactcaggtaagtagatcaattatttttccgcataagcaagaggtgattgtttatagactaaagcttaagatcatgtaattagaactccaacattgtggtatcagagcctaatttttagtccactcaatccctcataatcacatcatccctgtgattagaagccatccttataaaaatacaagattgattcggcatgagcaattttgaattagattggattaatttctttaagtattaagcccttttatactggtggtttcggccatcagtaggagaagcaaattattgaagaagctgtttaattcaagttttcgattttgattatccatcagtggagattaagagaagaaaagggattgggataaacatattgaaactcccaatttcctcgcactcagaaccctaagccgaagctaagaaggggataaactagattgaaattcccctaaatttagcaaagggaaattcccaattcccgcactcaaaattcctagaccgaaactaaggtttcggctagtactcagcaaacaagaattaggggataaacaagattgaaactccccacggttaatcatatgggaataaacaagattgaaatttcccgaaatccccataagccggatccaatcggcctaaaatccccaaatgaagaaccctaattctttggggaagaaccctaagtcacaaagtccgaattaaatccaaatggaagaaaattaggctcgggtttggtgacataccggattttgaagccccctaaaccggaagcagcatcgccgccacttcacctccttgcggccgcgtcggtcttcccgtgcgcgcgccgtcttggagtgtccctccaccgtccctcgccagggacgggaagcgccggcttggcggctgccttcggactccgccccctcccctccccgccgacgagctccggccgcgtcgacgttcaccgtcgcctccgcgccgcctcgccggatgtaacatcccggcctagggcttaataggattaatagaatactcatatcaacaagttgcaacttcttttccggaagctttttccggaagccaatctccgaagaactccagggttaagcgtgcttggcctggagcaatttgggatgggtgaccgaccgggaaattctttccgggtgcacacgagtgaggacaaagtgtgcagaaaagatatgtgttggtctgtgagggcagtctatgacctatgaaagctatcagatgtaagcgggcccggcctgggggaaggcgggacgttacaaaatggtatcagagccgactctcgcggtttcacggatatgtgttggtctgtgagggcagtctatgacctatgaaagctatcagatgtaagcgggtccggcctggggggaggcgggacgttacaaaatggtatcagagccgactctcgcggtttcacgggcgcgtgtcgcaattgcgcaggcatggtgcgcatggctggtgtagaccgggagtggttacatagcatggcacatgcgttggcactggacacatggacgtgaccaagagaggacgttcctggcctggggttgatcgacgggggcgtcgatctctcttaagggggtgagggtgtaacatcccggcctagggcttaataggattaatagaatactcatatcaacaagttgcaacttcttttccggaagccaatctccaaagaactccagggttaagcgtgcttggcctggagcaatttgggatgggtgaccgaccgggaaattcttcccgggtgcacacgagtgaggacaaagtgtgcagaaaagatatgtgttgccctgtgagggcagtctatgacctatgaaagctatcagatgtaagcggtcccggcctgggggaaggcgggacaccttgtcacgcccagaaattcccgaatagaattccaagtcttacaaacatcataaaagtctttacataaatgcagcggaaagaaagaaagacaacaggagctaagccttgactagaactgcagcgggaaagaaagaaagacaacaggagctaagccttgactagaactgcagcgggaacaccactccacaggcatcctcgacggcacggacgaagcctactcctcggagaaaccttcatccgacatatactcgcactctgggggttgggaaaagtagagcaagactgagtactacccactgtactcagcaagtcatgccggaatagaggcatgatgcagggaatcatcaaagaagagctaaagtggttcatttgcataaagcgagcatttaagaacagagcatgatgcagggaatcatcaaagaagagctaaagtggttcatttgcataaagcgagcatttaagaacagaagttgaaagatttaaacagttgtaataattaattacaactgtacccacaagacacagccccacaacacgtttccgtgcgccgacatgccaccacgacataccggaaagaggctgtgacaggaccattcgcataaccccctctaaccaagcacaccacacctcaggtttcacccccactcctcgcaaggcaacgggcagtcccctctcgtgcctaggtgaatccggaagccgcataggccgtcgcagggcccatccaaactccatcacgcccacccttgcctggatgcgtcggctagaggaaagctacgttacaagcccagccgttgcccacgctggcttgtggtaagtacgataagttcttccagggcatcccgcgaaccggtccttaactgccatgggtgcgaccagcaaaaccatgcacccacggcccaccatgtgatttattttaattaaccaacaccaaagcggtgttactaaaccaacaaaaccattagaaccaacagtctaaacattaatatgattttccccattgtgaactagttgaactaagcatggctaagcaattcctagtccaaactctaatcaggttataaccccaagttgacaaagaaacatggtacaacaatagcatggctatgacaataggtaaacatcccatagtaacattataaaacgatgcagtatttgaaggaaaacaatagagcatttgcaatataggatcaacatgttcaagtgacaagcatgacttgccttgctctgctgctggaggaacctcggcgactatttcgaagtacaccggagcgtcggaggaaccggaatcggaggggacggcggcgtccggcgacggggagcgacggagggaggtcgacacgcggcggacggcgaccgggacgaccgtcgcacgatgggaatggcgctccggcggcggacctcgacgaaggaggggtggacggggtggatctcggccacgcgaacccgacggcggcgacagcgcggtgcggcgacgagcctagcggcggctagtggcggccggagtatcggaaacggcggcggcgggtggttgcacggcgcggaagcgatgggaggctcgggagagttcggcgaaatggggaaaaagcgagagagggcgacggagaagcttaaatagggaaggggagggcccgacgtggcccggagaggcgggattccaccggccaacgtnagggagtgggggaagagaaaaaggtntntnnttcaaattacnttaattataatggtgttataaattaatatcttatttaaaaaaaatgttttattaggaaagaccatttagat

SEQ ID NO: 4794 - DNA, 21453 bp, Oryza sativa
taattcgctccgagctcaatcgtctcttctcttctccgattgtttctccattttatcaatttcaacaaaatcaagggaacagcaaggctaattaagctaaaaacacactgatcgatttcccactagatcatgccgtcagagttcgcggagagcagcctcgccggctgccgcctgctcctggtagtagggcagcacggtgtacacggtctgcaagacggtgaggacgaggagcacgaaggcgacgacgagcgagacgatcgcccacgggttgccggcgtggttgcggacgaggctggcgcgccactggttccaccgcttctccctgtacgcgttcacctccccgtgcacgccgtgcagcgcgctccgccggtccagctccgcctcgctcgccagccggttgaacatctccgccaccgcctcgtcgctgcccagcccgttggacaccacgccgctcgcgcccagcagccgcgcgtcgtcgccggacttgatcacgttgtccatgaagaacacgtacgccgtcacctcgttggcgccggcgccgtgcagctgctcgaatgccatcaggctgaacagcttgtgctccgtcgtgtcgtccacggcgaggcgcgggatgcggagcgcgccgtggcggaagctgatgtcgtggaggctgcgcgtccggctgggacggaaccggacgcccgcctggtcgagctccgtcgccgacggcacgaactcctctcgcctccccgtatggcacggccttggcggcgagccatggagcaggctccggtggcagacgtcgagcgggtggagcgccaggccgccgccgcctctcatcgccggcgggtcagggatcatcgacacgaagctgagcaccatgttgttgatcgcgtcgtcgctctgcaaccaaacgccggcgagttaatcagcaactaatcgaacactcgagttgatcagagcagcagcataccacgacgcacgcaccgcttcaggggcggcgccgccgtggacgaaggcgacgatccgctggagcacgaggagcggcagctggttctcgatcatgagcatgtcgcggcggacgtacgggaacacgtacagctcgccgtggcggctgaacacggggtcgttcgccgcgtagcctccgcccacgccctcgccgtcaccgtcgccctgcgccgcctcggccgccgcgcgcatcacctcgagcaggaagcacccatccaagaccatcatcttcaagaacccgtcgcggtcgtccctccacttggtggcgcccagcccctggtacgcgtcctgcagctccaccaccacctcctccatcgacgccacgaggctacccagccgcagccgccgcccatcgccgccgccgccgccgcggcggagcaggtgcaggagcgccctctccttgtgctcctcggccggccggagctcggggacgccgtggtggaaggggccgagcgacaccagctgcggtgcgccgtaggaggtgcgatgcttgatgtacgccggcacgcggtacaccgactgcctccgccaccgcctcgcctcctcctccgatgggttgccgccggcgtcgagcaggtgctcgacgtgggacacccattggctcgtcgtcttcaccctctgctgctcctcgccttccatttggtgagatttcttgatgttgcttgtcgcgtcaaaggttgggggaaattttgagtaataatatactactactctaaatcccccgcaaaaaaaaaaatatactactctaaatcgagattacagagcaaacaatattttttaggcaccgtccagccattgctactgccataacgtggtctactttgtcactcgaacaacaaaaaattcatttactttcggcaatgttcgacaagtcaaaatttaaaaggggcttaatgacttgttaatacatacggtcattgtgtatgtgagaaagtacaacattacatcgctgtcctcgtatctacagggaagtggccatttgggtccactcccatgcaatgttttcactttcgttttccaccgaaattttgaaattttggaactattctttttgcacgagtcacttatactttcatcatccccctcttcaactcaattaggtacaaaggaccccccacaagtccactactcaatttttcttctaacttcctccccacacatccagttttcactcattacttttctcgtttgctcaatttctcatgacccgtgtgagcctccacaccgtggtggtatcatgggaaccatagaacaaggatgcagcatgacgctcgctccctggggcagttatctatcagccatgattccaatttcgaacagcacaacaacaacctggtccaacatgtttcaggccctgaagactccaaagtccaaagcagcaaactgatactcctgtaccatgtaagagagttccatctctcatggcagacgttcgagagggtggagcgctaggccgctgctgccgctcatcgctggtgggtcagggatcattgacacgaagctcagtaccatcactactacaaaacatcaaatagataccgctattacagatgctagagtaggtaaaaccggtacctatagctcctttccctatccatgcgtctatcaacccgccaaaatccaaagaatcagcacctttatcctcaaataggtgccagtttttaaaaagaaccggcacctattactggtgtcagagaaagatgccggtttttattgaaaatccggcaccttttagtatccatcccatcggaatagtaggcgtagggcccacctaagaaccggcatctttgtggttaaagaaataggtgccggttttttttaaaaaaaccgacaccgaggcgagccacacggggagcccccacattcttatccatccatcagagtcaactgactcgtatctctctctctctctcacgcgcgcgcgtctcttcgcctctctcgaactctctctcttttttgcgcctcctctctcaccttctcctccccggcggctgagggaggtggcggccgcagtggcgggaggcgggggcagcgagaggagaggtggcagcggcagtggtgggagttggcggcagtagaggtgggaggtggcggcagcggtcggcggcaggaggagaggcggcagcggtcggcggcgggagcaccctcccctccgccaaatccagcgagaggggaggcaacgatagcggcagcggcgggaggtggcggcggtagaggcgggaggtggcgggaggagaggcagcagtggcgggcgacgccctcccctctgccagatccggtgggaggggaggcagaggcagcagcggcggggctcatcatcctcctcgcccagccccttctcctatgcaacttcgtaccacttcggcggcggtacgatctgatttcgtctctccttttttcttgcctacaacttgttgaatttgcatgcaaaattttagagagacctgataatttactggtatgtgttgaactgaaccggttgaactatttctgttgataaatttggggagactattaacgaccaaatttggtaagatatgaaccaagttcgatattggaatcgaagcggattcggcaaagattcgaagaacagagtatgcatcggctgcgaaggcatcggctggagtatgcatcggctgagatggattggataggggatggttgatgcagccgatagagccaatacagccgattccgatggggatggctccgaagctgtttctagaatcgatcaacgtgattcacaaggattgccgcgatggagataaagctctcagaaaagcaattgtatctattaattaggatattttgttagagatatatctgggcaaaagtctgcggtaaagacttatggtatattagagcctcttagagataagagtcgtgtccgacaaggacatgttttgtatctcaggtataaatatgacccgaacccaatgtaatcgataacatcagttcaataacacttttggcacatcgccacccttttttactttcattctattttgacgagttcttgctttcgggttgagctgcatcgattcgatcttcaactagaggtaaacttgtaatggcggtttgcgttctcgggatcagtgcttccatctttatgatactctaatcttatttatgtaattcgtcaagttatcatatatactttataatctctgttaattgcgttatataacttgccatcggctggtttttactactagaaagtagccgatagagttagatcttgttattaatctagattatattgtgtatctaccatctcttagagattttcattatcttgcttagatcttacagttatctttatgcttaatgctgcatcggttgagttcgatctattaagttatatctataattgtgatatctagcctgttttatgattatcaatagagatagtatcggagttttagccgatgctaactgctttagctattcttatctcatatgcttgcttgtcatgctaaatctgccctttatattaagatcttgttgcactaaagttatattaggcttcttgtttgatatatcttgcttgttttgatatcttggtatagagtggtatcgaagtattagccgatacatgctagatctatttgattggctatgctataaactaatatataatcttcgctttaatatatatttcggcttaagtgatttatactgtctcggcatggtgaccgatctatcccaatcacttagtttaagtatataccgaagtaaagactatatgttgttaatatctacagtcgatcgagtagatttggttttatcttattcattcattgctgccgatcgattcaaacatgacatcagctcaaagatatataaatgatatgtcatcggcaactagccgatcggctatcgtttatggatttaactgcggtttttcttgtctttactcttgttgattgcaggatcaaatcaacaggcactctcacgaatctaaaagcaagattttggacatgcataggagttaagcagatctttcaggccagtgtgtgtttttcgcatcaatagagacctggtaatttttttggagggctcatcttgttcctattcttgttctgaattggtgtgttcttgattgttcgaggtgaaagggagctgctcacctcgatgaatcgagccgatgcatcgagccagcttttttttttattcctcaaaccttaaaggtgccggttctaaaacctaaaaaactgacatctttacctatatagatgccggctctagaactagcattgatgaccgaagtcatcagtgccgcctccgtggtgccggttgggaaaaccggcacctagggggttcctaactggcaccgattagggtttctgtagtagtgcaagttattcaccatgtcatcggtctgcagccaaacgcatgttgattagcagctaaatcgaatattcgagtttattatatcatcgcaatagcatggtatggccgtcgacgcggtaacacaccgcttcagggcattgccaagaacggaaactaactttttagggagcttctttgaaacacgtgattgacaaaggaggattatgaaaaactaactttttagggagcttctttgaaacacgtgattgacaaaggaggattatgaaaaacgtaagattttgaaagaaatgcgagtgcaaaacacaggaaaaatataaatatatgaatggtcgtttgaatagatcgtaggaaaaccataggaaccacagaaaacacattggattttctaagaggtttaagctcttgataccttccttcaaaatatctttaggattttcgaaggacggtatataattcaatcctttgtttggaaagaccttgtaaggaaattttcaaaaggggccttagcttttacttatgcttcatcatgattctctaacagtttagcattcggatgtggtgttatgatctgacgttgatgttctaaatgcggtgtagcgtaaaggacgttggtgttccaatttgttgtcgcattgggagcgaggtctggtgcgagggtctagtactcttgttagacggtcaaacactttcgtatgctagggctgatgagcaaagggggtttgtagattttgtaagctactaattcgtaatgagctaagcctataaatcaccctaatacggaatttgggattaactaactgttgtttaaagtgttagtgatatgccctagagacaatcatagagatgattgtatcacatactatgtttacatatttgtccgacattgttccttgaaatagataactccttattggttaatgaatatgtgattctttcatgagactctttatgttgtttgttgctatttcgaaaggatccctgatcaaaaatcatatgtggaacaaatatgtttagatgatcagcacatgtattaattgatgatcatgtctcatggatcatggtatagagataccaaattaataatatagacacatgttagtgaacatgttgttggatagacccaacatgagacactgcaagagccatatgtgttgtgttatcagtgatctcatttagtgttggtattgaatccttagacctgagattatcatggttcccaacatatgtagtagcttacttagggactgctaagcgctactccgtaattgggtagttataaaagtagttttcggttatgctacgaaatatgtagtgggatatgaataatgaagatgggatttgcccctcctatggagagatatctctaggcccctcgatgttgtagattatggaagtgcatggccatgccaaaggtgattgaggagtcgatcacaagttatataatctatcaacaggttcgagtgaatgattgagctattagaggacggcacatatctagccttgagcttaatcgatatcgtgaggcaaaggggttcatacaagtatacactagaggttcagccgatatgatctttatgtatgcccggtgggtcaatacgttctgctaggggccgctgttgacgcgtggaccgaaaaggagttttcgggttacagccgagtatatatgaacctacagggtcgcacgcttaatgggccggaataaggggattggatagagatccaatatgagcttaattcggataaggatccaaataggagtcctacgggccttggaggcccgagtgatggatcctatatattcgtgaggggtgtgaccggcggaggtattgcatcacttgagaaaccctagccgtcacttccctacccgagcaaaaccctagccgcgcgcgagtgctagcacatctgtgcgtggcattccgtccctgtacgtgtggataccggtagaggcgccgctggtttgcggtgctgatcgagtgggagtatggcgaggagaacgtacgaggaggagaaggtcgagccggtgcgatcgactacttcctctacatcgacgcgcactacttcgtgagagttccttcgacttctcagcgtcttcttccgctgcgcaacgcgtcgagtggtaacgatctatgatataatacttgcatcgttcctggtttacgcgatagaaaattttgatttatgctatcgtagcctatgcgtatcccaacagtggtatttgagccgccttgtatagtttatgatctagatcattgcatataattgatacgcggatgtagtagatgagatctattatattgtatatgagttcttaggtgatcggaacatgagatgaaccgatagctgcatgggttgatgagatcaatcggtatgtgtgttggtgacttcactggaatatctagtactcaccaaggccgagcgcgattgtgttcatcggatagttcgatgtccactggaaccgcatgccaatgagaaaaatgagccaatgagattgactcggtctcggcataatttgattacgtcgttaaggttttcacatggcgaatcgtagatgagatctagcgggaccaccgtgtgcgttgccccttagatttcgcttggggtttttatatctatcttactttattgctgttatatatttgatatgacatggtaggatagactccctcagaaaaattaagtgtaatttatgctcttccaataattgcacctattacggttgtgatcataagtgatgggtttgccatagccaagtgtcactttttatcatgataaaataggatagatgtcggacatctatatgcggagattattggtttacttgacaaggttatcaaaacggttttggaccttggggcataggttgggttggacatggagatgtcactccaatagcacaagagtcacatatgatgtgattgcaaggtgttgcttacctattttgatagttgtctagctgtgatgccaaagctcactagacactaacaaaataaggatcttgactcactatgatactggagggaattttgtttcacaatacatagtgggagtatcttttgttaaattgtttaatgaaaggttaactgtaaacatggtgctgattttgcatacatatatttctattatagatcatggcagctcttgcaccatccagttttaacttgcggtctattcttgagaaagagaagttgactggaacaaacttcatggactggtatcgcaacctgagaattgttctcaagcaagagcacaaagagtttgtgcttacagagccttttccagctaacttgcccaacaatgctcctgctgctcaacgtagggagcatgaaaagcgatgcaatgattatcttgatataagctgtctcatgcttgctactatgtcccctgagcttcaaaggtaatatgaggcattggatgctcatacgataatcacgggactacgtaacatgtttgaggaccaagcaagagctgagaggtttaatacctcaaagtccttgtttgcgtgtaggcttgcagaaggtaatccagtgagcccacatgtgatcaaaatgattggttacaccgagagtctggataagcttggctttccccttagccgagagctagctactgatttgattctccagtcgctccctcccagctttgagccgttcataatgaatttcaacatgaacaatctgaacaggaccttggcagaattgcatcggatgctaaagactgctgaggaaagcattaagaaaaactccaaccatgtgatggttatgcataagcgcaagcccaacaacaagaagagtggacacatgttagtgaacatgttgttggatagacccaacatgagacactgcaagagacatatatgttgtgtcatcagtgatctcatttagtgttggtgatgaatccttagacctgagattatcatgattcccaacatatgtagtagcttacttagggactgctaaacgctactccataattgggtagttataaaagtagttttcgggtatgctatgaaacatgtagtgggatatgaataatgaagatgggatttgcccctctgtcacgcccggaatttctatccaaaattccaaacgcttacatgtgtgtgaaccctcgtccaggaatcagccgaggcacacaataacaaattgataatagagtacaattattactctaattaataagcgaataaaatgtcattacagaggtagatagttcctctcaatcaataaaaatctaagcagcggaaaataagataaacggcgcagacggctccactccacaagcagcttgaccaaggctacacctaatcctccactccatcagcttcactgtagaactcttcctctgatgaatgattgcaaggtgagtatatgacatactcagcaagccacgcagcaaatatgcaagtgcacaggataacaaaggatggcataatagggttccatttgcaaaagcagcatttagcaaacatttgagaatttaataaaacagttaagtaataattaaacaatattaatccaacgctatacaacataccctgttgtataggcccaaccattctgaacaaccaccctggctgcgcagttctatctccaaaccaggaatgtaccattccaaaccaggagctaatcaaattattaccaattaaagcatcttttactatgatgagaagtgtgagactaatcacgaaagacattgttagacccacccataaccgcgggcacggctattcgaatagttttactctgatcagaggtgtaccactgtacccacaagacacaaccccacatcatgtcaccatgtgcctcaataccaccacggtacctcggaaaggagttgtgacaataccccttatacaacataatccactgcagcgcaccttcctggatcataatcacccccttataaacaaggcatggactccccagcgacccccgtgggcttatctctgccacttctcagtctggtgccccgcaatgaaccatgctatacaaaagataaagccgttgcccatgctggcttgtggttggcacgattaatgtttcacaaccgaaactcgtgaaccggtccttaattgtcatgagcacgaccatcaaaaccatgtgctcacaacccaccattatcaggttttagttggcacattaattaattaactaatcacgattgaccatcgtgaactatcaattaagccatcatgaaataatagtgaatcataagttatcccaatagtgtgctaatgtttctaagcagggctaagcaattatttctaatatctagttgaaccaatataaataaagctcaactagtcaaattatagtaacccaaggtatcaaggaataaagtaatcaagaacaaaagggctataacaatgaataggttaattccacccaatgacattcgaaaataaatgcaatagttgaatagaaataatagctttaaataggatcaacatgctcaaagggttgtttgggatctgtgtgacttgccttgttggccttggaactcttcaaactcttctccggcgaaaacggactctccggaaacgacggaatctaagcagaaaagagcaaaatcaccaaaacagcacataaacaagcatgaacagtacatgtggatatttttaatgtgtagatctcaattttagaaaaatttagagacttgaaccaactaaatcggagctaagatgaattagttatgaatttttaaagattaaatcggattaaaacacttatatcggtttaaattgaattatgacgcaataatgaattatttttgaaaaggaaaagaagatttattgcgtcagcgggctagggtttcggtggaccgggcgcacgggcggcggttcacgcgaacggactgccgagatcgatccaatccaaaacggacggccgagatcgaacggtccacgaccggctcacggcggacgaccctgatgacgtcagcggtgacgtcaccgacagcggcggcggctcggcggagcgaacggctcgggcggcgcacgctcgccggcgaacggcggcactaggacgcaaacggagggcaccaacgggtagcggacggcacggcgaactcaccggcgaccaaagcgacggcggaagaccaacggacggcgacgacgacgaagaagaagcggcggcgctcttcggcttgacgacggcgacgacgctccggcgatcttcggcgacggcgaaggggcggacgaggacggcgacgacttggcgaccacgacggcggtcttcccgagcgacggcgacgaccgagacggcggcggcgcacggctggagcgacggcggcgacggcggcgctaggttgcacggcgctagggctcttccggcgacgagaggcgaaggcgagggtggcgacgggtagaggagacaccggggaagcttttaaaggggctcggaggcggtggcaaaggcccacggcggccggcgatgagaaggaaagttcgtggcttgaaggaaggaggccgatccgaatcgaactcgattccacgaacttccaaaacgttttagccgaagcttccaaagaagaaaaggtagaggagatcccgaggatcatttcccctcttttgattcggccagagaaggaaaggagcggccgaatttggaaaggaacggcggcggcggcgcgctagggtttcggccggaggaagacgacgggcctgacaggtggaccccacctgtcagcggccgaacgcgcgcgcgcgcggcggctgcggactgggccggactgggccgaggagagagagaagagaggttttgggccgactttcggcccaaagccaaaagaagactttttaaaacctttttcaatttaaattatttcttaaatgcaattccatttattaaaaatactttcttagctcaaaaaaatcccagaaaaatctaggaattatagaattaagcaaagtatttaatgaaattttatctggccccattttatattggaatttattaattaaaattagatcttcttttctaggcttttaaaattaattctaaaaattccaattaaacaacaatttatatattttaaattttcagggtgtgacaccctcctatggagagatatctctgggcccctcgatgttgtagattatggaagtgcatgaccatgccaaaggtgattgaggagtcaatcacaagttatataatctatcaacaggttcgagtgaatgattgagctattagaggatggcacatatctagccttgagcttaatcgatattgtgaggcaaaggggttcatacaagtatatactagaggttcagccgatatgatctttatgtatgcccgatgggtcaatacgttttgctaggggccgctgttgacgcgtggaccgaaaatgagttttcggggtacagccgagtatatatgaacctacagggtcacacgcttaatgggccggaataaggggattggatagagatccaatatgagcttaattcggataaggatccgaataggagtcctacaggccttggaggcccgagtgatggatcctatatattcatgaggggtgtgaccggcggaggtattgcatcacgtgagcaaccctagccgtcacttgcctccccgagcaaaaccctagccgtgcgtgagtgctagcacatctgcgcgtggcgttccgttcctgtacgtgtggataccggtagaggcgccgctggtttgcggtgctgatcggcgtgggagtacggcgaggagaacgcacgaggaggagaaggtcgagccggtgcgatcgactacttactctacatcgacgcgcgctacttcgcgagagttccttcgacttctcagcgtcttctttcgctgcgcagcgcgtcgagtggtaacgatctatgatataatacttgcatggttcctggtttacgcgatagaaaattttgatttatgctatcgtagcctacgcgtatcccaacataacgctgttgcacttggttttgcttgaaccagagtggaagtaatcatactagtggtgcgagcagcatcgtaggtgaggacactagtttaatctcgaaggggtcatcgggatgttgacggtcgttatagaccaatttcgaccgtcaatatatctagaataaaggagaactagcaattcttgcatgcatatttgtttaagaataatctatttccacttgtttggaactttatttgtatatatgagatcttcacataaatggagaaggaataatggaaataacagtcagggaagcagttccggccaattagacgtgagtaaaaggatcagagggcccacaagtcagatgaaaccgtcctaaaatgagccaaatccatcctaactgtcataagggtccaccaggcagtctcctagccaaagcagaggtccagaggtggggcccagggttcggccgaaccaccactggcgccaaccatcttagccttccacgtggacgtccctgatcactccctaatgacggttgcagggcatttcctacaattccaaccgccacaaccgtcattggcagcctataaatgggcatcaccttgtccattccaaagtgcaccatgaaggatcaaatctaagaagctctctagtttatttacattgttctagtactagtggagtagtaatagaatatttttcttagttcttcatgtcttcaggagattttgggtatggctctagtagctttgttattcttttgtaagactttgctcattaatgaaatattcttctttatatagtttcggtcttttacttcactcatataattattggagtgccgactttagttcatatttgtctcgtaataattatgtaggtagctaactggagatatgcaatggtgttggtttaatgttcatttatatgattgctctatgtcacatgcagagatgtagagtaatatttagtaatataagcatggtgcttagattattagataccattaaatggttttatatgccacgggtctctagaggtaggctgctgatggtgacagctcaatacgggtataatactaagagaatttcctggtgtggttactcctccatattcattaccggttggatggccatgacaggatgtcgtaatgaactcggcaagtaagggtggtttctcaatacaccaggagggtatagttagaggatattggctgcatgattgtatactagcaagtgcggactaaaatgactatatactataagtacataaattattcttttcttattctttctccacttagcctaaattatattttaatgagagtagtctagtgagttccttctgtgtgtcaacttactctacccttgaattaattaacccctgcattagactttgatctatacaagtgatataaattattatcatagtattctcttatcatatcttcccttataattaaataaatacgatacattggaatactcccgggtgaaatgctaccacagtatatccgtacgcttacggattgtatatgtaaccgtaaagtacaccgagaatattttggcaccattgctaggaattatatttctagtcatgttgttaaaaaatatcaacaagggaccccaggagagagagccgtcgtcgtgggatctggcaaccgccacctcgctcgtgtcggccttccccagcaccgccatccccaggagagagagttgtcgttgaggtatccgacgaccgccacctcgaagggagccgccgctgctgctgtcggccaagggagccgccactgctacaaggagaggaggagcaggaggaggcgagagggggcaagagggaaggggaccgatacgagtggaggaggatcaaggagttgagaaagcggggtgagatgcgatcggataaggatgtcgacccgctcgggtttatttaatgggtgccggtttttttcagaaccagtacctatatttatataactaggaaggtagcccgcgcattcgcgcgggcatgtatcgcacgggtatttacgtggattcgtattttttaaaaaacttatagtgacagaatgtatatcaactggatgacacctatcacactttaaaagtactatttctctataaattttcttcaacggtgttgcttggataattgtttcaacctatctgttagctttaaactatacaatatttaatttataccggtaagaaatcaattataatctttttcattatcttgaaaggagattgacttaattagtttaaaacaaatgtcgaacaaattaagtgtatattaaaaataaggtgctctatttttaaacaactcctagaaaattattattactaataaatttgttttatttgtgccatcaagttacccctccttctaattggttcatacatgctcacacaatttgttatatacttacatatatatttgaataaagaggagtgatctaaatatcttgtttccttattatatatgtgatctatagtatttatttaaatacgtattcaacataagtcctaaagtttaaatgttgtaatagcaaatataaattttgaaccaactacttgctttcattgtgcagattatataccgcggcgctaggttattttaatctcaattaagttgggcggctataaatattggacccactgatttaagtaaaaagggatggattttattagcgtcacatggtagcatgagggcgttttaaggattggcatgtggcagcgtgagagcgttttaagaaagtttaatggacttgtagtattcaaccattaatataaaacaaaattattaaattatctaatattattaaattattaaattatggtccttcatccaataattcaataatataatccgggttaccaaattttgtaatatttattaagagaaagcggactaatctaatgatgtaacatattgcgtgtttttatagtatagaaaatcttattttaaaatgacggtctaattttttctactgatgtgcatacatattttaagggtgttatagtttttttactcgtgcatacgtacgtatgtttgtattgttttttagtaaacagtatctaaaggttttttttatagtttttcttctcgtacttacatacgtgtgtttggtttttaagtgaacagtacgttatctttttttcatcataagtacttacgctagtttttactcatatgcacgtgatactaagaggaaggaaatagatctaatctaacggtctaaaattatgggtccaccaatttaaatgaaaatcaacggtgagattataaaatgccatgtggcgacttaagagcgtttctaggaacgccacatggcggtttaggagcgtttataggaagattaatggacttttagtatataatagatagatagatagatagaagatagaagatagatagatagataggtgttagttcttttaaaaaatcaacacctatattggtactggtttttctctggaaccgacacctataatataagtataggtgtcggttcttttaaaaaaccgtcacatatagtatttgtaccggttttacatgtagaactagcacttacagtgtttaaatgtgtcggttctttattttttttcagcgtgtgaaggtgggaaaagatccataggtgctggttttaaatgaaccggcacctataagactggtccctttaaaggtttttttaagtagtgcaagttttcttttaaattttttttcttctactgaattaattagaccattcattttaaaatactagttaaatttatttatgaaatatttaacattatagttgagtagataattcgctgtaataatcagttcgataatctaaacagaacacggcctagtgtacttacgtaatggagcagtaagcaaactaagccgacggttgcagaggtggacaaccactttgacactaattttgttagtactaacaactactagtagtacaggttcatctctgcagagtcaggaccaatctgagtacctggttggtaccggtaccggacaaaaatctggttggaatctctagccagctagagtacgtacaatttagaactttccgttcctacttcctacgcgatctagcgatggttggaaaagccaagtgttagctgtctttgatcccatgtgtccgctagtttttgcgacagagaagaacagagcctaggggattcagaaatcagaccaattaatatggctcacagtcacagtctcgcggaccaaaatctagtgatttggatgtatccccactccccagctggcgttggacaaggcagaaaatgttaaaattattttatcttatacgagacgagaattgctactatcaaataaacagatttggagtaaagctatccccatattcgcatcctcttccagcttcccccttgtcaaattttctccactagtcttgagtcggatgcacctgtatattagactcaaagtgatatgcttgtccttcctctcgacaatagatgtgttcggtggagatttttggcttgtggtcagctacggaatgggagagaatggacaacagagagtagggaggttggcctgctccgtttaagcctttagcacaatatgacatagctgctcaacttgggctcgtttctaagggcgtgtgcaacatttattctggaagttagcaatagcatgagccaagtgatcctatggtagtagctgtgatagaaatctacaatatacggagtataacactgcttaagaaacgattttgggctgcgaaaacagggggctaggggttcaaacggacggtcgcatgctaagatcactatcacagataggatctaaagaggcccgcttacgaaaatatcaaagcactaataaaattggctgtcacaatcgagtcctccctctcccaccaatttcttactccaggagggcaccaccaatgctggctctggttcatctcttcctctcagtctagtcacctcacctctctacccctcacctcgcaaccaccctttctctgcacctcacctcaaatctagcggcgacaatgaagtggggctggaggaggggggctgcagatccagaggtgacggcagtggcggatccactgttggggctggttggggcgccagccccacctctaatccctgcccctgattagtcattaacaagtctaattagtcacaaccagcccctgattagtcattaacaagtctaattagaattgatgaggagactgtccatacggtagggatgcaggctgcatcactgcttctactccttgctttcatggcctaaactgatgaatacagctaagagaaaatacagcttactctaagtataccataacaatatattcacacatattattgtatattttcacatagccacaaattgaaatggagaaagttcttttgattatattcgtatctggtttttcatctttagttgatatatctctaatttgtttcaatcatactatatttttacactagcacaccctcagtttacatcctggattcgccactgggtggcgggccttggtgcggtggaagcggtggcagttaagaggagactgcggtagtgaacaattgatacgtgagcggcgcaactcaggagagatggatctttcatcgatggcacttgggaactccggagccatcatgccctgtctggttgtggcttagcaagatgtccagaagggggtggcgaggatgagcagtacccctactacggcagtagtggccttagatccgccgctggggaggtcagatctggatggcgcgggcctcctacttgacaccaacacgaggggcaattgtcggtggcatggcccaaatccgccagcgggaaggctggatctgcatgctccgctatcaatggggcaaaatgagatggtgaacacgatggtgtggcactacactgcgtgagacaacgacgaccatcttgtttacatgttgatttaaaactgcatgttggtgcttgatgtggccccaagtattatggtctaaattgcaaaaacctacaggagttttggcacatgacacataaccctgggtattatcaccataaagtttcacaaaatcacattattggtcatttgactttgatgtacgtatcacacttttatgttttgcaatcacatcttaaatttatgagttgtttatccatcatatgtgtaaataaagcttttttatttttttatattggaatatattaacttagttaatgatatggttttgtgaaactttaagaccataataaggttgtgtttgaggaggagatagagaagattggaaagatacgcaaaacgaggtgagccattagcgcatgattaattaagtattaactattttaaacttcaaaaatggattaatatgattttttaaagcaactttcgtatataatttttttgcaaaaaacacaccgtttagtagtttgtgaagcgtgcgcgcggaaaacgaaacaaacaaactcactatcaccctagaacgaactcagcctaactagggttatgtgctttgccaaaactcctatgattttgtgcaacttgtatcataatgagtgccattttatgaaacttacttttaaaaaatggtgaatcattaagacaaatatattgaccaggaatttatatataaattataggaacatatgtaatctaagtaattgatgaatgagagaaagcataatgaaaggaactttactcttctccattcgatccttgggaattttcatgagaaaaaaatggtataactttacacactccacattgacgtcttattcctactaaagtcatttgtcggacatattgcaaaccttatacatatatcgatcatattgagttagattattttcatgctttcatgattaagatctctctctctctctctctctctcacacacacacacacccatattttctcaccctctacaactagagtttagcaaaaatgtaccacccatctaccacaatatactatacttatacactgaaagtaagcatatgtcatccatccaccaaataaagtctccacatacctatgatcctccctccaaccatccatgcaaaatgagacatgagctaaaaaagatgttgaaaaaaatagaaatgctcacgtggagaaagagataaaatattctcgagcatgaaaaaaaaagaaaaaaagagagagagaaaaggccatgttttacaaataagtgcaaggaggaggattgtacaaaaaggagtcaatattcaacctttcattctttcacgcacacatattccttttccacacacatgcacatcttgatcataattgtatcattagtcctcctgtttagaagaatgaatttccaagaagccaataagcattcttggatccatttttgactttacaatatatgcgatgcaagtatgtcattcttattccctaccttgagctctacataagtcttattagaagtaggataagaaaatgcaaaatcaatgccttggtgaggaatcatacacattgagcgatccgagagaatcaattaaggagtaaagtaaagttatacttttatgagaaaaagaaaaacctcaaggaattcattaaaaggaatggaggtaacttgagtcaaggctgtttcattcttcaatcattcaagatgacatgtagacactttaaggttcacaagtacatgtatggcttggaataatttgtatgcaagtatcattacaaaaggattaatggctttgttgtaatccatgatcattactcagggaccagtaatggctaagtgtggagattttgttgactgtctttaaggtaccaaatccgatcgtcaaaccttgcataaaatcaattgaaataaaaaaaatcaaacttagtggtagtggttattactaattattttcacaagtattggtgaaatatttgtatgaaaaccacccgccaggcgaagaaacacacctccggccaatcaaacgcaaatacacggattggagggcccacaagctgaccaaatcacctcaaaataggtcaaaactatgcaccgtcataagggcccactggacaatgaccaggccaaaagagagggggaatggcggtgctagggggtcggccgaacaaggtttggctgaattacccttgcggccactcatccccgcccagtggcggatgtatcgttggggctagagccccacctccacctgacagaaccctccccctcaccaccacgcgcacgttgggcttagcccattgggtcggc

SEQ ID NO: 4795 - DNA, 23733 bp, Oryza sativa
  unsure (1)..(23733): unsure at all n locations
aaaaaaacccagtccccccctcccctctcctctcctcccaccatgggtcactaaaagtccattaaacttcctacaaacgctcttaaactgtcacgtgtactcctacaaatactcctaaaccgccacatgacactttaacaaaacaatgtgtctaataattttatctattataattttattgaaaaaaacccatacccccctctcctctcctcccaccatgcgcccaccctttcactagacgtgcttcctccctcccctcctatccaatctcttctttttttatttagttattaaaatttttgaacaataataaatcttaaataaccaaaattttcctatagttatttgttgttgtccattaacaattaaaaaaatataaggtgttctttaacctataagaaatataaaatttttatcgtatcctaaactttgcatatcacttagaattgttatgtaaattagggaaaaattgataatgtagattatacgatcaatttacaaaatatgcataaataaattaagttagatctattattataacaaaaataagaatacgtccatccgtacatgcttcatcttcccctcctatccaatctctctttttttttcctttagttattaaagctcctaaacaataataaatcttaaataaccatatttttttccatattacgttagatcttagtcacaaaataatctaattgtgattaacatcccaaaacataatacctccgttctaaaataccagtatgtttgttgatgaccaaatttggtagctccatgagtggattcgaagttggaaacgaagccgatttttgaaaaaagcctgttcgggaaggctaactacgaacggcatcggctgccgctcaaatcggctacgttgatattggctgagtactgggcatgatgtaatcaaaccgacgccggcaatcttgggaaagtggccccgcaatcgtcattgggtgggattaaagctagtcattgggtgggattaaagaccttcatagctattgccacacaaggataggagtcctaagagaggcaattgtatctattaattaggacatttttcttgtttccttagagatattttggtaagggcccacctaaagggatcgttcgtattttaaattatgttagagataagagtcgtgtccagaaaggacttaccatgtactttgggtataaatatagcccgaccccatgtaatcaaacaacgtcagttcaatacacttcagcgcatcgccacccttttacttttcattgttcttttcgacgagtttttgctttcgagttgggctgcatcaggttcgatctccgacaaaaaggtatatcttgtcatggcggcttgcgctctcaggatcagtgcttacatcttcatgacactctaatcacatcttcgcaagctttcgagttatcatatttattgcataatctagatcgatctcgttatctgagcttcatcggctagcctctatcatggaaaatggccgataggctcagccttcgactttgatttaaattatgcggtatatctgccatcttgaatgagctttcatcggttcgattagatcttctgccactcttcacgcttaatgttgcatcggttaggttcgatctattaagtactgtcctgaggccttttatctaatctattctttgactgctaatagagatagtgtcggggtttcagctgatcttacctgatttagtcgttttatcttccttcttggttctaaatcgtctagatttaccccttatatgaagatcccatcctcttgaagtagatcaagctccctagtctctagattaggtcaagcttcctatatttcatttgtgctggtatcttggtataaggtggtatcggagtattagccgatacagattgggttcgctccatcggctatgctatgagcacgcacaatctcttctttggagcatgtttagatatggagcgatttatattgtctcggtgccaacaccgatctatcccagtcgctcgatctaagcatgccccatctaatggattacatgccgctgatatctacagccaatcgagtacaccgaacaatctccaagtttttacttgcctacgccgatccaacttaagttgcatcggcgtggcccccaacaatatgtcatcggcagacctgtcgataggctatcgttgatggatttaactctttgttgtttcatgtcttgttggttgcaagatcaaaccatctggcacgctcaggacccgaaggcaaatttcccggacctgcactgtagttaagcagatctcctaggcaacaatgttaaaaaacattacctttattaaacaaaataatgttgattaaataatacataaaaatattttgacatcattatatctgtaatatttaaagtaatcaacaataccataaaataaaatactcttattatgattagcattccaaaaactattactgtagttctaaaatatcaatgtatctgaataatgcaaattaggtgtatcatgacaaatattttgtcaaaataaaatctttaatattgaaagtgaatacattctagaaagaaaggatcaaatgtgttgttgaaaaccgtatcgttatcttataattaagaagaatagggggggcatatttgtcggcattttcctctttagtctttggagttcaaacctaactaatctcagtataaagtatataatatccagagtactcgacccgtataaagtatataatattgaaagtggatacattctagaaagaaaggatcaaatgtgttgttgaaaaccgtatcgttatcttataattaagaagaataggggggcatatttgtcggcattttcctctttagtctttggagttcaaacctaactaatcttagtataaagtatataatatccagagtactcgacccatatagggtttttcttatgtatcaattctatgtccacttttcttatgtatcaattatatgtcacactcaaacatatgtatcatttctacttataattaaactgctattcactaatcgttgagtcaggaatattgatgaggtgattgtttattaaattgactatatattcgagattcaataaacctatatatgttgtcaagtggtaaagacgaaagtcaacttgcaatatagattaaacacaaacagaataggtcaatctcatgaaataaaataaagctgcatcgtaactttttgaaatcgaaaaaaaaacatgtatccataacatacaccctacatataatcaaagataaccacggctaatctcattggcatataacctatgtatttattgattcattaaagcatataaccaattggagaaattattagattaaaaactcatccttaacaaatcagaaaaaatattcgagttattttacctatagtagcaagctatcgtagggtgctcaactttgtagctaacgaggaagggaaattactatgttacccgcttattaaataagggttaatttgatccgtgccattgccaatatgcctatttagataaatgccataacattcgtctattcgtaattgtgccactcaaattttacaaaattggaaccatgtcatcgtcgtcacgttttccatctcccccctcatctgcaaatgggactcacccatccgattcatctttctttcgccctcacttatcttcatccttccccatctctctatcacggcgaggagtgaacaacgcgggcaggacgggagggggtcggcgacgggcgtacattaagtaaacggtggttgaatggaacaattgtactttagagtcacttatattttgggaaaaattgactcggtttatggtataaataaagacatctatggtatacaagaaaaattgttatttaatttaaaatcaaataaaaataagaaatgctaaatattagaaaaagaaagatacatagtataaatgatatatagtttaatttgtagaaaccaactcaattgttgtgacaccatatactttctcataaattcaaaactacacagtttgatttaattttagtttagaattttttatgttgcgtgcgtaactataagaaaatcataactaacttcaaagtaatccctagcaaattggaatatagtcaaaaagtatttcaataaaaatcacccacaaataaattaacattggtaatgaaattttaaacagattaaataaaatacctacgtatgtgcgtgggctaccttcctagttagatggaataaagcaagccaattcaatctgattctctcatctctcattctctgctttctcaagctacccaagccagggccaccaatgtcacattcttatccaattcattcatacgccagggctcataacacctatacaccatttaataaggagacataatagtttttcttcttaaatcataatatgtactaaaaatatataattataattattttaggacggagctagttgaaatctgcgttgtactgtgtaatttaaaaaaaaaagaaatactcaatccgatcctaccaaacccaaaccaaacctgcttcttcagttcttctatcctcttgcaccttatgacaacaagagcatatattggtagtttatctaacccaaccaaatatttacccctatattatactctagcttgatacagtacttcttaccgtccttaattttccaaagccgaattattttgaataacccttgcatcctctacctaccataactgctaaacatagagttagccaatgcttatcgtatcattggttcttcctcgaaaaaaaaaaagttggcaacatcggagatggtatttttttcccctaatacagccaactgccggcctctcagcaactgccatttattatacaattatgtgatcggtgggctgaacacatggggatataagtgattatttgacttcagttcttcatttattttaagcttttccgtgaattgttagttgcatgaaactcatatatagctaattcatattttttttgaaaagaagtaaatttcagaaaatcacatattctattattaaagttaacatgtggcatataactacacattactggagaagtgatctttggagggtcagacgatttccacaatagtcctggttccaacaagaaccaggactaaagaggtttattagtcctgatttattactacaacggaactaagagatttttagtcctggttcgcctcttgatagggcatgtcagacccctgtcgaggggccagggaactttagtcccggttggtaaagacattgcagatccgggactaaagttgcataactttatataccccttcttacttctccagtccgagccattgctacaaaatgaagctttgagggagggaggtgctgccaaaatttttaacaattttttttgtgttaatatacaaatttgaggtctctaaaaggttagcaacttcatcctcctctactttttgcttagcatttacatttagagctatgttttgtacatatttttccctctagaaaatgtgataaaagatgatgagagagaaagtatgtgtagggaataaagaatatagacaatttgtttattttggattttataaatacttgtttgaataattacatataataattctgaaagaataattagccgtaaatgccacccatgtcaaatctaggatttgaacccgggtgggctggttccaccacaaggaacctagccagttgagctatgctcacttcgctacatataattattgtatgaatggttaattataaaactaagttaatttaaaattaaaataagtacaacatattaaatatttgtttacaatgtaattaaaacatgaataatatgtagaatggatttaataataaagattgtatgaataattatattcaattgttgtatgattatttaatgagtttgtatttcgtggattttatatatttacgatttatatgcattttatgtagatggatcggtaacggatgtacgcggaccggcggtcaaaagagtttattgacggcgtgcattattttttgggtgtggccaatgataaaaagtgtaacggtttcataagctgtccatgcaacaagtacaaaaccagaaggagtattccactgcacgaagtattcatggcaacctgtttcagtgggggttcatgtgtagctacaattgtgaccaataaaggttttataaaatcacacctctatttgaatctcaaccaaaattatctatctggaataatattacagaaagaagcgaagagttagctaccaatcaccttaaccaagaaaaaataattaaaatttcagcgacactatattttaaatttttaatttaatgcgtgccaatatatataggaatgggtcctgtaacatcttaattagtacgtataccataatactcatgttatatataggccactgattataatattcagggtttcctttatggaaaaccaatgatatagggttttcttaaatttactctaagaatttgagtgaacttagggaccatagatatcaactttaaaatgaggttagctaatttatatttaaaaaatgagtaaacttcactccacatccgaggaatgatgtagactacgtgggattaattaattaatgctacttataaattgttaagtaaattgcacatcttttcccatcaatttacttctagtgatgaactaattatttgtgcaacgtttcgatcaagttgggcttcgatttttatttttctttttggcagctgcgaaagtagcgtaagatgtagaatgtggatgcttgaccctcgagcaacgcgtctaagcaacccccccccccccccccaccacattacttaatttctgatatgtatagtaggacgtgactacatatatgaacgttgcgttactccaatttctgatatgtatatatagtaggacaagcaactcaactgtatatgaacttcgtcgtgcattaaattaagtgatcacctcaagtcctcgaagaatattattcgctccgtcagaataaggttataagtgcagtcatgagtttccgtgtctaactttaatcgttcgtcttatttaaatattttttgaaaaacctataagaataagttacgcataaagtactattcatgttttataatctaataacaataaaaatactaatcataaaaaaatttcaaataaaatggacgatcaaagttggatatggaaactcatggttgcgcttattttgggacgaaggtagtacaatggaagtactcctagctagtaactaaatcggatcaggtttaatagtgaaggcaaataagcaaactaatgttatatgtacttactcccatcccaaaatataagtatttttttttacttcaacacggtctttgagatgctactttcatcaacaatgtctacaaaagtaagatattttaaataaaaaagttgcatattgtaatagtttgtttaatgacaaatatcaagtaacatcaaatttacattattgatcttttttatttttttgctattaataatcaaaatttgaaaagtttgacttgccactgttctaaaaatacttatattttaggatgaagggagtacttgataacatagacaacacactacgtctagcagccccaagacactttaataatttcacttcattggtttgcttttaatatattacctctctttctttcctttcacttggagctcatgtgtagagattgtatttcgtatgatggggctgctcattctctccccttaatttttttctccatctgaatttcgtcatatcaccatatgaatttactacggatatgtttggagaccacaaacagtttctctcagaatcaaaaactttcctgagtaattcggtttttatttagatttaaaaatatataattgccgaattaaaaaattctgactagctgtttctcatattaatctaaatctccttcaaacaaatcctatcttatttgttttgagcacgtagaacactaggcgttagtatatggaatggcttgccagcattaaaccgcgcgccgaggtgtcggtgccgcgcgctagcatatagctccagtcctgtgtggatcatcaagcgaatgcgtgtacgtgagaggctgtgactgtgagcaatccaaccacacgcgcaaacatagccgtacgtacgtactgatcatttaaacatgtctacttattatactaacgtataactcgtagtactcattaattcacggatcccaaatgtacattgtatactcgcgttctcaatttttcacccatcctaacacattacacacataccgatatagaaagaatactagaataccctcgttttattaaatcctaattaacacaattattctccaccttatcttcttttaatacatttatattgtactttcacaaacttcaatacaataataattacttaaaaattgagaagaaaaatatcttattttatgacgaacgaaatctgtatgacttgtctcagtgttttggattcttagaatatcaaaaattgtgggtattaattgtgtgcaactatatatagtagtaaaactataagtagttttagtatagaaaattgtgccgttaacatagtgtgtgctttcatgtgatattggtttcgatcgctactacagaaagagctataggtatcggttgggaaagccccattagtcgacacctttgaggtccccgatgaaaaaaaaagagtcagctcgatgtattggcacaagttcccccccccccccccccgcttagcctcaaaatcgacccaaaatcaatccaaaatcaatcatagcaacaacgtcatttatcatcacataaaaactccaaaatcaaacacgcaacaacatcatcatcacataaaaacaacaatacaaacaacacaaatacacaatcaacaacaccggtggatctgcccggcgctaccgacgtcccctccgccggatcttcccgccgccactgatgtcccctccgccggatccgcccgtgggtgccgccgacatcaccgccaccgctggatctgcccaccgaaaacactgctgcagccacctccgccggatctgcccgcgggagcgctgatgccaccgccaccgccgcgggagaagcttgggcgcggagggtgaggaggagggggtagaggaccatgggatctgcccgccggaaatgcctctaccggatccgctcgccggaaacgccaccaccgccgcctccgccgaattcgctgtggatccacgggagaaccttggcggaccaccggatccggcccgcgggagccgctgacaccatcgttgccgcctcctctactgccgtcaagggagagacaaaagggggagggggctgggacgagaggggaggagagggagtggccgagagggagagggatgagtgagaggaggtggcgagtgaataaggacgcccccctcacctcccacgtgtgactttagccactcgtgccccggctctttctctctcggctcgtcccatttgataagtgccggttttttttaaaaaaaaggcacccataatacattacaggtgtcggttaattaaaaaccgacactcggtaaattttttttagaaaaccgtcacctataggtaccggttttttggattttcagcctgtggaggtggggaaaacgctataggtgccggttttagctgttccgggacctgtagtgctaatatgtatgtgtgtttttgtagtagtggatatagcttttgaagaatattatataatttattgggaattgattgtcaaagtttaattacgaggaattattggtcacttaatttccattactgacaaatgaaaatgcatctcatgaaagttcaccaagtgaatactccattatacctttgagcataggactgtaaactgctaagagcatctacaacggtctctttaaatccatctctccaaatgttaatttgactaatttgctaaaaaaaaaatagagagccaaatttacctttcacaataaccgcctctccatctaccctctccaatgtgacaatgggtggcacatgtcaatcaatgtacttctttctctctcccacatcatccccccacccaccccacagtccctacccatcacctcaccggtgacgagagcggagaaagggaggacatagaatggagctcgatagacaatggtgaatgaggtgggcagtggagggtggcaggctctgacatggtcgataacaaaggcatgggtggaagtgttgacgacaacgattgtgccgactgtgcatgcagtgcaaagggcccaacaagatttagcgatggtggagccggcacggagacaatgaaggccggctcaaggaggaggagacactcatggccaccccgagcatggaggggtccgctgactgatggggtggaagaccttgacgtgccccgtctccgcccactagacctggtgacagcccgacgtggtggagtgagggcattgtggtggcagagttctagcgagggcaagtcccgtcaccatgatggcaacggagttatggcaacggagagggcgcaacaaggatggggaaggagccaacaaagaatgaagtcggggcagtggagaccgaggtagaccgatggtggggagggcccatccccatgacatagtcatgcctggcgttaacgaggagggatgtgggctagatgacggtggaaggtagggagcttctgtcgacgaccgagggccaaggggagctgggagccagtagcacatcaggggtggccacaggagcttctgccagtagtggaaaacaaagccggaaagatcaatcgttggagctctagaatggtgggtgatgacacaggaagggttgaaatcctatcatgacgccaccatggccatggtctcctgcgatttgtggtaggcgagtggtgaggcctactattgatatggcaaaatggctctctaagtttggccaatgtgcggtgaggtttggccaggttggcaaggctgttggagacatattttcaccaaaattgctaaattttggcttagagagtcattaacaactcagttcgagttgctccaaaggctcctgctcgactactttttgtttaaactaaatgttttaatgttttcgaatacgtgtaatcaaaacatttaaaccttcactcactaatacatatatggggcaaaatttgctatagaacactctagatttgtagcatttgctccataatactttagctttgtggttttgttataagacactatacctttttggaaaaattccatatattcccctaaactcttgatagaagtccgtctaccatcttgaactttaaaaccgggcatccaaccctctaaactttgtaataccattcaaattaccccctaaggtggttttgggtatttgaaagcttaaatgagtggttttgaataatttatatagcatgttcacgtatcctcaatcatcaatcatagatttatatcatacagttatatcatattagttgtcggagtatgaaacttctctagcgaggaagcgagtactccctctttgaagattcaggcaaggggcgagttttgagttcaagtgtaaatcttgtgaaagatgaacatgggggattataaaggtttgggctgcacgaatgtgtaataccctactcctgtgtgtgtggactacagatggagaacgagttacaaactgtggagcttgagcattagtggaagtatttttgctatcaagaatcgaaccctctatccgttggcctagatcctccttttatatttcaaggggagtccatagcaccaatatattgatgtcaaagtggagcctactccattcaatttagtatgttttgtcttgtcaaagtcttttgaaccgaacagggagggatgttctcccttgttggctgacgggcaaggtgccctaaaataaaagaagtgcacttgcccctgctatttcacagggctacctgggtgcgtcgtatagatgcccccaagctcccccattgtcgatgggatgtgtataagacgggttagtatatgttacttcacattaaatgcgaggcttgacgatgaactgttgtttctaccccagatacttgggggccaaggacggattgttgatggtccttaagtaccaaatccgaccaccaatccttgcataaaagcaaatgaaataaaacattagacttagtggtagtggttattactaatcatttccacaagagttgagaaatattcgtttgtaggtgaattatggacgaaaaccacctgccatgtaatgaaatacatctccaaacaattggacacgagtacaaggattggagtgcccacatgtcaatcaaaaccgactacaattgagccaatccacggtacaacatgcagagggcccaccaagaagcctcacaaccgaaggagtggccgggagatgggaccaaggggtcggccaaaccacaaggtcggccgaaccgcctttgtggtctctcacctccaccttcaacgtggacggccctaattcatcccctattatggttgtgggtggaccaacctcgtagccgctttagtaaccatcataggagggctataagaggagctctcacttcactctcacaacacacaacataagtggagtacaactcactttcatatttaggctactctctcgtagagtagaatataggaaaagagtgaggggaagctccaaaaggagtgccctagatgtcgaagttctctctaggggagttctagaggagtgccggggatgtcgacactatctatgctggagtcttgaaggagtaccggagttgtcggcactttctccgatcttgtatctcgacggatgcttcatttatataagtaagtatttgtgattcccttttgtatttacttttcttatttaagatagattctcattattacgggtttgtcacttagtatttataaagaagcaagttcttggctgagtctagagtagtaatcgataacgtaaacatggtgcctagattagatataaccttcgtttgttgtgtgctccatggaaagtgaggtgggcggcaggtggtgacagtcatgtccctcctttgtattccttcacgtttgggtacatcatagagttacagggtagactcaacttggcggaccaggggagagctagtgcccgaaataactaatagagttgtaccttgtaagggttacggataaggcatacatcctatccttagggttacgcattgtacaaatacatatactcgcaagtatacgagaaggttatgttaatcgtaagaaatttagccgaagtataaggaaaccgtccccttgagtagaaggtgttagagtcctattcagaggggatgcagactttggtatctcgtacatgtgaagtcctctccgagttgtacttggaggtcaaggcacttaggggtataagtacaagcccttcatggggtacgtgatcatcgaatcataatctcaccaccagccgtagcagaagcaatctggagggctcgaagacccagccgccgatcgatctcggcaagttgatctagatagcattactcaacggttttgttgttctctattgtaatctctgtgtttctcttcataatctcatataaactaaattaaggcttttaccttacaaggggcctgaactagtataatatttgtcacttgtcttcttgatgtcgtatcgtgtagatccttgctccgcgtaccccaataccctcaaaatacagtctacgggtatcactgtcgacataccttaacttaatattaacatagttaacccgcagtagttctctctattctaagcctctcgtttcattgttgtccttggatgaatcctattcttagactatacacatacgttctctatgattcggtacccttggaatactataaagtgaagggctatagcgcgcggtatttgtgtgcttgcagatttatatatgactgtaacaaataccaacacatatgttccatgctcaggacaggtgtgagggatgccttgaacaactcgtgatggggaccctggtccctatttctccaatattagtattatattaacatccatttgtgtaagtgagaacaacaaaaaaaatagagtcaaaatgaatgattatgtagagattttaacatatatgtgcaattcatatatcacgtaatcaaactcatccaatatatatgtaaattagataaaagccactctgcaaaaccaccttagggttctatataaacaatattatatagtttaagggttgaaagtctggtttgaaaattcaatgtgctaggtggattttcaatcaaagtttagggagtagttagaccttttttttttccttttttgttatttttttaaaaatctctaaccattattttaatacattctctttgagtggggagataaaattttccaaaaaaaaaatttacccttgtacatgaaatctaaaaatatcttacaaaattcaaaacctattccaaattgtgaaaataaaaatatttgggagggcaacataatgagaactgcaaaaaaaaagagtaaatagtgttgaacaacataatgcctagatttcatcaaacacgtcgtattccccttttccaatcattttagaataggttggtacatattactcactccatcttaaaatatactccctccaccctattttaagtacaaccgtgggtttttttttccaaatttaattgtctgtcttatttaattttttttgtaaaaaattaaaaaacataagtcacgcataaagtactattcatattttatcatctaataacaataaaaatactaatcataaaaaaattttaaataagacggacgattaaagttggacacggaaactttgaatgagacaaatccgagcatgtccagattcagtagtaaaatgtatcccatctaatattagggctgtgtttagatccaggggtgtaaagttttggcgtgtcacatcggatatacggacacatatttgaagtattaaacgtagactaataacaaaacaaattatagaatccgcctgtaaactgctagatgaatttattaaccctaattaatctatcattagcaaatgtttgctgtagcaccacattgtcagatcatggagcaattaggcttaaaagattcgtctcgcaatttacacgcaatccgtatagttagttatttttttcgtttatatttaatattccattcatgtatccaaacattcgatgtgatagggtgaaaaattttaccgggggatctaaaagggcctagattgctatattatgagacgaatggagtaataatttttgcattcagaattcattctaagatataataaattttccacctacattctatttccaactaataccaattcttttattttatttttttattaatttttttctcaatcttttatatgtaatttcatcaattttcttaatattcgtgtccggttgaacggagctaataccagtggtaccacgagtacggaggtttatgccaagcatgttcacatgtcagctgtcaaagacgagacgtgtagcttaccttatattaggacggtacgtcgtcctacgtggaatggaagcagagatggacctgtactgtacacagcacaccggagccgattagcagcaggccagtctagtgtactcccttcgtactacgaaaacgaattaaccaaatataacatattcaaatataacatattctaatacgataaatctgtacacacgtatatttagatttataatattaggatatgtcatatctggtaatagattggttttttatagaacggaggaagtaggcggtcagcgctgggcgcatggctaaattggctactcctagtagggtgggtggtccgccgccggccggcgactgctccgccggaaggataccgacacgaccggccaccgcctcaaaagccgcgcgcgcaactccccctaccagctaccagctacagtatttccccatactcgctgctgcgcaagcagttgtactatgcttcgtaggtgcagcccatagggagaatgtctcctcttttttagtcttaatattttaactgctctttgtctctcaaatgtggatcaaattctcatattctaacccatattttttttttcaaattcaaaatcagataagaatggtgccgaattatataccacttatctcattttatgtcccatattatttcctatgtattagatattaactatggagaaacacttaaagtgttaaatagatacaccaagtaaaaaattatacaatattacatttgagcttgtaaaatactccctccatctcaggaaaaactaacttttgaagattaattgtgacaagtatttatccagattcatccctaaaagttgtttcttttggagacggtgggtgtaatgattaacatatcttttattatgtttgtaatgtttgtaggtggagttataatagattgttcatatgtgtttcataacataggatatgagggcatatcctaacccatattttactgcgtttcttttttttcctcccacgttcttcctatgagtctcaggtcgagcggtcggtcggaaaatacccttcccattttcatccatactctccatcctaaaatgtaatagttcttttaactacattatctttccaaccaattacaatattttatctttaaataaatttcacaaaactacagatactttggttaaattatcacaaaactatagatttaagaagatgtatcacaaaactacagatttagtactaaatttctcagagaactacagatttaagatagggtattgcaaaactacagatttagtaccaaaattatcacaaaactataggtttagtgtcaattcaatcacaaaacttagacatttataactcaaatataacactagtgctaaggatttaaactccaatagttgtactaaatctatagttttgcgatactccaccttaaatatgtagttctctgagaattttagtgttaaatatgtagttttatgaaacatctccttaaatctgtagttttgtgataatttgactgaagtatttgtagttttgtaaaatttactcttttatcttttaatttcctcacttactttagtttcttaaccaatcatagttctttttcatttaattttatcgatttttttaaaacctagtttgagacggagatactagcttggtagtattatttggcaccgtaaaacttgtttagcgcgtcccgtttcgctgtttttttttctccttggtctttagtgtcgaccttagttttttttttttttaccttaataggaccttccggtttatttgcacctggaagatcgaagaaggccctgctgcctggtcgtacgagcacgacatgttttggtacgagtaataatctgttgttgcctgctcgtacggcgtgtgtaggagtaataatctgttaagaggtaactgttactagtaattctgtccactggattaggaccaaattaccacacctgacgaagacacaaatctcttttatacaggtttagtattaattagtactcgtaggacataatatacaaaaatacctacctctaatacttatccccgttattatagaatcatatttttttctttatttttaatccactctttattttttttctatatgtgcctcagggtggctcattctcttgtccagagcgtttaataatcttcaagtcccatttacaatgcacatattctacagaaatcgattaggtttttatctggagcaattttaatcctacttagagcttacaaacttattatagtcgtcatgataattatagttttatataaaataaccgcaaaaaatatacattcagaacaacatcaatatttctcacacgatgacacggataagaagaaaagaaacctactcctaagggcatgtccaacaaaaggagcacccccaacatcccacatgagcaaaagtgatgaaggaccagactagggatatgcctcacattgtaagccataccatctcatttttacaattcagcacctgtcagtcggtcacattttgtatttaaacccttggattatttttattcacatataagtccaatatttcaagtataccccccagaaatcataaacatataaaaacatcaacccctcctctcctcaccatatttccccaatttctccggcggtctcttccccggcttcgcctctctctccctgcacctcccctccccgatggcgccgcctctccccggcccggccttctctccccatcaccggatcaagcggcggtggtggcggatcgaggcggctgctgcagatccacgcagcggcggccgggatcgagacggtggccgcggatccacgcggcggcgaccgggatcgacgcggtggccgacccatcgacatggcggtgcttggtatcgatgcggcgatggccaggaccacatcccatcaatctccgatgcgccgctgcacttcttctcccccaccggttagcctcgagctcgccggatccacacggcaacgacggcctcgaccttgactgtgatggcaatggcgcgggagctcgagttgatggcgagctggagcgacggcatggggcgacacagctacccaacacgcatcctggtcgattcctccgagcaaaaatgcgatgcctctgagaagggcgcgtggacctccagcagcattcgcgcacccctacagggatgcggctccttccgaggtgacgtgaatattcgctttcagaggtgtgagaccacgctccagggtggagcgctaggcatgccctaacatgtcttctcttgaattatgaaaaaaaaatttacagggtgatcatcatctcaatatgctcggtcatcactggcttatatagctgtgggccaccggatttcgcgaaattccattttccaccggtgcccgaaacgaaaggggctgtcagaatcgtaaaccctggctgtggcaatggcatgaccaaattgttagcttgcagtctcaaaaaaaaatgtgagcttgcaataagccattaaaacccactaatccagccaagtaatgccgatttttaccccacctggacctggacaaggtgcccccagatggaggaagccagagcaaaccaaaaccaaagtgggcaccaccagcatcagaatgccctttattcaagggggccccacattgtcagcagctaggctagtaacaggtcatcatgcctgaataggaagaggcaacaaccaattgccacactttcttgcacaaaaacccctgacagatcacaatatcacatggcaagtgtagcccaagaaaacccacaagaatgccatggagaagaagcttctgctgcttctctctctctctctgtgtctagtctaccagcttgctgtatattattaggtgcaacagggcagcaggcagtggtggccaacaatagacaattggacaacctgtttcctcctcttcggctctcctcctcctcctcttgccttctcttcttcttgttcttgcccaatcctagtagaagcgcctaacttgtcgtttgctgtggcttgggttttgagagccggaggaggcaggattgatttttccatgattgggttttcttgattgattggcgcctgctgctgcggtgcggttggtccaagaaccgggatttcccggcgcggaatccggtcatccaagaggtgagatgatctttctttccttgccctgcttctctcgcggttctttaggcgttcttggcgtttctgttcttcaattattattattactatttgttaattttgaagaagtggagcgggattgttcgcctgttcgttgcttttggcgagtgtagaatcctgaaaattttaatgaggtggatgtgagagtctgttctgttggtggtgatttttgtcccggccgtgaagaacaaccgctgctctactgggtggttcttgatttggttttggtccgttctgccagtgttgcttgttctttctcaactgcgaggtgtgagcatggcgttaaattccatcttttagtgtttatcctctaaatttctgaatttttgggggcggttggatggttacactccatcccgtatttgagggcaaagacaacttctatgttaaattctgttttgtttctctgtcaattggtcagtcagtataaatttggcccgttcttcacgccagtgaggcgaaaattgttcaatcggttcaatcttcagagaatttctttatggaaaaatcacaacttccgattagtggatcaagtctctttctttgcggtttttcccctgcaaatttttatgtcaagttttgaggcggtagcagcagcagtcgttttcagcatagaaatatgcacattggaggtatcgaatattgtttaatttgtttggtagttttgctgaggatattcacccaagaacatagtcttcccggtcagaaaaaataatctgatatattagtggcagtcctcttctgaagtcatctcagctgaaatctagcctgtttttcttgcgggtattttgtcgctggagttttaatttagaagtttaaattaaagttaaggttgtttatatatatacgcttattgctcctcaccaattagtacagtgaattaacaagccttaatttctttattaatctgatatacattgggggtgaactgctaaactctggtcaaaggctgcttgcctgaccacacacttctttttttctgcaacttgtgacaggtcaagtagtgcatgttacacggtttcttccgagtggtgcaagaactagaccttgtttaggcttaacgtctgatttgtttttttttaacttagaaattaagctacactaaaatacctagtagtagcatgtttttggttttggtcggttgcacattgtggtgagacaggaagtgcataacacttttccattattagaaaaagattaggttgtttttggatgatttccttgattttgggggtgctaaatagtagtagtgctgtttgattacatttcgtcaaaattacttttttgacctgccttttgctgtgccatggccgatagccgtgcagggtttgtctgggctttatcagtgcacatatttttatggttctttaatctgtggttactctctgctagtggtttattacccagctgtaatcacctgttcatagcgtggagcgttttgttaatgcctatttaatggagtgattcattttactttcctgccatgtcttggtaactgcaagccagatgtagtagtatattaaaagtttcccctcctagttttgctggggaccaagaacattgtccagcttgtctaaataccaaaagaagtcttcccttgcaaagagagtggaagtgtgttttgcactctgaaagtctagctggcatattctcatgatacttttctcaatttctactccattccaggtgcatctgaatagataagaagagaacataatctttgggcattctctgtggttgatctctgaaaaaggtatcaaacagcctgcaaattaggtctcctgctctttccatcaaaatgtcaggtatcattttttttcttatcttatttatatatttgtgatgggttgctgatgaaatggttgctcattagtttactaatgggtgctattgtgctttgtgtgtaaagttcggcgccgatcagagagtatggagggcctgttctcgtttgacgagaggaaagatcgaaggtcagatgtggagaactcggaggacgagcggagaaggctatccattgggtcactcaagaagaaggcactgaatgcatcaaacaagctaacacattcactcaagaagagggggaagagaaaggtggagaatcggccctcattcacaatcgaagatgtcagggatgaagaagaggagcgtgctgtcttttccttccagcaggagctttttagcaggaacttgctgcctgacaagcataacgattaccacatgttgctgaggttggtgttggaacaatgctgaaagattgagagctactgaagcatgcagttgtttgtttctttctttcttcctttctttttttcttttgtgctgaagctctttctagttttatttgcaatatgtgtctaaaagttgtatgccttcattatctctataggtttttgaaggctaggaaatttgacactgagaaagccattcaaatgtgggctgagatgctccagtggaggaaagaattcggcgcagacacaatactagaggtgaggctaaacggctaatgctgctattaattgatacataaaaattgaaaatttaacttcgccagatacttcctgaaggatattcaaatatgttggtccatgtacacattgttttgtttacataaataggagattccatctggcatcttaaactaggagtgctttaaggtatagactatagagtgatgagtagtagtacgtattttatccccaagctcaaatcggtttattttgaaaggataactgatgtctacaaataaatattgcaggacttcaattttgaagagctagacgaggtccttgtctattatcctcagggttaccatggagttgacaggcagggaagnccggtatacatagagagactaggaaaagttgaaccaaataaactgatgcacattactacagttgaccgctatataaagtatcatgtacaagagtttgagagagcattccatgaaaagtttccagcatgctctattgcagcgaaaaggcatattgattctactacgaccatacttgatgtcgatggtgtggtatgctgattcttctcatatctgaaatcacatttgtttgtgctgcaaattctcacgaattattttattacaaactgtaatcctaataatgttcctactattcattgccaattctgttgcagggtctcaagaacttcagcaaaacagccagggacatgctgggtagaatgcagaagattgacagtgactattatcctgaggtatgctacttttgttaatttccttgatcaatccaaggactaagtttggtttacactttacctgtatactcagacactgcatcagatgtttgttgtgaatgctggtaatggtttcaaactactctggaatacagtgaaaggcttccttgatcccaaaactgcatcaaagatacatgtgagtatgaatcctccctggagatattccttttcctgctcttgtccaaataaatatactatattttaatggagcttcgtttataggttttgggaacaaaatttcatggaaaactccttgaagtgatagatgcaaggtaagctttccattcagaaacattttatatggtttcttgatcataatgattttgtcgtcatgtctttgatttaatgcacattgttttgctatttacagccaacttcctgaatttttgggtggagcatgcacttgtgctgctgagggaggatgcctcaagtctaacaaaggcccatggaatgatcctaacattatgaaggtaatttttgttgatttatttcctaaaaatatatgtgcttcttcttagtaaggtttaatagtggttcaaaatttggattatttttgttgcttttgaattgtgacaagtgacaatatgataatgcctagttgatttagattacttaacttactacataaaaaccccaatatctttgttctcggcatgcttaaattataaatagaacatgttatataatcaatcattcaggattctctctctctctctctctctctctctctctctctctctctctctcttctgaagaaagcacacagatctccttatctagttcaaacaatattttcaaaagaatattttttttccatacatgttatactgaagtttatagcagcatcct

SEQ ID NO: 4796 - DNA, 7215 bp, Oryza sativa
ccacctgtcggcgaccccgggagaggagggaggagcggcttggctgggcctcggcctgcggccagcccagcagggaggagggggaggaaaggagagaatgggccagcggcccattcgaaaaaagggaggaaaaagaaaaagaaaaaggaaaaaggattttccccagaattaaaatattgcttgctcaattttaattggttaaaattatttctagggctctgaaaattccactaaaaatcctgtcagtgaatttcgacatgtagaactcaagaaaaattccacatgccaattccgattattaattgcattgatttaaaagggtttactcttgctttgcaccggtattttcttagggtcatttataaattaaatttaggcttgggaggagaacttcggggtgtgacaccggaccgccgacgccattgcacacggcttggcgctgcccttcaggcacgcccccagccggccgagatggagccgttgcggtgcttgtcgccattgtcgccgctcgctcactcgcccgggtgagagagccgtcaaagagagggaagagattagggttagggttggaaaccctttccccccaccggctggcgatttcatcgccgcaggatcaatccgagccgtccatcggatcggacagcaaagatcgaccccgcgtcgggacgtcgccttcataggccgcgccgatatgggccgcgtccgcctaagcgccgcacgtgcacataatgggccggtccgttttgggccggattttcgataagagtgggcctttatttttaatttattaagcccacgaatttaatttctcataatgtgttatatctttattagctaaattttatcctgattttagccttttttatgggccggctaaggaaatgattggccgcattattatatttaagcccgccatttaatgttttatttatttccataaattcatttatgagctttcttagctattttaaaatttctggaaaattatggtcaattatttgatcacttagaaaattatttctagttaaatggaaccaacgggaagtttggctagaaagaaattaatgatatgatattatatttgaccaatgttaatataatttcatgtcaatatttattaagattattatttccttaagccacttaatttatttctagttgaatggaaatttaactagaaagtatttatgatttcatgtcaacatcattatgatggtcatttccttagtatattaattatttatagtcgaatggaaccaacgagaaattcgactagaaagcattaagatgtgaagttatatttaacccactttattataattgcgtgtcaattataattttttattccttagttattttctaccaaacggtgatataattgaggaattaattttaagattattcataattatttatgaccaatggtgctttgactatgaaattttaagtttattttgcatatgatcgattaagccaatgtaaattaactttatgcaattggcaatgcttattatttaagatcagttgcaatactgagtaatttatttctagattaatggaaccaacgggaagtttatctagaaagaaagatgatttcattaagattgttatttccttaattatttctgcccaacggtgatgtaattaaggaaacatctaagtatcgtcaatcattattttcattttctttgtcattttggcctttacggtgatatgacttagaattttacttatgccactagtgcattaattcctccgtcactcgtgccttacggtgatatgatcaatgatctctaatttgttactaagcttaattcctttaccatttctgcccaacggtgatatggctaaggactttaatttcatgtcatttactaatagcattatgccctatatcatatctacctgattttggtaatttgatttaggatattaattttcagtaattcattattctctgccatttcataatcttttctaccctatggtgtttgattatgaaaattaagatttatttgtatgtgattaattaagccaatggaaattaattgcattactaatgtttaattaataattaatttttcagcattaggacaacttaaggctattcagcttcgtgatggatcaaattacgttgaatgttgaatggagaaataatgtgcttattaacttagccatgttggattatgacttagccataagagaggatcctccctaggaacctcaactggccgaagaactcaatataattgaggaagaatatgataatctcatgtgggcctacaataagaagttagccaactgggagaagtccaacagaatgtgcttaatttatgtcaagggtgccatctctccagaagttattggaggaatcattgactataatgacattaagatgtatctggcaaacattgaagaaagttttgaatttgcacctgacactcatgccaatatgcttgtaaatgagatgatcactagtcattacaatggcaaaagtggtataaggaagcacatccttgagatgactcatatggcaaatcaactcagatccatggatatgaaaatatctgatggatttttagtgcacatcatcatgagatctcttggtcctaactatgatccattcaaaacaaaatataatactcagaaagaggagtggaccatacaagaattgatcttacactccgtggaagaggaagagcgccagaaagctgaaaagcagaagattaaagaccggctcaacctcactaatgcctttgataaaggcaaaaaggtctatcaaggggaatcctctaataagaatagtgagccagagggtgagcagaagcaagaagggatcaaggcctccacttcagctgttcctttaagtacaagtccctactgccacttctgtgcgtcagatggacattggcagagaaattgcacacgcttcacagcgtggttagtcaagaaaggtataaatgaaattaaataaatcccttgtgatgaattttcccttaatacttagtgagtttgactcaatgccgatgtgcatgtttctaactcattacaggaaactcgcaccgtccaaacggtagcaaagaggggagtgaacactcagagtaactgatggagtgaagatgaaagtgaagtgttgttggagacctcacacttagtttcacagcaattgcaataatgtcttatttgttcactctattaagagaaactttactagtttaattttttaaattcatatgagaaacgggtcatgtccgttattttaccaaatagaacatgatacattaagtgtgataataaagtgattggtcttgtccttgtgcacgacagtcatatttgttcttttggatgatcatgtgactattataataattgcctgtaatgacaaaagatgagacatcattgaaattgtgacattgtaattgatgtcacatttctaggggaggttagaacgtctcataagttggagatattctttcccttggattgattttagtgaagttgtgcactaattaaacacagttttctattctagtagcaacatattgtgtgttttctgcctaacacattgatatggttgtgaaagacatgtcccaggatcgaattattaagctaagcatttgctaatggatccatactctaaaggctcataaaattaagattaattaagattatgttctggccagtatatatgtaaattagagccttactgagatcctggatgagggggactaaatttttcaatcaacacccactaagttaagcttgagtttatttgagtactatagtgagctataggtcttgttgtctcagtgacgcataatgttgttgaagacacattgccttggggagctattttatttaataaactcgtaagtaagtctcaaaatcaaggggagaatgttggttgattttgtcgacttgtgtcgataagggttaggagaggatctaaaccatcggtttccttatcctgacaagaaacaaactaagagataaatttgttttttatgtgatcggtacagaaaacagaatcctaaactaattgagataacccccgagccccaccagtgtcgcctatataaagaaagagaaggaaagaggcagacgaccaaactctctctctctctctaatctcaaaccctaattaatcgcccaatcgatctaggcactggaaggggttcgtgaggcatctctggaagaagaagaaagaagaacggtaatggcttctaactcaggtcagtagatcaattatttttccgcataagcaaaaggtgattgtttatagactaaagcttaagatcatgtaattagaactccaacaatgtactcatgtccttaatttgttttagaatccaaaatggtgcatattcatgaatatgaatttgtataaatttcttttccagcagttaacgtgaaaagcagtgtgcgaataaaaatgggggcaacagggtcatgacaaataaagcgcattacatcgcatattaatcactgcttgccagttgtatgggttgatgaataacacgtagcaataacaagtggtcatttagaaattattgctgccaacagacatgacgatagattgttgcgcccgcacaggcaatgcagaagttcatgacagaagaagcaaaacggaaatcattctttagatttatcatttatgaaagagtaaattttagaaaactgcaacgtagtgacaaaactatcagtttgctgcaacattagtgacctatttcagtttgctgcaataacagagtgtctctatagttgcaattttctgaaatttacaatacagctaacctgagcctctatcccccccaggggagcttcttgttgcttagttccctttatagaacctgaaaggaacataatgccaacggagtattctaatgcagccatataatagatacccagttttatatgtacaccaatacgggcaaatattcaagattacgttgcaccagttccacggggaattttgcaggagttagtttgagatatgatgcaagagcttcacatttggcttgtgccttacatgtcctttcagaatatctttcaatctatcatcactttctgatgatatatatatatcaactcataaatgtaagtagcggaaataatttgaccgaacagtgcagataccaaatattaatgcagtaacaccagaagggaagcaaaggcaaaggatgctcacaaaaagaaaagaagaagaagaagaagctattgttccttagtttacaaaatagtttttatgaggatatagtagatactacaattagtataacacaatattgcaataagataataaataccacaatggttatagccttgcaaacaaaattaggatatatggattttaggacccacaccagcatcaagctaaatggaaaagaaagttgcccatgcatgtaaaacttatggtcatggatttaactttttttattgggagtctaattctcaaagtattggagtaaaagcccagaacatggatttcactctgaatgcaatgatacatgaaatttttgtatattctccccaaaaggacgaaacagaagggctttcccagtacactgagatggcattctcccttgccatcccacgtcggcaaagatggaggacacataccgcctttgcttccggacccaccaaaatgaggttcttgtgtccaaataaggccaccggttcttgggcgaaaaagagggcgcgtgaggctaggcacagcgttgcttccgcgctgtggagcgagtggcgtcgccctccttcccgtgcccgcagtcgccctcaagcgcgcgccgcctagcccaccgtcgacgtcgcctcttgccgacgagccgcctagcctgccgtcgccgtctgcaaccgacgagccgccaagccctctgtcgtcgtcgtcgtcgcctcccagatccgttgtggagagaggataggagaggcgtcggcagtcgagggggacaaggagggcggcaccatcgagctgttgtcaccgccgtgccgcccagagctcgccggccgctccgaggtcatcctgtaccgccagatccgcgttgccggcctgggaggagagccgccggtcgtcggagcaaagaaggggtggtccccgtcgtgggagagtgacgaagatcagggtggtggtggggttgccgctcggactgcccaccggcgccgcctccgtccgccccaccgcccagcgccgtcgccgcccgggccctgccgcactccggtcgccgcctcgcttcctccgccgcatcgacttccagtgcctcgctttgttcggttcgactggtggagaagggatagaggagtgagagaggagagaaaaagtgagagtataaaaaaagactagtaggatccactcaaagggatatgcaccatggagcatgtagctaacaatgttcctggtgttcttgagctgagttatcacacgaggaacggtatatttttgcgacgcactcctaatgccctaaaagaggccgttcattagtacggcagtcatgtcgaataagctagagctccaacaaaacactaccatactcaattctttgaccccaattattcaaaagaaacatgaagcttcttccagatgcctactatgtggtgattatactaaccttcttttcaatcgcgaagaaaaatataatgaggtgagaagcacgaagaattcagctggacaaaacattatcacataagcaaataagttgagtcgtagcacttctctttcaaggttggtagcaagaacgcctcaagaactcatcaaaatttcaaggtggaaattatgagagccttctcctccacgggagcccagagcccacaagatttcaaaaccttttcagaaagactagagagaacggtcgtatacagtgggtgaacggtataggtacccttcttcgatagggtgccctcaaccaaaaccacagggctaatgtaggtaaaaaatccacacaattcaatacaagatgctaacaaacaaaaatgacttctcaggatggaagaacatacgtatgtgaatatgtgatgctcatgcggtgcagagatcaaaactcagcagtatggaagcacaggcaatataactcacgagttcagggctcaaaatattaattttattatctcagggccgtggaggcgaggtctttagcatacacatactaattacctagcaataacaccaaaagagtactgctaccccggtgttatgtcttcttaaaagaaatcatttggttttcc

SEQ ID NO: 4797 - DNA, 39594 bp, Oryza sativa
ccccattaagtatgtggatgcatagagattcacatatacatacgtggtttgctagtttagtcttaattgtgaattagctgtgaagtactcttgtttatattaggatattaatagattactgggtgaccttagaaactgtttgatacttttgatcagtacaagaattatgtgcctccactctaatgatgataattactgataaaaatgtcaatttggtaaagttaataagttatattgacatagcctaatgacccctcctgaatatgcagacttagccacagaaatatattatgttctttcagcaggcagtcacacaaacatactgttaattcttcatggaggcataagccttgacaaaaaaagatgatgagattgaaatggcatgcacgcattttatctccatttcatattgcataacacataaaaaaaactggtagtaaatttccagaataagtgtcaaggcagtaagttgatacaagattaccttttctgggatctgcactaaagaccccatcaacatcagtccagatagtgacctgaccagccttaacaagtgaaccaattatggctgcagagaaatcacttccatctcttttcaaggttgtaggaatgttttcaggtgtactcgcaataaacccagtagcaattattgtctcagctggctgtcgagcgaaccatttctcaagtcgtttctcagattccaaatagtcaggatctacttggttggaacctgtaggatttacaactaaaacttctcgtgtgtccatccaactgcaaggggttccagactgcatagtgtaagatattttggtgtaagtccatgtttttaaaggtataagctaggtaatatttttatatgagcagtgccttctgaatatagtaggtgtatttccatagagattactctaaactaaatgcaaatgcacaaattggttttgttgataataacaacattaaagaaccaaatggtttggtacaagtgtaaaactacacccaaatatttaaaataagctcctatgcacttataaaatagaatatttatttctcatgaataataatgttcagaaaaggagatcgagcactgctagttctatctcaaaaaagaaaggtgcatatagactacattcagctgtggcttgaccggatttccacagaagaaaggatgatccaatgagcaattattactgaagctactgtagtgtaaggaggttctatgcatgaattctacagcgagagtaattgctttgtgccatagagatgttaatttcttttagtgtgttcattgttaccttctttatggcaaatgacaacaattgagctgaccatatctctccatgtccaacaacaaaatctgagaaagactccgtggcatgcccagctgcaaaaagggaaatgtatcataactcagctaagactatatatctgcaatcaaaccacaccattggtacataattgtaaatagtcagcagttagcacagaagtactaagggcccatgtaaatcctctccataagttggacaaaataaaggacaacctattttactgaaaaagaaaaacatatgacagaaagataagaaaaatagggtgtgattaacctatgcaaattgcacgaagcattgcttttaggttactgacatccgcgtgcaactgagataagaatcttgcaaggtcctctcctccaagcagatcctttgctgctgccatatgcttctcgaaaacttcatcaagtgcagtgatataagaatcatcccttgattgagccttatttacaaggttgtacatcatgtcagtgactttagacattgcagacacaactaccagtttcctctcagaagggtcgcgaaggattatgtcagccacattctgaatcctctgggaggttcccatgcaggtcccaccaaatttatgcacagaccacatgtcaccttttggaaggtgagcactagcttcagcttgctcaactgaaacagctgagaagaaattcataaacttagatggcaatatattaatgatccacttctatcaatacaatgaacgaactatttattcctattttttgttatcttaatgagacaaagacaagccttctttaccactttaggggaagtaaagctaaaagaaaaatgtgatagtaacaataacattgatagtggttaaattgtatcaaaatcaaaacctgagatgcaataccaaaaatgagaataagtaccctgcaatagctttaatcaaagaacagttccaattgagtaatggaatctagcctatggaatttctccgtcaaaaaaggggtgaaaattataccacaatctagactagactaaaagtgaactgggagaaaggaacaaattcaacatagtgaaacaatggccatgaaagatgatagataatattaccagcagctggcttgagcatattcttcgaaacatccccataaagtcctcctggaaggtcgctggccctgaataaagcaaaagtagaaaaaaaaaagaggaaggattgattcattcactgaaatttcacattgcctgatggttaccaaagatgatatagaaataataattttattgaatgcagaactgatagagtagaaattgactagagaagaagaccgttaggttgctatattttgataagaagacagttatctgataagaatacgttaacattccgtaaggagtataactgctcaacagctttcgatagaacatacatgatgcaccaaatatgcatttccccaaattccctttagaaataatactgcaccacgctatcaatcacagctaagcgaaatgcacaacaacgaaaagaaaaaaaccctcatgtctgtgacccaacgccaactcacaacatgacaatttcagtcaagaagggattcaatccatgcacagaaaaccgttcacgatgaagaacaccaaccacagagagctccaaaacgaccatgcctgagtcttctcacatcgccaccgctgcggattcacacctctgcatatataaataatcaccagtcaggaaaccaacaaaccgcatcaccagaggggagaaaatcgacaaactggaaaaaaaaaccacggtcaaggaaatgaaatcgcgcatcctcgacacgaacaaatccacccaaaaaaaacaaataaaaaaactctggggattcgcccagggtaaaccaacgaggagaaaccgacgagacgtccgcaggggacgcgagaggcgcgcgagatgggaggagaggggacgacctgtgggagggggcggcggcggggcgagggccgcggcggggacgggccgcggcgaaggcggcggcggggtgcgggctcgcgacggcgaggctccacatggtggcagccagcgcagccgaaatgggtgggattagactgatgagcgtgacagcgagctccaaaaccctgctttaaccctatttgcattttttccgttttaccccctcctactttttgttttttaatatctgtgtttatttaaacgtaacaaacaaataactacttcatccgtttcacaatgtaagttattctaacatttctcacattcatattgatgttaataaatctagacatattgatgttaatgatgtctagattcattaacattaatataaatgtaggaaatgttagaataacttacattgtgaaacggagggagtatacaataatgagataatagtataaatttgtatgtctactctgaggggcgtagaaatcaaggatgaaaaatagaaagcgaagaaacagcctctagattaattcagaagttcaaattttgttgtgttcttccaatggaacactaagttgtgttattttttaaggcaatatagttatatagggttttttttctcaaatatcagcaacttgtactgtggtccattcaatgataccaatgggccatgggccgtggcaatggtctaatttacattttacttgatttttctctacagaaatctgattgatttctcggtcttcttttctttgcaacaactaaatttaaaagtgcgtgagctatacatatttaccttgtgtcgaaaatctgataaaattcctactgtcctagcaaaggcatgaatcatcttttcgattatattttcaaatatccgggcacgtttctgcgagtgctcatcttggtttcgaatgtagttcacgcgtacgtctacgtgcatgttgtcgaaccatttggctataggcggcagatggtttgtgacttctgtgactgcccctgaagacctgcaggacattttctgcggttggaattctgaaccatgtgctacagtgctttcagccaactagattaaccagagaaggcgaaagcaaaccatacttctccagcgtcatagtttgattcagaccagctacaagacaaattagttggtaatacaaaattttggcataaaaaactttcagccccagaataatatatatcaaggggctattcccgaccatgatatctgtatagtatagaaaacgttgatactaaggttgtatgagattgaggtaaagtaggtgggagaatggatttttatactggtttggacctcaggatagataataactctagttcactttatatatagctctaggttgtatcactttattataatagggaagcaaactagctaccaactactccctccatcccataatataaggtgtgcacgtatttcaagattcaacctttaaaacatttgaccaacacttagtataatatgaaatgaattttatttgttaaaaactatatcattagattgtgatttaaatttacttttatatggttataattttgttgataaaaattttatagtatataagaaattataaactaaatattagttttggagaccgtgctaactttgatcacactttatatatgggatagagggagtagtattcgccgtgaactaatccgactacttgaagtcgacggctagctattgtcttcctattggttgattttgcaatgtggcttgtggctatggcttttgatttttcgatgccctcccctcctagagaggcgttgtatttatataagtagacaacttcttatccaagtagaattcaaagagccctcgtaggatacgggcatataagactttgccttcctcatgttagaatccaatatcttctattcccgtggaaggagttcttgttcttatatacctttctgcataatgttaggtatgcaatacttttggtggtcacgaatctaagtataggaggtatatctaattcgtatcactggtagtagcccttgaaaacgaactcgagaaaacgagtaggtaaatagtccttgaacaagtcatctttcccagcactaggctagaaaattactgaattttgaatttggagtgaagtcagaacaccaccaccacagaaggacaaccactaaacttctgccaaatatttcttggcctttgttggaggataaactcctcgagcaggggatccctccttcttcagttcggccgggggcagtgaatgtagattgaggaactgggcgtattagaaagaaacaaggggggtcggggctgcgacctagcgggcgagacaggaaagattatacaggatcgggccgctaagaagcgtaataccctactcatgtgtatgatgatttttctgagctttgaaagtctctgaatctctggtgtacagactagagtcaagtgttcctattctcctctctcctccccctctcactggacgtccacatccttttatactccaaggggttgttacacgcatcggatgtgccatccagtaaaaagggcaaatattctctagattaaacgcgtgtcttgcactacagcttggaaatttcgatcatcggctgtcgagcgggccccatcaaatcatgccggctgacacaagccgatatggaggaggatccctgtcattcttcatttaatggttgtagacttgaggcttggatgtgtcgggaacgctgtcccgggcgctgtgtctctcgtcatcttgatgggacagggcgcacctaccgcactccgcatgacactagggcagaccacgcgtggcctgttgctgtctcgtccgttgtttcaaccggtcacgttcggtcaagattcggtcaggcgagcggcacgccacatttaatgtggcgaggaacgcccgctccgcccgcattaaatgtggttaggtgggcgcggagcggcgtccacgaatcatctttgcatggtggtcatgtggggaccaccccgaggggtcggggcagcctgacccctcgggttaggtacgggcggcttccacttgtccacgggcgcgaccccccggggtgagcgccacatggatgccaagggcggctcctgccttttaagttcggtactcccggtacccccaggcccatatcaccgacaacctttctcaaaatatgaatcatcacctgtggtttataaaactcgcttctgagattcatttgggttccatttgcaagtattgttgttcttcctcctttccgctcccaatccaccacaacgcacagaaaaaccctaaccaaaactttcccttccaccaccaagttcgccatcgatctcctacagtccaatgtcaacaaggcggccatggacaagctccagtgcgatggggcgcttccaaatgctcgggcgattgagcgcacaaaaggtggtaccgatccttatcctactattggaaaaatcataatcatttcttctttcgtcaaatgtggattctcttccttgattactgtgacctacacctccttcacttgaatccaaattcgatcgcctttcttaccatcatcacccacctatgtgaggtgtacctcggagcgcgaccctttctagatctatttagataattttacgaggttatattcatggagcaatcaaggatcacaggctgctatggtcttcgccttagagatgggatgcaggactgttaacaacggaattttgcatcatactcgaggcggatttggtgcagaatcgagttggattaagaatcgaactgtgcatcaactaggcattgcatcggctggaaacaaagttggagacagactaccgatatggcaagcaaccgatatggtttaacttgggcttgggttgggcctagattggaataaatgatattgccgtatagagattgagctcatttaaggcaattgtatctattaattaggatatttttgtcgatttaaattagagttatggtaagagttgcttgtattttatctttaggaaagtgtgagtcgtgtccgtaatggacaagttttgtactcgaggtataaatatgaaccccagggcattgtaataagggatcgaaatcaatcaatacaactttcggtgcagcgccaccctttttgttttacttttcgacaagttcttgcttcaagtcgaggcatcggctgcaatttctcgacaaaaggtaacttgtctcgatggcttgcgctatcggggctattatgtcgttttagatgtattagtccttttatcgtggttattgatatcatatatcttagttaatctagtcttagtatctcgatttagttctatcgactgacacttgttttagggtttatgctggtatcggctaaatcgtcttactagattagattaactaaggtatctaccatcctgaaaagtgtttaactccttgattgtttagactttatgcttctttgtatactttgtgatgcatcacccctagccgtatttagaattgtaaaaactaacctggagttaatcataattaaggataatatcggggtttcaactgatcttacctaatatgcatgatagcatatgtttcatggtctatctacgtatatttgctacttatatgattagattgttctatatagacgcatcaagttagattgatattgcccaaacttcatatctggtgatcaattcctatttgatatgtttatatagattaatttactcacataagtttatattggagtattagccagtatattatctatctttgctctaaatattgatctatcagctatttccgtaatattgtcttaaaataattcataaaagctaaagaggcagtattacagccgatagggcatatttagggttttgctttcattgactatcataaagccacagccgattaggtttacccgtatttgctgggtcctgacgatatgtcgtcggctcgattggccaattggctatcgttcatctaattacgtttttctgttttctcttgttagttgtagatcaaactagctggcacgctcttagcattagaggcaagccttagacctacactggagtgaagcgaatctcccgagtcgtcgtgttttacgtcaacagggacaagtacatcccctttaattgccccacctctaggaaagaatggaggaatagatggttttatctccacacagtgactgcctccccttgcctttccctccctgacttcaaagcaatctaaaaaaagttctagatttcgagtcctccaatcaccgaatccttaggaccttttgtaacaaagatcaaatactttcaagatcgtggtctgatgggatacgagatcattgaggatttcgtgtgttgtccaattcaaccgctctatgctcgtgcttatcatgcgtataagtacacaggagatgaagacacgacgtggatatagccctgggttacattgtccaatgttatcagtaggatttatcataataaaaacttttgttgagcactaatgttgacaatattggtgtagatctctccgatgacacagtgaagactcgcatcagcaacgtttcatacggttgcagctatcccaatcaacctcatttatctattttgggccacaaattggttaatccatctaccgcatagatcatccatcccacttggtgatggtctgaaagcaaaattaaatctaatatcatatttttccattggacaagcatcgtaagtcaatccactaatcatgaataccacaaaaacatagatagttctgatcattttcatccccctatgagtcaaattatcttctttaaaatactactacttaacaccccctataagaaaacttttgtagcttgccaaaactgattgtttagcctttaaagccattaaaaaatattttacatagaactctagttttctatttaacaaccactgaagactcctcaaacaaaaccacacaaacatttatgctgaagttctagtcacatgttataattttgcacatagcagttttcttctaattcacatatttgaacaacttgggtgtactcggttcgaaatttatctttgtgtttcccaaatatagtttatacgcaaattagagttaaaggctacactcatagttgaacttatatgagctattgaacttacatttctttagctttgtgaaagctccctccaactagccaacaaacagaggaattccatcacctaaataacaaataaaatttagaacacatgtaacattacaacctggaaaagataggaatgaaaatataggttgttgcggtcttgttaatcttcttaggcacttaggagacgagaatctcgaatcatgttgcatgttgatggataacctaacaaagcaacataaaagagggattgttctttaaatggaaaaaagatattaagttaaaatgtgatcacaacagaagttttttaagttaaagtataaatactttgaacgcattctcgtcggtcgtgtcatccccgatataaatcgggagcacgtcttcagagttgagtccaaggcggtcgagcatgtacttaactacatttcccttgtttcgggaatcctttaaatgtatctcgtgaaccttataaaagtaaaagatgtcatgagcttgctgtaacttttcctaaaaacaaaatgcaggagtagtagaacaatttagaatatatagaagtgttaatagttgtaacatctataagccatttttcttccaaatacatgaataatacatgatatttgtgcagttaataggaaatgatagccatgccaactaatgatgttagcggtagctggccggtagatatagacatttatcaccaaaccggggggcaaatgcccccttattagtctttactttcttattcttcccgagtatctctcggtttcacccatggcagttgtaaatctacaatcattaatgttaaactctactaatgacaactaatgaacttagaaattaagattaaatattaatagctgaacataaagttttgtaggtatctactatgaatatctctccagcagcccatgtcaaactcttgttattgaattttgataaaggaaatattgctatgaataataattaaatgtagcatgttagtcttattaaactaaatcttcttaccaacaatatttaggtttcctctcttacctttagttttgagtgtagactagtctgtggaaagattcagcgttgggaccaataaacaaagagtatggttggtatcgacaactacaccagatcactgcttctctcacccataaacctatcaaaaccttgtaaagacgagaacccaaaacaaaattgacactttaaatgtgtcaactctggtgtgcaatctactagcccatacattatgtacttactagaatctaataccttgaaggcattctcatcggtcgtgtcatccccgatataaattggaccttgtaaagacgagaacccaaaacaaaattgacactctaaatgtgtcaactctggtgtgcaatctactagcccatacattatgtacttaccggaatctaataccttgaaggcattctcatcggtcgtgtcatccccaatataaattgggagcacgtcttcatagttaagtccaaggaggtcgagcaggtacttaaccacatggaggtcatgagatgccacctccagccgccacagctcaagattgtgtagattattgccaatgagccagagctgcccgtcaatgtcagggaaggggtaagattgcacaaagaggataaagggctttcacctgcgcgagtagcaagaaggcaaggaagacgtcagtacatgccgtgggacgggcgcaactctagacgatggggtgggctggcgcatagacgggcaccaccggcagcgagaaatgtcgggctgcagcggctactcaatgttgggtcaaattctgttcagagttgacgataaagaagtaaaaaaatgatggtagtgctagaaattggaatggaggaagcttttagatgctattagagatttagagtaaaccggtaacttttggttctataaaacaaaaaacatgaattttcgatgctctagagccaattttgcctatttttttaaatggggaaagaaattaaaatgtgatcacaacacaagtttattagttaaagtattaatatctttaaggctttctcgtctgccgtgtcatcaccgatataaatcgggagcacgtcttcagagtggagtccaaggcggtcgagtaggtactcaaccgcatttccttgttccaggaattctttgaatgtatctcatgaaccttacaaaagtaaaagatagatgagtatacaagcaataaagtattttaagagttttttgtctcagaaaatattgttagtgtccttatactccctccatccacaaaagttacacctattacttttgtcaccaagaccaagaagaaattaaatcatcttggatgttacaaaatcaaggagtaaaagcaaacatacaaccaatgagtatttagattactccttgggttctaatcaaacatttaatttatctcttcatttaagtcttgaatgcataaagactacaaataggaacaacttatttggaaaaactcaaatgtgaaatatgtctaacttttgtggatggagagagtatttgtgtactaaggatcggttggcccactatataccaaatcctatacataatcaagcctcatatggaaggtgttccacataaggaaagataagcaaagtcctacttgacaccacaaggtctactcggatcagatccatacttgctccctaattctattttgacaaatggtatgtgagagcgtaaatacaagacccctaggaggaaaggagacaagcctaaacaaggtatacttgcttcctaattctattttgacaaagggtatttgagagcgtaaatacaagacccccaggaggagaggagacaagcctaaacgaggtctgtacgatccaactagcaccacaaaagacagcaaagagggatctatagccacctccaatctcgtcgagtttttgttcgaagaagcttacaactgctaaccgtcgaccacatattcaagctttacgctgctagagagactagattaagttctcctcgcaattatacctgtgagagattgattatataatagcaacaccggcttgtccatctatttactacaatctcgtgcatactttagtaccaacaaatctcatactctacaaatacggttgtcgggtcccgtcgacacgtaccatttgtcccttactcattctgagattttcggaattttgcacgacttcatagatagtggtctgaacgaggtactagagcttggaacaatgaagagtgaaattgttataggaactacaatttcaattcctctaagattgaaaaaaaagaaataatgacactcgagctctaactcaccttcttgtcaatgtttctttagtggatagaaataatgacactcgagctctaactcaccctatatagctttagtggcctttaccagagacgtaaaagcctgtaatgcaaaaggtagattcgaaatttcatatataacggttagaataagtagcacaatttgcaatttgcaaaaataaaaaaaaacatgagttataactcattaatagaagggagagaggcactcgtaggctgcaatggagtatgttcttccgtcgataggagtcaacaatgtaacattaaggatctttgaaaaataatgtattaagaaattttagcacataatcaaggtacaggatgctagaactatgaaatatttctcaaatacttactatttcactactacttgcgggctgcgtagttgctactcttttcaattccttcaaaacaagagtagtgagcttggtgtagtttgtcctaaaaacaaaatgtaggagcaatagaataatttagaatatacaatagtgttagcagtttgtaacatctattaggcattttttttccaaatatatgaataatacatgatatttgtgcagttaataggaaatggcagtcaggccaactaataatgttaggggcaactggcaggtagatatagacggggggcattggcccctagtcagttctacaccaagcgggggcaaatgccccttatcaatttttattttcttattctacctaagtaataaactcttcgttccacccattttacttcttacatccacccatgacagctacaaatctacaatcatcaatgttaaactctactaatcagagctcatgaacttagaaattaagatcaaatactaatatctaaacccgaagtcttgtaggtatctactatgaatatatcttgtccagtaggaaatcttgcggacagatcttctgctttgcttccaccatagtgatgagtgaattaacagccttgttaaattctttttaccaaattttgatagaggaaatatcgctatgcatagaaatcaagtgtatcatgttagtcttatcaaactgaatcgtcacgctgggaatctaaaagttgctagttataatagatgatggcttgcattctagatgcacatactatctgcacatcccctagagcatggctgatgcatttcttgcatgtattatagtgtcactgcgacactacccaattgcatacatatgctcttctgtgagcttagcaaatagattagcaaaggaggataggagcggatggggactccgggcacccttctccttccccttccccggcccgaggccggagagctcgccccgcgccgtcggccgcccatcactgcgcctggctcagcagtgcctcctccgttctccctccctgctctctctctctctctctctctctctctctctctcgtgcccttagcttttgagctagcacccgtagcactaccgaacgcgcgtgtacgctgccccgagcccctccgccgcccggcatggcctcgccgccattgccgtccgctcccggaggccgctgctcgtcgccggccctccttggtactccttcgtcccatccggcgccggaaacggattccttgaaccccggagatgctcccacccctttgaatcgaacccccgttgctccggtgaagtttcccccttttctcgccgctggcgtgcgccgccgcgatccgtcgtcgctggcctccctccagcgaatccgatccggtggctcactccctctcatccgtcccatcgttctggtgtactccctctctctcgaatcgtcgcgacgagctccggtgaactcggccgccgtctgccgtccatctcggcctccccttcttcctcctcccaccgacccacgtggctgccacgtaggcgccacgtcggcgccacctcggctttgaccgggccaagccggtcagccaccccctccctccgtcttccttcccatgtgcacggtccacggagagcctaacggctgcgcgtgggcctgccacccttcggtccacccggtgcaccagaccgtgcgccactcctacccgaaccctagcgcgcgccgcatgcaccgctcccacggtgagccgcgccactgacaagcgggccctactcgggaccctgcaaggtggactcggcccaccggccctccatcttcctcactctccccgtgccccttgggccgcctcttcgggccggccggcccattagttcgaccgagctgcgcctctcctctcgggccgcgcccaagccgcccgaggaagtctaaatcacatccctccttcaatttctttccaaaaagggtttaataaactattaaatcctttttcctttgattagaaaatcaatatctctctatccgtaactccgattgactccgttcaacttccagcaattccgtaaaattgagatctatctaatggcactattaattagtctaaataggatcttttgggtcttgtgtaggtttttaattgtttgcgtatagttgcggttaccggattttcgtcgatcgtggatttctcgaagattcgtgaagctcagtgaagaccttgagcaaggcaagtcaccctttgatcaattgctcctataattggaaaatcattattactttgtttgcaacttgcattattagaatcacacacttaatttgcttggcctcggtttgcgtgccaaaccgacggacctacccagtagtcgcactaactcctgtaggttgtactaccctgattccttgttgctccacccttgtggtacatcagtatccgtgctctctgagcgcgcataccaaatatcccacatacaccgttgattgtcgaaaacttgggaaatgggtttgtgaagccttgaaaacccgacatgtgatgtcggtgtgtttgaaaaataaaatgaattgtgaaaactcacgatgcgggagctgtggctacgtggcgctgtcccgtattcgcatataaggaccgattcctgtgggaaactcatcgagcataatcaaagtgcaaccacaaggtggaatgggacaccctggctaagttaactagtcggttcagggaaacctcacatgccaatagttgggaacgccggggcggggtcggttggagccaaaccgggttcctggtaaggcaagaatgagaagcttgctaacttaccgatcgagatggttggagtttgatttgtgaaaactaaaatggcctaaatttatgtgaggatttgatccttctatgtggcatgaggtatccctgggtcggtttgggaaaggctttgtcgcgaacctctgacaccggccagtgtctggagtaagttcgtgtattgtgggtaaagtgtacccctctgcagaggttaactaactgttcgaacagccgttcccacggtcatgggcggatgtgaggtggttcccgttgcgtagatttgattgcctgtgctttgcgaaaagttgttgtggaatgggaatcgtaaccagaatcagcctatgtggcagatggatgacctgagtggtcagaaacgaatctgtgtgattcgggatgtcagcgggcatcatagactaggcttcccaagtggaagcggattgctttgctgctgggcagctggactctgggagtccgcaaaaatgaaaaagactctgggaaccgcctaatcaagtgaaatagctctgggagccgataagtaatgatctgacccaggaggtcggtacattaccatttgagttgttgaaaagcatctcttaagtcgaatcaagacgcaagtcttcttttgacccaaacttaaaaagaaataaatcgcttagtgatttcaaaatgatttcaaataaaggatttgcaaaacaaccttgcctctcttccaagcttgcattaaacacctaaattcccgtgacttgctgagtacgaaagtactcgcccttgctctatataaatatatatagttcctccgccttgaagagaagatgaagcgaagtgaagattagggtttcgtcctggttcccagccatcgcctgtggtgttgggtgttagttcgttggttccgctgctgctgctgttggtgtttcctcgtccgtgtcgtcggttgcattctcgggctgttctgagctgcaacctaagttaaggtaaataagtcctctattttaaggattgcaatgattcatatttgtcaccgtgcgtaccagcgctaagtcctaggactggtactgagatcgtggtttcgtaggaagcggttcgcgccgttttcctacgacacgctcctgtcaggtgccgttgtacggtagtaccggattggggtgtgacaagaaatttccacaataacctaaaaaggtaaaatgaccatctaattattctgggtatgtagtctaaacaagtactgttatattatttagggtcttattgctacgagttctaataaagctaaaggtagcccaatgcatggacataaggactcggacatgaacttgaggtgggaaaaattaggaagtattttcttttgtgaatattcaaaaggcttgcatgtacacatgtcaaaatgtgtttgggacctggaattcgataggtggggtcgtggcctcatggggagctgtgttagtgattcagtgtaagattgcaaatagatgcggaggaatgtgcaagacaacagagttcacaaattatagcaccgataaaattttgagaatcggagatggctggagttgataaacaactcggcaaaatgatcaatacacataggtctatttaatctcctcaataatttgcatttgtcttaaaaaattaaaaactggtggatccacctacatatttgagagtcccgactccttttttttgcccttccctctttatctcaaaatttcgtcccccaagccggtgccaagtggcatccattactaactgtcttaccaacccttatagtcaaccgcctctctagctcctctgccttcttctctgaccgtcttgtgctagatatagatggccctcctcctgtggtaaggatgaaggcaaatagaaagcatgcgaatgttgatcttgcaagcggcacaactaggcaacagcggaaggacgtagccctaagcacaaccaatcaacattgatgccccttaagtgctttggtcaaaaaacaaatgaaaggagagatcaggaaaccgttatatcgatgtggccaccgtcctgaaacatccagatctctccctctcccccaagctccccccatctctctctccatatcaaggcggtgatgggccttgggaggagcccatcaacagcatccctttgtgagaagccattgaaatggcttctggaccgcaacaatgaatccttctctacctctccatatctccatcttaagactgtagtgggcctcggggaggagtttgccagctgtgcccctagggacaacgtcgtccctcgaatgctttggtacaaagtgaagagcagagatgaggagaggagaagaaaggaagggatagataggtgtaggaagatggtcataggcaagtaggcctaccattctttattattatttttgctgatctaacggccacttcatcatataaacaaaaatcacctcaatttgtgcaaggggtgaactaaatggttttgatagttgaagagggttcaatacccagttttaaagagtacgggtattatttgatgaaaacaaaataacgaaacacgaataacaggaaacccaatattttattagtcatagatgagtgtttacaaatagacggggttcccataggagtctgcattttgatttcgcgaggatagtttatatacatctgtatgacgtgcaatctgctgattcctggcacctagcaacgaggcgatcaattaattacatttgtaggaaaaagcctatcgaacaccttcgattaaactgtgctcatggtcatcgccttcaaaattaattgctcgtcgaaggttgaggttagtgtagatttaatggtgaatatagtgaatgtggaacgggtggttcgccaaaatctgaaaatagtacactatcatcacgctgatgtgtagaggaaattttgtgaagggagtgacttttgcctcgtcaatgccttgtcacgtactccagccttcatcaaatatggtctttgtggttgcttttgcctagttgtgccttgcaatggtgtatccatttcccatccattttggacgtgttaatagtatagtgacctagcctcgtcggtactcggccatggtttcatatagcatcgttagtgatcaacacaaggtacattttggtggttgcagttttgtcagcttttagctgagatatcgtcaggtcttgtcagtctcgcacatagtgtagatgatgattgaggccatttaatgtcatcgacactcgaccatgatgtcgatgtgtgttttgaatatgaacgccttacccttgtggctagcgttgctttttaaagaaacaatcttgttattttcaaggaagaattgctcccgtgtgtgaacatgaggcaaatatcacagtatagcttaatagacatgatcaatctaacaatagtgatcgactttgttttagtcgtcaaaagatcaaatagtacatctgcagtctgattgataggttcagacatgcttagtacctttgatcaagcaacttgctcaataacaccaaccaccggcactggaaacggatctcgtcgaaaccatcgccatcggtgtggatggttgtatttcgggatggtacacctcccgtgtgtgacacagactggtcatatttgtaatccttctaaagtcgaagggaatgcacctatgtataaattatggttggtccattgccaatgatacttaaactccacccaagtttatacaagtgattactcaaaacccgcaagatagattatacgatttaatgccaatgaggccagatgagccttgtatttgcccacacgtacacaccgttgatggtaattagctcaacgatgaacaatgatcatcttcttagtgaagactacttgatgagggtttcatcgtcgagattctattcctcaatctcttggtgaagatcagtagatgagaatttcattgccgggatcttgttccttgatcacttgttcttagggtgtgttcgctacggccagctcccaacgtgcacacagtacgtgcggaaaacggagcggtctattagcacgtgattaattaaatatttgctaatttttttaaaaaatggatcaatataatttttttaagcaactttcgtatataaacattttataaaaaacgcaccgtttagcagtttgaaaagcatgcgcgtgaaatacgagggagaggtgttgggaacaccagcatcaaacacagcctagtgaagtccggctgatgagaatttcatctcctgaatattgtttcttgatctctactatggccgtgtttagttcctctaaattctcaacttttcatccatcgtatcacatcgaaaactttcctacacacataaactaccaactttttctccaaactaccaactttctctcaacttcctaacttttccactatctaaatacagcctattaagaccggctgatcagaattttatcgccagaatcttattcctcaatatcactcttggtgaagactagccgataagaatttcatcatcggtttcctttatctctaagtgaagagttgccaatgagaatttcatcaccagatcttgttcctggatctattaatgaagacctaccgatgagaatttcatcgtcgggatcttgttcccacagcttgacttttctgttagccgggctgcacgcttgctcaacgctatggcatgtgtgttggctccctctacgtgccgatgccgggttacacaaatatatacgtgcaacactatggcgttgcttgtgctatcaatgatgaacagttgatgaagatgggctgtgtatatctattatggatgtagaggccagattttaatctattttcaaagaaaaaaaaagttgatgaaggccggtgaagatatcgttgctgccagtgacctaaaggatttggttttcatttaggctttgggttgagatacgctccggtgctctctacttgaagtattctactacaagtagaattaatctcaaccgttaattttataggataaattagtaatcttctaatatagtttaggggtaattttggcatgggatgttttcttcggttgttcgcatcaggtccgacgcatcgcatctcgccccgacgcaagcaccgcatctctccccgatgcaggttttcgctactcctcccggcaggcagcggcacgacgccgctgccagcggcttggtgtggcgaaatcctcaggtggccactcctcccactcctcacccgtgtatccgttccccttcctctcctctattccatgccggcatcccggttcgccgtcgtggccttccgtggaggagcacgccctcaccggcgccccctctgtcctctgtgagtggccgatgctagtctgcctatttgctcgctgtctcagtggtgaacatgtcttaaatttgcctgtataaatgcatatactagcttgtaaatggctgtgtataggaaaaagtacgaattacccccctccgaatcacaaaaccagatattcttcacccccaactatgcataccggacgaattacctcactcgacccaatccgcggtggttttggtctacgtggcgtacacgtgatagtccagtcaacattctatttataaaaaaattgtgagacccacctgtcatacactactctatcttctctctcactctctctctctctcttcctctctctctctcaccgtcccacgggtcagcggcggcggcggcgcgtgacgcggaggcagcggcggcgggggatgaggagctcggcgcggcttcccccctccctctcggtggcgtgcgcgcggggacgagcacccaacgaggcaaacatccattcctagatccactcgcccacgaccaccactcccccgtctcgctctcgctgttgccgtgctgagctctgaggtgagctgcttggtgggtggaggggtgggtttggtttggttggtcgctggttggcttggctgcgtaggtgcgcaatgcagtgagggaggtgggtaagggggggagggagagatcaggtcaagcgggattatagggtgcgcacagtcgcggatcgagaacgaggaggcggtggcgaaatgcaaggagcggaggcagtggatgaagtccgtcgtgcaggcacggaacgcgttcgcggcggtgcactcggcgtacgccatgtcgctgcgggacacgggcgccgcgctcttcgagttcgcgcatggggagggcgtgctgccgccgcccccgcccccaccgacgacgacggggccacgggggaggaggcgcgccccgtgggatcatactagtactgcagaaatctctaggcaatcaaccattcactctgtttttatttctggagttactatcaatctaaccatgttttcagatgttaacacaacgttattgttcagcaaatactcctcttcaccgagctggagctgtagacaggatctgaaatcttctgaattttatttagatattgaaatcttctgaatatttgtccctgtcatgtacagcacgagaagttgcagcaatggaggagacctcatcaggggcagcagatcgctctctgtatcagaaggcagcagcgatggttgcctcctacacggagacgtaccgcagcaagcccttgtccttctggctgctgctcgtcctcagcgcgtgagcatcccggcgtcgagcctcctgtcgcggctgtactacaacaacggcgggcagagcaagtggatcctgtcgtggtccgccgtcgccggctagccgctgaccgccactactggaaaactgatctttgctcggtcgcccaaagccacaatagtcccggttacaaaaaaacccggtttaaaaccccgcagcattatacgatctatagtcccggttcatccctgtcagtcccttgtcaaatgggcaaaccggaactaaagatcaccattttagtccgctgaagacctcttagatctttactcccaactaaaatcacgcatagtatataatctctattctctatcctctcccccacaccggcctcaatctcctcaacaaccggcctctcctctcctcagatccatctccctctcctcctccccctcctcctcccatgcccagcaagggccgcctcctccccctcctcccttcccgcacgccccttcctcctcccatgcccagcgagggccgcctcctccccctactcccttcccgcacgcgtcaggcggctggtggggccgcacgcagcaggcggccgtgcacgggccgagtagcgagcggcagcaggcggtgctaccggcatccattcttttttctttttttttttacaatttgtgattcactgagatgtataattttatgatttgttgtatggatctgagatgtataatatgtgatgtatttggtttgtgtgtaattttttaaagatttgtgatgtatttgatttgtgtgtacaagtaacttaagatttgtgatgtgaatgttttgggatgttagtttgatttggggagaagtagagagagaagagagagtagtgtatgacaggtgggtcccacaacttttttttataaatagaatgctgactgaactgccacgtgtacgccacgtagaccaaaatcatcaaggattgggtcgaaggggtaattcgtccggtatgcatggttgggagtaaagaatatccggtttatggttcggaggggtaattcggacgaccgtgatagttcggggatactagctcgtacctatattagagaatctatatttgcggatgttaaattgaactggagatctatcttaaaactgtttttttaggctgactgattgcggtggacgagagtcaatggctcgtttaggataatgataaattacgataatacccctacgcgaattattatctctggaacaagtatatccctctacgtttctactatcactaactcaggcggtaatagaactagatcttaaccatacgattaaatacgttaatggctcggattactttctatcacaaatagaaagcaccggagtagggctcgttttattaatatctgtagaatagaatatgtatgggtgtgtcataggtttaacaccgcacagggcgcttcatgcgtagcgcctggcggcggcatcgcgcatgtgcctcagtgcttctacgcgcatgtctcagcccctcgcgagcaggggtcctttgtataggcagagaatatggcaaaagtgtgtgttaatcctctattacattcaggtagtcacacgttataattcctttggataaagagaaaatctattatatacgtctgaaatatagctaacctcttatatacctttgaattttgcttccttcattacatacccacaaaatttgattttgattccttctatattccttccgttagttgatcattaattgaccatcccattgctataaaatgactattttaccctttggatgaacataaaaatttatgaattacattattgaaaatgcaatactttgtcgcatgaaactattatagttatgagtttgctatgtgatgacaaaatttagttttagataatgaaataaaaaaaatatgtttttattttattttttaaaaaatcataaaaatgaggagcattcatacaaagatagaactaccaatgctcataatattttttttatgaatgctttgaaaaaaatccattgtcctattataatttcaaataaaatttttaatttattttattttttattttcaaaatttatgtcaaaattttctatactagttatttagtctcattagtttcataaaatacacatactgtgtatttaaataaaattttcaatcgtttttcaagcttatattcaaacgtaaatcatcgagagcataaaaaacatttcaaccaaacataacagaaatgaaggaaaatgtaacggcaaaagtatagaagggatgaaatttctgagatatagaagggatcagctaaatttttcgatcgtcacctccaactttcgtccatcatccgcatcagacctttcgtcctacagcgcgtgcatcaaccatcgctagcgagtccgtgtcgatttggtccgtcgtcctgcctcatccgtttcggcgccatcctattttttttttttttgcctaaccatcatccgcgagacatgacagattagaatctgtgcgtgacatgaccaatcggacgtgatcggtcggacgtggccatgcggcgttaggctacccctttgaagttggaccccatggacgtctgtctgtcggaggatgctacgcgtcggacgttcgatattttgtaaatatcggacgcccgaccctacactgtcgtgcgcatacatatgcatatatacatgtgttctattatttctactctagttgattagctcgtgtaaaaagtctatatgcttgtgcatgcatgactgttgtttatactctagttgattagcacgtgtaagaagcctatatgcttgtgcatgcatgactgcatagttactatgcagtacttgtctcaacctactttttattttttttaaattaaatttccttttaaattaattatccgatttatgattcgatttcaccattaaactccttgcaattaaatctttacaacaagatctcagatggttatattttgatgagaaaaaaataaacattgtttcaccacttgtaaaaaaatgtttcaccacttggtcaaatgttccaactcagtctataaaatatttcagacaaatacaacattcaagaaatactaaatgcaacaccgataatgaatgtatgaaacattgagtccccatgagtgagacataaaaatcttggtcaaatgttccaatttagtctataaaaatgtttctgagaaatacaacatttagaaaatactaactgcaacaccaataatcactgtatgataaattatgataaattgagtctcaatgagttagacaaaaaaaaacttggtaaaatgttctaactcagtctataaagtgtttcagagaaatgcaacatttaagaaatactaattgtaacaccaataatcacggtatgaaacattgagtctcaatgagtgagacataaaaataaaaaaacaaatgacataaaaacccatatgaaagatataatatatttgcaaatatgaaatattattaaaatattttcatgtaattataaaacattaagttattacatctgaaacattataaaatacaaattggaacattgaaaaaacaatatgtgcaacatttacatatgtattagcgaaacagtactagttgacacatttaaaagaataaaaaatattttttcatcggaatatagccatgtgtgatcttgttgtaaagatttaattgcaacaagtttaatagtgtaatcggattgtaaattggagaagtaatttaagaaaaagattatttaaatataaaaatgtatacgtgcatcggtgcatgatttggtaaagtgctctacatagagcaagggagtagtaaagtgctttgcatggagacaaggcagcggatagaagcatgcatgtgatgagataatgttacgtccgatatttcattggagcgtcggacggccgatgcgaagcattttcactgtctgttcgatgtttcgtcatcgtaggccgtgtttagtttcttccatattctcaactttccatcacatcatatcacatcaaaaacttttctacacacgtaaacttttaacttttttttttcaaactctcaactttttttaaactttcaactttttttaggaattaaacacaccctaaggcttgtttagttggggaaaatttttgggttgagttgtcacattggatatgtggacacatatttgaagtattaaacggagtctaataacaaaacaaattacatattccgccaggaaacaacgagatgaatttattaagcataattaatccgttattagcaaatttttactgtagcataacattgtcaaatcatggcgcaattaagcttaaaaaattcgtctcgcaatttacacataatctgtgtaattagtttttttctatatttaatactctatgcatgtgtccaaacatttgatatgagagcgtaaaaatttttgttttgagaagtaaacagagccttagggcttatttggcacagctccagctccagctccagctccacccctcctggagttagagcttagccaaacagcttcagctccacccaaactgggagtggagttgggtggagctctctcacaaaatgtactagagttgtagagctgggttttggcagctccacaactccacttcagactcaactcctaaagttatatttaggagttggagctctaccaaacagtcctagtcctagtatcgaccgatcgccgccacagccccaccacctgccggctgccacggtcgtcccggcggctcccccgccgtcctacctcgctaactcgatctgtgcgctagctctgtacgtctctacctcccaacagtggttccttcggatcctcctagctagctggccagtccgggcgctctccccctcgatgatgccttcctgcagtctgccatgccctagcctctgcctcaccgcaagttctggcttgccgccgacgccgacgcagacgcagacgcagccaactgtgtgtggttgcgaattgcgatccgtcatcatcgtcttgactctagcacctgccggttggggcggggtaactcgatcggttccctcattccctgatctggtgtacggcatctcgattgtccttgtggccttaacacagtattaattctgtttataatgttatactgttagtattaatcttttctttacctattataatattataagaattataaagatgattttgtactcacccctcccttcatctgtcatctaacaatccatgcgggagtcctgatctgctcacgatttttttttttgcgtgcataatctgttttggatcaggctgtccatttccttgcttttcgtccatcgcgtgcaagagatcgtgccctgtgcgcatcagtcacccgttctagtgtgcgccggatcgtgctcgtgtgtctccttctcccgctctcgcgccagtcatcagcttgcatatagagtttggccaacctcgataatatctggcgcttgttcacataccaagatcttgtagccggcgcacggtgatcggacagaagcgtcaagcaacacgacgcggatgtggcatgtggccgtcgactggccgttgcgtaggctgtcaagaattttctgtgcaactccaacgaactcctcccggattcgggattcgttgtcttggccgctatttgcatcaccagcatctcgtagccaaaggtcttgatccctgttgttgacttcgcttgcatcacctaggtcactgccattgctcagtctcgatccatcttttctgtagcctgtagcaaaatatcgatctgatctgttgaggatgtgagtttgaagagataggtgcagcacattctgatgattccccccatatcaatattcttgttccaatttgtcttttcgatctaaagtctcaaatatagtgtttatctcaattttgatgaagttctgggcaaatattgttctcggtgtgtctgaattttgatgtaaaattatctgattttggtgaagttattgacaaatgttgttcagttacgtttagctaaatttttagatcaatctagctgtacaatttcaaattatgttcatatttaagcctcgagagataatgcaatgttcatggctacatctaatcggagttagacctgttgatgttcgtcattcatatctaaaatatgtgaaaattcaagttgggaaaaattcgtgtcaacgcacttttgtcaaaacactaccaaaaccataagttcttcatcagacaaatagggctaaatttacaaagccttgcatgtctttttaccactaagtcatcttaagaaaatgggagtaaacctgagcattagttcaaaaaccaagataaaatcataactgaacataaaaacagagttaaaaacagagttaagaacataattgcctattgtctttttaaccaagagtaaaaactaatgatgctacgttctgcattatgatatggtcaaccaaaatagccatctcccattgcaacgcacgtgcatatttacatattaagatatcaaaatttatgataattttatcatctctaagaagatatcggaatatatcatgttttctagtataatatttagtatctttagatactaggtatattaagatatcaaaatttctagtgtagaatcttgatacctccaagaatctactctgtactcttacaaaatactatagtggtggactggtggtgtactcgtgttgagtctgccctcgtaaccaccaactaacatgtaagcctgtgagattggtggatctcacataagcaatttaattgccagaaaatcgccttttcacataaatagaggcaaaatactttttttcttactaaataaataattgcaacgcactgatattttgctagttttcaaaggatcgtaaaatttttccacaaaattaagtttagagacagcttgttcgctacactattttttttttttggagatagttaccttgccctctagccactggcacttgtttgatggatgactagcaaatttcaaagtcgtgatctatagccgtcctctttccgtttgaatttggaaatgaagttacctcgcgatttcgtgaaatatggaggtgacattgaagagaaaatttgataggttgatatttatatgtgctccgttcatgagggggcagttgccgcgagagagatggcggcggcggtgctgaacgccctcgcgccggcggccccgtcgcgcagctcgccggcgcggacgcggcggggctggtgtcggcgatcctgcaggcggtgcgggcggcccggcggaaccggagggagtgccgcctcctggcgcggcgcgcgatgatggtgggcgacctgctgcggctgctgccgccggagtcggagacgatgcggcggccggaggtgaggcgggcgctggacgggctgggcggcgcgctccggcaggcgctggagctcgtggaatcgtgccaggagagcggcgccgtgcgcggcttgatgacggcggggaggcaggcggagcagttcagggaggtgcagggcgagatcaacgactacatgctactcttccccgtcgtcagccacatcgacatcacccgccgcctcgacatgatttacggcctgctgcttcctgcagactctcaaccccaccaggtgaggtgattgctcttcctaaatgacatttatcgaaaaaccggggttaaatttttagatatcgttgattcaattccacccctgattcctctatgatgtaaaattgttaatccctaggagttactgtaccattttacaatccttggtaatttctgaaatagaggaatgttagttgtgatgaaggaatcgtaggctcctagctttgccagcacaaccgtttgggggaattgactgacagagaaatgccaggggccttccgattaactccacaaggtggtggggcagtgggttaaatgtcctgggttcaaagcctcaccccttctaattatttgatattaggtcattccctattatttgcgtcttttttttttttggaattgactgaaaaggcatcagcgtgggatctgacagaaaagttcatatctagtggcttgcgaaatcctataggaggaagaggaggctactaagtcgagggccatcacaaagaagaccacattttggaggaggttaaccaaagagattgcctgtttgtctccaccacactgggagttcgccaaaattaagaaaacaattttgatgtccatggcatattagccaagcaacaatggcagcagtggtaccaaaaaaatatatttaagtgaactagtggcatgaaacagaatggcaaaattgcgttggcaaataaggaaaccacaaaccagttaatattcagaaccaaatcatgatttttttttctaaaattgtgcatgataaactattgtcctctgcttgattttcagtgattaacatcgtattgaactgtattccagatgccagaggatgcgccaggttcacctggcgaccattttgaagctgatgttaggttggtcagatgttaccaatgtattttgtaaatatgtgacacacgacagtgttcagatgcacatttgtgatatttttaaccatgcattgttgttcgaattgtattaatcatgcattatgtacagtacaatccattagaatcatgcttttccaaagtccacacagtaaaacaaacacattctcttgaactccaggataaacatcgttcatgtatttagctctgctagactacgaagtaacattcctttcttactctgattaagggtaaagagtttttttttctttctaaaatagtgaaaaggttttttcatactcatgtggccaaaaaaggaactctatcttttcatgtgtgtaactttcaggaatgtggagatcactgcagctgaggtaattccgtttgaaagcaatcaaactataacagagccttttgagttcggtgaacaccatgtagcaggtgtgtgctgacttctagtgcacatatttatttatttattttatttagatacatgaagtaatccaaacattaaacagtgtaaagtaaaaaaaattctaccagcagacttggtaggaattatgttggctaaaaaatgaagttctacaaaaaaaattcttatacatgaagtaatgcaaaaaaaaaaaaaaatggcaactgaattctgggggtccaaaaggagatttagtgtaggttttgacaatgtatcgaaccttttgttctgtttccattaatggaaattgggggatgccctcttgatccgtaaaggaaagtaatgcaaaaatttgtatgttcttataaataatgttttgggacattgtatctaggtcatcaggaaggtttggaagagctgctgtccaaagtgcagaggttgaaatggctttgctggtggtctcagcatgattctctaggttggtcacaaaagtcatctcagcatccaccatgatgcgcatccttgtgttgagtaccacatccgacatttaaaaaggattcaattattataactttatcctgttaaacataaataaactgttaaattctgctaaaagaaattttaatgcatgaaattaaccgaactccattccttttgacagagcgtccatcaacttatgacttattaaaggctgctacaaataatttctcatctaaaagtaaaattgcaagtgggggttgggctactgtttacaaggtagttcacaattttccatgcccttattatatgtgttatcgtataagcattttaggatgaagctgaaagcaatagtcatattttttctgattgtttaaaatatcttatcaatcatcagaacatttttttataataatcagaatatgaatattctttaattgtgttatatagttcttgtgtttattagtaaatgataatgagataaggaattgagtttatgctaaattatgactctttttaccttagtgccagatcatcgattgaatgactcgaacaaagccaatttgttggcatgcttatgtatataaagcactgcgatatattcaactagatgaaaccccgcgcgttggtgcgggagtttagtatgataatagtagaaataacgtgtaacatagctagacgttttaagcttatagaatttgtatttttttatcgatcattggaaaaaggctataaaccattaagttgatgtggtttatgataatttaaatggtatatagattgataatccaaaaaaaagtaaggtggtgtgacttcatgaaagaagaaaatgggggaaatgatttagacaatagattaatcatttaaaggctagaaacaataatatggtttaatgggagaatatagatactgtagaaattgatggggatatatatgttgaaatattatgtaaattatgtgggatgatgatttaacatgcttgaatttgaaagcttcaaaatataattaaatatagatgatataacatgtttgcatgaggtttaagatttaataattgctaatgaatgataatgtggtatctttgcatatcgagttttaggatgtaatgagttgtaactttatagatagtatagataagcttatagaaaacacataagatgccatggcccaaacctatgcatcttgtaaacagcattgaggtatacccttttaggtatataaagtgttggaaatgaatttgtccagcataatttaactgaaggtacaatatgcaaaacttttttttttttttgtatttgtagaacgggcaaggaatattgtagttatttaattattctaattttgtttgtacgttccctttatatgttgtaaccaactgcacacttatatgtctgttggtccttgatgtctctggtttgaaatatagccaagcaagatatatatgatatactaggagacaactcattttctatctggacaaataactctgtcatcaagaataagttttagaaaaccccaaatttcttgtcgaagtgcagaaaataccaagtattataactcgtcatatataacaccgggttttataaatgtttctgaaagccccattgcaaatccaattccaatcctacatattttactatcttggaaacaatagcccaaaacaacaaaagaattaaagacttcatcataattaagtaatgtacagttcaacacgcataaagattttgtgaaaatgtgataaaaatttaagtaaaaatatgtgatcaacatgtcacagggtgttatgagaccctaagacaagaaacctccggttatatatgtaccacaaccatcagacccagggttttctacaacttcaaccataaaaccttggttttctgcatttactcttatattcatgttaaaggagcatttgattttattagtttttttgtatgagtggttcaaggagaacaaaatttagggtctgttaggcacagcaccagctctagctccacctctcctggagctggagctcagccaaacagtttcagctccaccaaaaataggagcgaagctgggtggagctctctcacaaaatgaactagagaagtggggctgggtttagcagcttcacaagtgcactccagacccaactcctggagctaaatttaggagttagagctttaccaaacaggcccttaatacctagctgtggtttcaaagggcacaatggtcacttcctttggctttcctttttgatgttgcaatatagagaaaactaacattttatacactaacaagattaaggtgtaaaagtgaaggtagcctagtcagtgatcaagacccctttgctccacatgcttggatttttttaacgttaagtttggatgttgacgagattgattttgcataaacttgggctaatatgtatatgcataatccctcatatggttaggatattcaaacacttacaatatgcaaaagctttgctgcacagattgataatcaatctcatttagagaaaatatcttttgacttcactttccaggctcaaatgcgtaatagtcttgagattgcaatcaaagtatatcctatgggcacgggagaaaaacgtgtattttcccagtacgaaagggagcttaatttacttacgaagcttcagcatacgaatataattaaacttcttggacactgcactggagaatgggagctgattttgatatatgaatatatgcccaatgggagcttggacaaatttatacatggtattctttctcggatcttgtatacattgtttattattgaaccaatttccacgtattgtattgatcttgtatacattgtttattattgaacaaatttataaataattgccatgttgcaggcccaaatagagaagtatcgtttgactggttttcgtgcttcaaaataattcaagggatagcagagggtctgctctatctacacacgtatgaagctgagatatgcattgtgcatagggatttgaaaccgagcaacattctgcttgattcagatatgaatgctaagataggtgattttggtatagctaaaactataagcccggcacggcagcaagacacatatgtatcaggcacattgtgagaaattatgaaacgcgtggatgattagattttataattttacatccattaaattcttctgactggtaatgtgtactgattctatctcttgaattgcagtgggtatattgctcctgaatatcttcgtggaggtattttatcaacaaaggttgatgtatatgcctatggtgtcattcttctagagattattactggcaggaggtcctgtattccctgtctaaaagatgatgagtatgtgcatttaactgagtatgtaagtaaattataatctaaacgctattcaatctctaaattttgggccaacatccaaacaaattaaagaaaactgcataatattttgtacaccctccatttcaaattacttcttgttgtagatttgtccaagtcaaacattttaatttttaaccctgaagtacctccacgtagaacgacaactaattagaacggagggagtacatatttataggacattttctgaaagacgattcttttcgcaggcctgggatctatggagaaccggaagatcagctgagcttctagatgcagcattgcgcaatgaggctcgaattgctgagataacaagctgcattcagatagcgttgttgtgtgttcagaaggatccggctgaccggccttccatgttggatgtgcttgcgatgctaagagatgagaagattgtagctgcccctaagaaaccaggtgatcttctccttggagacgaaacgagcgtagagtcaggtgatcttctccttggagaggaaacgagtggagagactgcacattggttcgcaagcagcggcgctacttgcagttctactgagttcacggtgccccggtgagaagagattttgtcatatttgaagctggtggctacttaaggtgcaagtacgttatgtataaagctattacctttgattattcacagcgttgcaagcaaaataagcatggtgaatgtgtatttcagattctgagtaattatggatttaccatatgtgatggaaataaattaaacatacagaaggtggaatgtatagtatatcataaatattttagacaaaattggctacaagcaatataattctgtggcatttgcttatgggcgaaagtaaaaaaccaaacatttactgaaacactagcaattttgttgcattttgctatagaacactgacagttaaaatagtagccctgtacgtggaagataggcagagacggaagaatcagatgatagagtttgtgtcgaatacgtgtatatggtaggttatagtttaggacttggagttgtattagatatagaaatatagtaagagtcagattctattctagaattgatcttaaataaagaggtagacttgttggaaccacatgatgacttagcatagcgatatgtaatggctgctggcggtgtccggccaagggtcgttgtaactttgatatactgtattatgctaaattgggaagtagtgtccgtaattagtgcccctaggatgtagacttcggttgaacctcgttaataaatatcgtggcccggcccggtatcattatcgtgtttggatctcatatgatatttttcttccacgtagtatacaaactctatttgcgtatgtatacaaagtttgtatacgacgtatacaaagttgaatacatatgtataaaacccctgaaaaaatatgcacatatacaaagtttgtctacacatatacaaaattgtatatacagttttactttgtataggtgtatacaaagtttatatgcagagaaaaaacaaaaaaaaccataagaaactgaaataaccggagaagaaatggaaagaaaaaaccagaaaaaaaacgtgccacgcagttctgccaggcccttctcttcacgcgcaccacatgcattagggattttgccacctataggaggtatggaaccccgacccgatcttggtggagtagtttgtttttactttgtttatttacggcggtttcgttccccctccatccgaattattgaccatgttccatggattgtatgacatcgaatatatgtttcatctaaacccaatctccattgcttttatgagtgtttttgctcatctgtacaagggctgttttggcgttgttacacacacattcaaattgttgttttgaaacgtacatcttctaaattgttgccataatttacacccagcttgcaagttcgtacgccatgagtcaatatcatagttccgaaaatattcataatatacatggagttgtcccaaatacacaacaagacatgttttacttggcgtttcaagcacacaatactttattataggtttaccatttgttggtcgaggcttgcttacccaactcttcataatagtggtacagctagctgcagatgatcagtatatatactgatgaaatgattttccccttgtcaggtcgaatgattacctggctctagcttgtgcttccttgaagcgttcttgtgcttctttcacaagagaagagagagatctagcaggcttgattgcctcatgatcattaccagcaaagaacatgcatttatcaagttctaacaagttctctgaagccttggtcagtacatgatttcgatcatgttcattgaagtccttggcgcagctcggtttgtgctgaattgctagtatagccacctgacaggaaagcttcattattctcagacagtcagctgtggcatcgttatttacatctattatctctatcagcttcttcaacagttctctgtccacatgagcaacattagagaagtcatctgcatcaatcagtttctcgcatatcaccattgtaaaggatagcaaggccgcaagcaatttcttttcctgagatagtatatcatcttgctccgtaggggacttgtcctgaacggcatcttttggcggttggctctcttcatctctggctattgcagaatagtcgcttctctcgcctctgtcgcagcacctgcatagatgcttgaatctgaacctgccactgcatttctttccgtattactggacaatattaggcccagagcctgtatatagcagcacaaaataaaagttatctcaaaggaataagaatatacacaatactccctccatttcatattatacatcgtttgatttttttcctagtcaaactttgttaagtttatatttttctataaacttggtcaaacttaaaagaaatttgactaggaaaaaaatcaaaacgatttataattgagagaaacgattttacaatcgtgccatgtatgtatatgctgattcagtgaaatgaaatacctaccgcaaactactatgattcagtgatcacacatcacttaatttaggcatcaaattagcactagcaggaaatataacactatttacggtttagagtttagaccaagaggaggaaatagcagagatttaccgttgtcaaaagattgatggcatcctgcttcgatagttggcagctcttcaggaagcgagaacataggtgctccaatattgctgctgcgctaatctggcactgcttgtccttgacaagcatttcagtgagttgatcaaccacggtgccgtatctccttatatccaaaacatccttggagtcgccttcacacaagatttccatgatggtccctgctatccgtcgccgttacttggagttgagagagattttacaagcagttcacctgcttttctcctcaatgttatccttgttgccgaagaagatgtcccgaagcagactaacaaactcttccttggtcatgagcccagtataaggccccaatgcaacctgtgcaaggatctgtagtgccggttcctgcagtcgaagccagcgatcgttgtttcgcttgataatacgtagcaagttgcttaccatgtcctggctagttgaggtttcctggagcagccttgtgctggcttctccaggagaactgataagcctggccaggactctgagcgatgtgcttaatatgtcaaaccatacatcatcgtcttcgcaaacggcgtcaaggaaagcacgtgaagtgatcggagctgtgatcttggacagcaggccttgggtgtcgcatatctctctgcagttgtgatcgtcgccagcgagcctctcgatgattagcaggattagttctttagctcctctgggcttgaaggaacttgcactcttcctccttttgacgtcctcacggagcctctctcttctagcttccatcaattgtttggaactgctgactcatccggttcttgtcctcttcttatttgcgtccatgttgcctacttggcgatgacaaactgactcgttggtcagcagtagtgtcagtatgactcctctctgatgacgtactgttgaaaagcttgcatcggcgaaccacatgtgtcatgcttttggtggtgtccagcacaatcaagaaggcaagacacggattgcagtgctcctgggaaccgagctatgtgtaggtcgccggcgatgcccgccataatccttgcagcacgctcccttatctctctttcatccagggtccaacttgtcgggcgcgagagcatcgtgagcagattttggatggaatgcctggaggatagcatgtggcgccgtacagatctcgtcttcttgacgacgaacgtgtcgagcatccgtactccggtgagatggtcatcatgatatccagactcgagcaggatatttgcacatttcgatgtggtttcttgaaggtatcccgtgggctgaaaaccccactaccgttcgaacccgcattccgtgtcacaagtctgcgcaacaggaaccagctatagaagcccacaccgtgaatcagagcaagagagtagaaggcaaacaatgctgccttgagttttcctttgccggcatcatcggagctgtagtaatccagctgtatgaggcgcatcactgat

SEQ ID NO: 4798 - DNA, 31066 bp, Oryza sativa
aaagaaaaaaaaatatgtttaattttcaaattaaaaaatggttcattataagatttcagaatcactaaatatcttttgaagaaagaggtgcaaaaacttctgattttttagccatcggattcatggtaagcgcttgatataatttctaaaatcgaacacggacttgcgtggagacgaatcattttcacggctcatgtgtggacgatagatagtgcggactctaatatgtcatgttttgtagatgatgaaaagaaaaaaataattatgtttaattttcaaattaaaatctggttcattataagatttatcactatctgttgaagaaagaggtgcaaatagatggcgcggactctaatatgtcgtcgtgttttgcagatgatgaaaagaaaaatataattatgtttaattttcaaatttaaaagtgggagggaaaagtagacttattctgagtaggatttgagctgtgggaggcaaagtagacttattccgagcaatgatttgagatatgggaggcatcgtagacttattccgagcaatacagcctaggaaaggtgaagtaatgagatgtgggaggcacagtagacttattcggagcaatatagccgtgtataaaaaggagagatgatgggaatcgaaccctggtgggcaaattgaaaattttctctccaccaaccaggcgggcaagctacttgtgattgatggatacatgactgatacatatcatatattaagcaaggttttggagtagattggaaaatttccgaccgactattaagcggattaaaacgtattttggcaggaaaccgccgacggacgaaaaaaacctcacggaagccttacgaatttttttattaggtatagataaagaaagagatagaaaagtagcggtgcagtacggattccaagatgtaatttatgtatgataggtgggaccagatattaatagtatactatgaattgactattacataagagtatagagcactttaaatagtatattacataaaagtatataggctctgttcgggagtgagggtcactctccgacacgcaaaacgaagcagtggtttagcgcgtgattaattaagttttagctattttttttaaaatggattaatatgattttttaagcaactttcgtatagaaacttttaaaaaaacacactgtttagcagtttgaaaagcgtgcgcgtgaaaaacgagaaagaggagttgggaacttgtactgccgaacggagccatagagcactcttatttgaacagtgaacgtttgtgtcacttattattgttaatgttttagtactgatctttttacttcggactgaataattttacaatttttataattaagggttattttggtttgatgtcaaaatatgccttacaaaattgatagcactttcaatagtattttggctaacaaaacatgccaatcatcacacacaacttaccaaaaaattaacaatatcaaaatttgcctaggtattgacagtaccaatattttagcatggtaactaaaattctaaaatttttcagattttgacaattcaagataggtgttagagtatatggcagctagacttatattaggataggattgatttatttggattcattccatatctgtaatcatttcttatctcttctcctttgtacttctatatatatcggcccctaaggctcgatacaatgtatccacgctacgcagtatatctctctccctcctatactatccaatatgttatcagagctaaaggtctcaagttcgaattctggctggcgtgcaattaaataaaaaattgcagcccacttctatcccacgttggaggcttgaaagggcctcgcatgtcatgcccagaaattcccgaatagaattccaagcagaatgtgcattaaaatccccgtccaggaccggccggggtatacaaatgacaatgttgacattcagattcacgtcttacaaacatcataaaagtcttacataaatgcagcggaaaaacgaaagacaacaggagctaagccttgactagaactgcagcgggaacaccactccacaggcatcctcgacggcacggacgaagcctactcctcggagaaacctccatctgacacatactcgtactctggggttggggaaaaaatagagcaagactgagtactacccactgtactcagcaagtcataccggaataggggtatgatgcaggaaattatcaaaggagagctagagtggttcatttgcataaagcaagcatttataaacagaagttgaaagaattaaacagttgcaataattaattaatattgatcatccgctgtccaacgctatcccacgttgcaacaggcccaaccatccacctatactatccaatttcattagactaaactagggtaagactaatcacggtgaatctggttgaccgcccataaccgcgggcacggctattcgaatagttttactctgatcagaggtgtacaactatacccacaagacacagccccataacacgtttccgtgcgccgacatgccaccacgacataccggaaagaggccgtgacaggacccttcgcataaccccctctaaccaagcacaccacacctcaggtttcacccccactccttgcaaagcagcgggcagtcccctctcgtgcctaggtgaatccagaagcgacagaggccgtcgcagggcccgccccgctccatcacgcccacccttgcctggatgcgtcagctagaggaaagctacactacaagcccagccgttgcccatgctggcttgtggtaagtatgataagttcttccagggcatcccgcgaaccggtccttaactgccatgggtgcgactagcagaaccatgcacccacagcccaccatgtgattcattttaattgaccaacaccaaaacggtggtactaaaccaaccttaccaattgaacctaaagtctatattttagtgagctttccccattgtgtgctagtggaactaagcatggctaagcaattcctagtccaaaatctattcatgttataacccaagctaacaaaggagcatggtatcaaaaatggcatggctgtaacaataggtaaacaccccatagtaacattataaaacaatgcaatatttgaagaaaaacaatagagcatttgcaatataggatcaacatgttcaagtgacaagcatgacttgccttgctctgctgctggagaaacctcggcgactatctcgaagtacaccggagcgtcggaagaaccggaatctagcgacatacaaggcaaacattgcaaacaggctataagactactgaaacagagaacaaaaccatttttaatggattctacacatttttcttgatttactgagacttgaatgggcttaaacggagcacagatgaattagttatgaattttagaagattcactgtgtttattactataaaaaaagtccttaaatcatttattgcgcaataattcccagggctgacgtcatcaagggggggcgcggcgccgacatgcggggcccaccggtcagcggctcgggagagagggaaaaggtgcgccggcaagcgggccctactcggcagcggctcaagggagggtggtccaccgtggaccgggaccacgtgggtggtccactgccggtccacgggaccgacggcccagatcgcccccggggttgatcggacgggcggcggcgacccggctcggctcggctcaaggccggccgaccggccacggcgatggcgatggcgcgcgcgcgcgaacgcgttgccggcgacggcgcaaaggcgacgcgaaggcggcggcgctaagcggcggctaggaaggagagggaggggaatagaggggagaggaagcctcaccgagggtggccggcgcggaggaagacgacggcgaacggcgacggcaagccacgggaggacgacggcaaccggcggacgggcttcggggtgccctaaggaaggaggagagagagattagagagagggagatgaaccacggcggccggcatccacggccgaaggcggcggtagaggtagaactcaccggagcgcgaggggatgcgaattccggcgatgaatcccgacggaggaagggcggacggggtggagttcgtccttgcgaacccgacggcggcgacggcgcggtgcggcggcgagcctagcggcggctagcggcggccggagcggcgggaaaggcggtggcgggtgggtgcacggcgtgggagcgatggggagcacgagggagttcggcgaaatggggaaaaagagagagggggcgacggcggagcttaaataggagaggggagtctcgaacgtggccggtaggggcgagattccgccggccaacgtgggggagtgggagaggagagagagaggcaggattcgaaaatcgaatcccggccatctcgggcgcgggcgcgggcgggagagagaggggagtgggcgcgggaggtgcggcgcatgcgcgggcgtgaccgacgtggcccggaggaggcggaggcgtgggcgcggcggcggttgcgggcgcggcggcgcgggcgcgaggtaggagatgggcccgacaggtggggcccacctgtcggcgtcccgggtaggaggagggaggcggccggcctagctgggccttggccttcggccggcccagcggaggggagaggaggaaggagaatgggccggcggcccactcgaaaagaaaagggggaaaaagaaaaagaaaaaggaagaaaaggattttccctggaattaaaatattgtttgctcaattttaattggttaaaattatttctagggctctgaaaattccactaaaaatcctgttagtgactaaaaattatttctagggctctgaaaattccactaaaaattccacatgccagattcgattattatttgtattactttcttagggttttctcttgatttgcaccggcattttcttagggtcatttataaattaaattttaggcttgggaggagaactacagggtgtgacatcgcatgagggagtgttggaatataaagtgaattgtccaccttttctcatcagcttaagcttttgggttgaacaatatggtatcaaagtgtatctctactacttaaaaagtgaaaacatttctgtcgtccgtaataacgatgaaaaaattaaaacaaaaaaaaaggaaagtccgattcaatttgctttcatcgtccatgaaaatttttgtccataaatccgattgaaatccaatcggacaatccaaacaaagaaataaagagaaaaggaaaaggcatccacatgcatcaccaatgttggtcagatgactgggtcagaaaaatggcaaccagcggtggactcggggggtcggcgacgatagccgccggaggctcaacaaggggaggaacatggctagactaggctcgaagaagccatggccagggcatggaataccgttgtagcacttccccttacaatgtgtgtataatcaactatcaagattcgatccaaggacaacaacttagtataaattggctagagaggattcctatatcttttaattaattaattaagttaaaggtacaactctattgaatgcttcgggcaccgtccctcccctggtctgccaggattagtttggccttgagctttatgatgtacccgatggtggaggaatatgaaggacggacaaggctatcaccacatgccgcttacctcattttccgttgagcacacaacagacgaaggtaatttttaacctagacaccacgcctaagttattaattactactctaaccttgcgcaggaacttctttctttatccagagttctagtaatagagcacttaattgcacactaagcaatgaacccgcaccgatgagaatatatctcaattaaataaattaattaaagaacataaagaaacttgaacacttacttgaataaagaaagtatccgccgagatataagcgagagaagaaggccgacaatcctggttttctccggaactccgttccaagaatactgacactccaacactcctccataaaattctcgaaggaactccgatatttcgaggcactccttccggagcttcccctcactctataccaaagtaacatactaaatatgaaactacaagtgagttgtgaaagtgcatctaggcccctaatgattttggtgattaattacaatgcgattagagaggactaatatttttatttaagcaaatgtgaaggttgttatgtcctcaataatgagttagcgtaatgcatatcccgcggaatacgttgatgtgatgtgatgcggcaaatgagcaaatggtattttgtacgttttcgtttccttgagttaataggaaggccgcactattaagagggatgatgcattgacatacgaggagtgatcaaagtgctcaaaatctatttttaaaaggtgtttctcctcagtttggtgtgttctggattttttcggagttttccgaaactcattttcggactttccgaaaacacacagaaccagattgtcgcttctggaaattttcggatatgtccgaaagtgattttcagactttccgaaaaagactgcgaaggcaaaagtggttctgtatattttcggacttgtccgaaactgattttcggattttccgaaaatcatcagtagagtcaatttcgcttctgtatattttcggacttgtccgaaagttattttcggacttttctgagaacatccagaacgatgttgttggtactagaaattttcggacttgtccgaaaagttttcggaatgtctgaaaaatccttcgttgactttgctgttggtgctgagctggaattttcggacatgtccgaaaatctcaattattgtgcataacgggcagaatctgggctgtggctataaatagccccctcccctcacttgtgagggctgctggttccattccaatcatttgtgcccttggcttgctctctctctagcacttttgtgccttgctttcttgtttcccctctcacccgtgttcgatttggatttggtgtgtgtgtgagagttgtggatttgagtttgtgtgagtgcttgttgttgacttcatgaagatttgtgagcacttgcatcatctccgggagttctttgcttcatttgttactcttggaggttgagaactcctaggcggctaggtgtcgctcccgagccaccgatctacttgtggttggccgggagaagtttgtgaaggtcagatctcacctctgaatgggaagagatacctttagtggaaggaggagtacatttgtgcaacctcacaaggatagggttggaaaagacctggctcattatgagctcctcaacggagagtagaatcccctcaagtatttgaacttcgggagcatatcgtcttacaagaatcctggtgatatatctcgcgcactcatctatcttagctaattgatgatgctgctagtagtttacttgttgtttgtgcaatcatttccttacttgtaccactacacttttttgcttgctttactagcttgctcgtaaatctgagattttcagaatatccaaaaataatatggaaatatccgaaaatagtttggaatatccaaaaagtctagcttcctcatttacgtaaaagctttaaacgcctattcaccactcttaggtgacatcaaggttctttcaacctacaatgctatatcgatattacatatggttatggactttgggtgatcatttctccatgaatcatcgttgagatctaagtatttgtagcacataacgagcatgatcaattccaaactttcccaactagtgaattgccataaaagaactaactagaggctagattgttacgaacaacaattcatggctccagcaatgactaccaaatgagaataaaaagttaatatggttcactaaaagaacatatggccatatacaacacatatactaaatgtaatatccataggcggaacaattatcccttacaacttgatatggattagagttagaggtctatgataaccatgtatcaaaatgacaaaagaggttgtaaacaactatcatgatgatagttttcacccatctcatatcctttaaaatttgaagcatgctactaaatattccaactatgttggaagtgctagttctgggctatgactctgattgcttatctatccatacccctttgggacatattgcgattgtgtagattacgggttatagaaaactttgtgtagttgtttaaaaaatatgttggttggcaaatcttggttgtttggctaccccggtttttggtaatgccatttatctaagctaagtgtgtaaagactagaaaacccctcaaaatcttcaatttcctatgtcagcacacatcctaccaatggatatatacattccttcccttgcccaaccttaacaaataaagggtgagctagtctagtaggtcttcattgagtattaccatcattggagagagagaccatatcaaagggcaggcacaaccatggggttcaaacggtgagtagtcagaccgatcaatccctacgatcccttgttatcctcttcttgttttactctttgttcgtcttagttgtgaaattgagtgaagaattgctgatttagtgtttgaaaatcttttgggttttaatttgcatgatgtaaatccttcttcttagaatggtcatcttgttctctagtctccaccatggtcaccattactttctagccttcatttgctctacgactatctcttgtacgcctttgttgtttgagatacattttgaatttgaggggaatgggagcacattatggtgaagttgaggtttgggaggaaagcggatggcatgagggggaggatggaggagatgaggttggggaggaatggaggcggcgtgaggggaggcggcgcggtgtgggatgggggagtaggctgactgtgagagacaaattagggcagaggagagttggtagtagttggactttatgggctaaaggctattgggttggaatagtgtgggctggctagtaccttttcactctttcacgtgtcatatggttataatataaaatttacattacaaattgttattaattgggtatcaatccaagtcgtcgactagatttgttgaggttcatgtcccaggtctagtggcgaatctagtttttgggcttggtttgggctcctgctccacctgtgttaagggcagaccaagcctcaagacacacatgccattgcccgaagcctaggaaacaaagcccattaggtccagcaaactttcaccatataatgggtgagttcggaagcgctgtagctacaggactcaggaagcaagattatgctaggagagctgcagcgctgtggctgtgcagccacagcccagctgaaccgaacagacccaatggtggtcttggcccaaacatgccatgtgccggcccagatctccgcaaaacctaggtccgtccctacctgtaaccatctcgtccctcccaaatcaaagagagaagaaataatcgctggtaggattgaactgagaaaatcataactaaatatgcatggtgttgtgttggcactataccttttaaatttctttcaaatgcatgttatgtaggatttattttgtactaaatatattgaccggtaggttccacatccattaacatcattcttcaactcagcttcccggtgacctttgttcttagtaaaaggctctagttatttttcctgtttttttctttatcaatttgtattctcgagtattaatggtactatatttgatttatcttcttatcattgaaggtccattaagccacaaacttccatgcgtacatcggtgaaggtgcataagttgacgacagaagatgcaatgaattacattcttaccatcaagaataaatttttgcgtcaccctgagaagttccatgcattcatacacaccatgattgatttctccaggggcaggtgagtaataggcattaacatagggtggttgcttacaaaatcatgactggatagattggagcaagaaattctcatgtgttactagttgtatgtggataacaagttttattgaaactttggttatgcaggattaacactcatactgttattgaacgtgtgaagatcctttttgatgggtatcctgatctactccttgcattcaacaagttcttgccaagaggcataaatgcaatatgatgaagaattttgtctaaatatgtttcctcgtttaaggctcaagctcactagctataataaatctttgataactttatgagttggtttactcatctattttaattgaataatttagcaatgctacatttgttcttatcgtacttgtctaagtacctaagtgccgactatattttggagtgctgttattcttattttatctatgccatctatttggtggagatagagattctaagtagctagtgagtatccatttggtgaaaaatctagagaagctaaggcatcatttgatgagattctctaattggctacttcctcggttatcgtgaacacactaactaaactactacgatgatttttttccaaacattttctgtatagaagtttattttaaaaaaataaaacaatttgtcatgtttacaatagttggtacttaattaatcatgttctagttatctatcgtgttttccatgccgtagagtagctcagatagacaacctatttgagtgctgcctatgttatccagcctctgctactattttattttctcgattctataaacactaagtctgaactatttagggagctcgagatttcgggagtagctatagctacaggaagctcccaaacttgtccttgctctcttactaatatttgtctcacgttgcatttaacgctcgcatggtttgtttgttcaatgtaggagctatcaccattgatcatgtttgtaccacactagtcgtacttaattacttgatttttttctctcctaactgtttttttgactttctaatggtcttgaatcgattcttgttgctttggcaccctaatgtgttgtccatagcaatactactattccggatgaactatgttgtaatgaaatagaaccatggaaaattggcagaccatgttgttctgttaaatgctgtagacagattgccatcacttgaccaatgttgcatcgaaagtgttgaagatgctaggttgtgtaaaaaatagtacatatattttaactatttgccactcttacaagtggcaattaaggattcgccattagactgacatcatagatacatgaggtgtgcaaatgtgatgacatgagcttttttttttttgctgctaccattgcaccttatctaataaggtaaatttgaaatatgatggtgtttcgaagtaaaaaaggaaaagctaaagattctcaatcaacactctcattgggctgcaataatcgagtgtcaaagcaaatataccaaacaaagaacaatagcgtgtttctaaactatatatatggaatttggtgcttgttttgatcgatttgcatctatgacatagtccccatggttcacgcactattacctgctctccatggtcttcaactatcttccagatctccacttaccccaattatcttgtcgaagcataatgcttcaaaactgcaaaaggttcaaacatttgttatcacttaagcaggagcagaacaggtcaacaacaattatcaaataagataataactaactaaactagactttaaaaaataaaatatactaaaaactacaatgatttgtcctactaggtcctcatcctatcccaccaagttctacaaacctaagagtccacatgaaacgatacaacatactacattaatactactaacaacactacaattatggctgtcaaaaaagctcgaggcttgtgcgctactcgagcttggctcgtttcggactggattcgagctcaaatcgagctcttaatgagccgagcccaagcccatgcgcaagttcacgagctttgtcggcccgagctcaagcttcttatgagcctagatgtatgtgtaatttttatcttttatatgacaaactagtatgctaaggataacttagtatacattcatttgaaaatttagtatgtgatggtatcatatattaatcttaaattctcgtaaacttcttttttcatattattaatttagaattattgtttttataaaatattatcatcaaaatatggaacatattttaggtttacttaatttcattcatcttacacctcacagccgattcggtcagatcgcatcggctaggttcacacgatatgtcatcgacttactggctgatcggctatcgtattctaatttgattgattttcttgtttattcttgttggtgatcggatcaaactaactggcacgccctaaacctaaaagcgttttggacctgtactggaactaagccgaactcccaggccgccgcgtttctcgtcatcagactcctaatgggctttgaaggcccaattaaacgtcttacatattcaggagcaaggggcatgggaccgtctgacacaacatgtgagaaacctagtcgttaccaagatgaagagcatcaaggacacgagatctccttgctgaagcccatgccggtgagaaattgacacgttgtgagtacatttaagagtacctgagtagaaaacctagccaacaacctacttaaaacatcccgctaaacttggctaaatcctatgcaagacttcaagtaaaaatggccgaaaagcagagtgaaaggctttacacgtgtaaaatttgagagcaattcttggctccttttgagattgcaagaactttgccgtttgttgcacaagcatgacgttatcttggataaatcaaccttttataaaagtactttggttaggagataccaaatgttgtagatggctagcagcaaagggcgatgatcctaatcctctgttgcagcaatatgtaggacatgattaggaaaatgtgactcccattctactgagcaaaagatcattctatccaatttgacaagagtaagagagtccctattatttgaccaagtataatttctaacatgcaaggggatttccttgactacctaaacgtccctatcatggccctgttgagattatcattgttggcaacttttttgacaagttgacaagcacgatcgcagcaccttaagccttgcggtgatcctagagtcgccaaccacctcgatctagcaaagagctaaacctagatgggttttgataacaaaatcggctagcggagccgatttctagataactacccatctcgtgggcaaaacgaaaggttttcaggacaaacctacaaagagatgtcgcactctcgcagcgtcggcagacggtttacggcgcaaaccgacaaagatggacaaactaagagaaaactaaaagcaatacgaaaaaacgattcgattgattgattgtagattggttttttacaatgaaccggtcatgtcccttatataggggttggtcttgccctctacaggccctcctccacgtccaacttgaggtagaaaccaaacgaaacccgaaacatgccttcccgagcaaggaaacctcgagacccgacaaaacacaatcggactcggacctgccggtcagactggccacacaccgccggtctgaccggccctcaaccggcggtctgaccgcccaacacacggcggtcagaccggcccactcggaggaaaccggtagacttccaaattttggcaatctttcctattttaatcctaggtgccaaatttgggtttaaacacatgcccccctgcctttttgatgaacaacgtgaatctaaaagcatagaacatgttttggtcttaggacgataatccaattaccggccatagtacctcctaagcgtcttgccaaacgctcgggaagtatttcttcaaatatttcccgttgattgctcgctgaaaatgctccccttgaagtgtctccaaaaaatatgcgttccctcgaacaatgccgcacactcgataaggaccctcccaactaggagaccacttaccgaactccttggaccgagtacccaaaggcaaaattgtcttccaaaccaagtctccaacttgaaacaactttgctttcaccctcttgttgtacgccttggccaccctcttcttctctttctctatctcttccaatgccttcaagcgcttgtcgatgacttcatcaagattatctcccatcaacgtcttgtaatcttcacttgacaaatcattttgcttgatataacgaagagaaccaagatttacctccaccggtaaaatggcttcttgaccataaaccaactcaaaaggagtgactttagtagcaccatgtttagatatcctatgcgcccacaatgcttcagaaagcacctcatgccacctctttgggtgttcctcaatcttctttttcactaacttcaacaatgtcttattactcgactcggcttgtccattagcctgagcgtagtaagtagaagaactcaacaatttaataccataagattcggtaaaactcttcacttccttagacataaaagaagcaccttggtccgtagttattgtttgcggaataccgaatctatgaataatatacttcaaaataaagtcaattacctccgtatgagtcatattcttcaaaggcacggcttcggcccacttggtgaagtggcttcggctcacttggtgaagtaatccgtagcaactagcacgaacctatgcccctttgatgacgaaggataaatttgaccaatgaaatccaaagctcatcatcggaatggccatggtttgattatggggttcaacacggcggcaggcgccaattgaacattgccgaaccgttgacaagcttcacatcctctataatatttgaagcaatcatcaatcatcttcggccaatagaactccgctctcctaagcaatcaattcatcttgtgggccgattgatgagttccacaaattccttcatgtacctctcccatagccactttagattgatcttcatctaagcacttcaacaagacaccatctatatttcggcggtataaatcctcatcaagcaatgtgtatttgaacgcttgccgcagaattttccgatcaaccttaagtgtgggatttttcaaatatcgaatcaaaagaattctccaatctccttctgcttcctgggcacaaatgtccgaattcacagttaattcggccactatattgattgaaacgtgccccccagcgctctgcccagaaccggtcagactggccacacagggccgttcagaccgctcagagtcgccggtcagaccggcggcatgcggccggtcagactgcccctggtcaccggtcagactggccgagcaatgccggtcagaccgcccctggtctccagttttgccaatttcgcacaaagatttaaaatcaagcaccggctcttctaatatcagaaataatcccttcttcacattatagccagatgcttgttgtgccaaattatttgctctagaattatcatgcctagcaatatgtctaatagcaaaattatcaaaattggcaataatatctaaacatgaatcaaggtacctatttagtgatctgtccaagcatttgtagactccggcgacttgttgcaccatcaattccgaatcaccaaaagcctccacgtatttagctccaaccatctccataacttgtaagccgaacaataaagcattgtattcggcttgattatttgtacaataatactccaaacgaaccgatgcttcataacacatgctattaggtgaaaacaaaactacccctatgccttgaccttctttgcaagaagaaccatcaaaataaatcttccaaggtataacttcaactaagccaacttctccctcataagcaatatctatatgatggtccactataaaatcacatacaatttggcctttcatagatttcaatggttcataagccaaatcatatcctctcaaaagctaacctcaaatcggctatgtatccctccataccatccgatttgacaacaatatcatcaatgtagatctctaagataatgcctagcaaatcatggaagatcaaattcattgccctttgatacgttgcaccggcgttcttcaacccaaaagtcatgacaacccactcaaacaaaccaacaaatcccggacacctaaaagccgtcttgtacatatcctcttccgccataaagattttattgtagccggcattaccatctagaaagctaatcaccttatgacccgaggcatcattaatcatcatgtcggctataggcataggatactcatctttgggagtggctttatttaaatctcaaaaatctatgcaaactctaatcttaccactccccttcttctccaccgggactatgctagaaacccactccgcataacgacatggcctaataaaccccaccttcaacaaccgatcaatctcctctttgactcggtcatatagcaaaggattaaaacgacgaggtggttgcttataaggcctaaaacccggtttaattggaagccgatgctcaacaagctcacggctaagacccggcatctcatggtactcccatgcaaagcaatcaacatactctttaagtagctcgataccttaaccttataataggctctcatgtttttgtttacaaaagtcggccttggtttagttccatcacctatatctacttcttcccaaggatcggccgatgtaaacccttttccaaacttctctacttcatcaaaatcttcaatggtttcaccaatatcgttctttgtagaccgatattcttgcaccctcttttgtaaccactctaaattagcctctttactcattatacaaatttatatggcttagccgtgctacactagccggctttacagagataggtacaaatttgccatcggagatactaataaaatcatagctagaaagatccctccccgacaagcattggatattcccatgacgccactcaaaagtagcatcggccattgcaacctcggtcgatgtatccgcttgcacaatttcaacatcattgccgtcccattgaattaaacattgatgcaaggtagaaggcacacaacaattggcatgaatccaacaacgactcaaaataacattgtagttaccttgcacatcgacgatgaagaaagcggttggtagcgtcttgtttcccacggtgagctccgccgaaaagataccctttgcctccgttggttcaccattgaagccattgagaatcatgttggtcttcttcaactcatcatcctcacgccccaatttcttgaataatgagtacggcatcaaattcacggtggcacctccatccactagcatcctagagaccggcttcccatcaacatggcctttgagatagagaggcttcatatgacggtttgattcatcgggcttctcaaaaaccgcatctttaggacctaatgaaagttgagcaacctcggcttcatccatagcacaaaactccataggcaacatacaaaccatgttgatatccatgtcttcttttggagatgattcacttttatcaaccgattgtttctccttctcttctacatcaaccggcttttccttctctatggatttatgcctccataccggtggtggtcgcaactcattgaatcttttatctctttgttcttcagcctttttctctcttatttcttgagcccgaagacgttgcaaccttctcttttgagtagccgtcaaatccttaggcatccatctaggattcggctctgttccaggaggtaaataatgtcccctaataattttgtttgaaaacgatgaagccctcacatcgccctttgcaattctcctgttaaaccggcgctggagcccggttagaccggccgtagaccaccggtcagaccgaccagatgcgccggtcagatcgacacttggcgaacggtcagactggcctgaggcgtcggtcggaccgctgtcgggtcggcggtcagaccggcctgatggcccggtcagaccggccgcatggctgcggtcggaccggccagaaggcttggtcagaccggccgactgcgaggagctggtttcggcttcggattttttgtttgaagatactccaattccatctccagaaggtattggcacatcatgagaccccactttgatggtaattacttctgaagtccttgcctccaccttgatgcgctttccttccctcctttcttcattggcccggttcctgccataaaaccggccattatttggtgaagacaaacgctcatgaattggccttcttgatcctccccacccttggttgaattgcattggaggcatatgattgaacattggcggcgttgccccccatggcatgtaataaggataaggataacccggcggctgcattggataagaaccccatgacatgtcttgtggatgatgatatggaggtgaatgcgaccgtcttggtgaatgaccaaattgttccctaggaggtgatcttggtctttttcctttgttgtgaaccctctcaccaccttgcttctcatacttctccaaaagcatatcaaaagtcattttggtcttcctaggggctttagaagttgaagctccactcttattctccttccaaatgccaacctccggcttctttggcactatcgtcttaggccttggttcgccaatgaccactccttttcccttagtagattcggcttactccggccgaatcaacaccttcttatcattgaaattaattgtgttcaccagaaaaggatcatgatcaagcttcatcttggagccatcggtgaacttcaatcgtccttcatctatggccgattgaacctgtcgtcgaaacacattgcaatcattagtagaatgagaatgagaatcatgccatttacaatatgctcgacgtttcaactcttcttgagatggtatgacatggcctttaggtaatataatttgtttttcttgtaaaagataatcaaagattttgtcacacttggccacatcaaaactatatttaacctcactttgccgatctttgcgaggagtcggcattaggttagagcaaacaaaaggcttgtttttattagtccatgaccattcggcaacatatatatcatgatcaccttcctcctcactatcactagcctcagggtaatcaatcacattaacattaggctttttgtcatatgatctaacaagttttttattatccttaacccggctttcttgagccagagccctttgcataagttgactaacatcaagaaattgttggtgtcacgcccggaatttctatccaaaattccaaacgcttacatgtgtgtgaaccctcgtccaggaatcagccgaggcacataataacaaattgataatagagtacaattattactctaattaataagcgtataaaatgtcattacagaggtagatagttcctctcaaacaataaagatctaagcagcggaaaataagataaacggcgcagacggctccactccacaggcagcttgaccaaagctacacctaatcctccacaccatcagcctcattgtagaactcttcctctgatgaatgattgcaaggtgagtatatgacatactcagcaagccacgcagcaaatatgcaagtgcacaggataacaaaggatggcatagtagggtttcatttgcaaaagcagcatttagcaaacatttgagaatttagtaaaacagttaagtaattaaaccatattaatccaacgctatacaacataccctgttgtataggcccaaccattctgaacaaccatcccggctgcacagttctatctccaaaccaggaatgtaccattccaaaccaggagctaatcaaattattaccaattatagcatcatttactatggtgagaagtgtgagactaatcacgaaagacattgttagacccgcccataaccgcgggcacggctattcgaatagttttactctgatcagaggtgtaccactgtacccacaagacacaaccccacatcatgtcaccatgtgcctcaataccaccacggtacctcggaaaggagttgtgacaataccccttgcataacacaatccactgcagcgcaccttcctggatcataatcacccccttataaacaaggcatggactccccagcgacccccgtgggcttatctccgccacttctcagtctggtgccccgcaatgaaccatgctatacaaaagataaagccgttgcccacgctggcttgtggttggcacggttaatgtttcacaaccgaaactcgtgaaccggtccttaattgtcatgagcacgaccatcaaaaccatgtgctcacaacccaccattatcaggttttagttggcacattaattaattaaccaatcacgattgaccatcgtgaactatcattaagccatcattaagtaatagtgaatcttaagttatcccaatagtgagctaatgtttctaagcagggctaagcaattatatctaatatctagttgaaccaatataaataaagctcaactagtcaaattataataacccaaggtatcaaggaataaagtaatcaagaacaaaaagggctataacaaagaataggttaaacccacccaatgacatttgaaaataaatgcaatatttgaatagaaacagtagctttaaacgggatcaacatgctcaaagggttgtttgggatctgtgtgacttgccttgctggccttggaactcttcaaactcttctccggcgaaaacggactctccggaaacgacggaatctaaacagaaaagagcaaaaacaccaaaacaacacataaacaagcttgaacagtacatgtggatatttttaacatgtagatctcaattttagaaaaatttagagacttgaaccaactaaatcggagctaagatgaattagttatgaatttttgaagattaaatcggattaaaacacttatatagattttaattgaattatgacgcaataatgaattatttttgaaaaggaaaaggaggattattgcgtcagcgggctagggttttggtggaccgggcgcacggcggcggttcacgcgaacggacggccgagatcgacttgatccaaaacggacggccgagatcgaacggtccacgaccggctcacgggagagggcgacgatgacgtcgacgatgacgtcaccaccggcggcggcggctcggcggctcagacggctcggacggcgcacgctcgctggcgaacggcggcgcttcggcacgaacggagggcaccaacgggtagagcgcgacgcggcgaactcaccggtgaccaaaagagcagcggaagaccaacggacggcgacggcgacgaggttgaaacggcggcggtcttcggtttgacgacggcgacgatgctccggcggtctccgactgtggcgaagcagcggacgaggacggcgacgacttggcgaccacgacggcggttttcccgagcgacggcgacgtctggaacggcggcggcgcacggctggagcgacggcggcgacggcggctcgaagctacacggcgctagggcgcaacggacgaggggaggcgaaggcgagggtggcggcgggtagaggagacaccggggaagcttataaaggggctaggaggcggcggcgaaggcccacggcggccggcgacgagatggaaagctcgagctcggagagagaaaagccgatccgattcgaactcgaatccaacgatttccaaaccgatttagccgatgtttccaaaggagaaaaggtagaggagatctcggggatcatttcccctcttttgattcggccggagaaggaaaggagcggccggatttggaagggaacggcggcggcggcgcgctagggttcggccgggcgacggcggctcggggaagacgaacccccacctgtcagcgagcgagggcgcgcgcgcgcggcggcggactgggccggactgggccgaggagagagagaagggttttgggcccaaaagaagactttttaaaacctttttcaatttaaattatttcttaaatgtaattccatttattaaaaatacttccttagctcaaataaatcccagaaaaatctaggaattatagaattaagcaaagtatttaatgaaattttatctgggcccattttatattggaatttattaattaaaattagatcttctcttcaagacttttaaaaaataaattctaaaaattccatttaaacaacaatttatatattttgaattttcagggtgtgacagttggccatctagtctttctctaagaggagcaattaaaccattaaaagcaagaccagccaaatctctatcagttatattcaagctataacatcggtttctaacatccctaaatctcttaatataatcaatgacaggctcattatacttttgcttaaccgatgttaaatcacataacctaagctcagtttctccagtatagaaataatcatgaaatttttcttctaattgagcccaagtatgaatagaatttgccggtaaagaagtaaaccatgtaaaagcattaccggacaaagataaagtaaacaagcgcaatttaaaaggatcactattagcctcaccacattgcgccaaaaattaacctacatgctcccatgtggtcttactatcctcaccactaaacttggtgaattcgggaactctataattacggggaaacggcacattatcataataatcaggatacggctttttgtaaaccctagcacgattcctagtttcaattcctaataatctcactaattatatcctccatattattaggcccttgttgatttggcggtggatttggtggcctaataggttgtgtttgtggcgcaatatgattatattggctttgtctagtatcaggaggataccccctagtaacgtcattataagcattaggaacatgtgggggaacttggggattatttgcagtagtagatataggaggatcaaatgttctaagatgatacaaataactagcattagtcattggatctattccctgtatcggaataattgcgtcggtctgaccggcccagggcccggtctgaccggcatccagaggcgtggtcggaccagcctgagtcccggtctgaccgccggggtagtacccgttctgaccggctgtctggccggtcggaccgacggctatgttgcggtctgaccggccgtgtgcgtcgctccattggttctactacccgtttgatctataggaggttggttagcagtggtagaggccttatcctttgacatgtaatcggccataagagggccgaatttaacccttaaaaactcatcaaatttaccctcaaaagttgcatctaacttatctttaaaagcaatcatagatgaatctattgtagatgctacttgttgttggatagattgtgatacctcatcattgcttaccaaatcaggagcgagcttaggacgtggcccgggcttgatgatcacgccttgacgagtcctagtgcttgccctcatcaacgcctcccgtgtgagctcgttgatgtactcctccatagctttgcggtcttctccttcgaagtcatccaatgtgaccggtatcatattgatggctccacctccgtcttggatggcggcttcgtcatgacgaagtcgaaattgagttgacgatgaacggatctcctccccagcggagttgccaaaaatcgtgttggcaacttttttgacaagttgacaagcacgatcgcagcaccttaagccttgcggtgatcctagagtcgccaaccacctcgatctagcaaagagctaaacctagatgggttttgataactaaaccggctagcggagccgatttctaaataactacctgtctcgtgggcaaaacggaaggttttcaggacaaacctacaaagagatgtcgcactctcgcagcagcggcggacggtttatggcgcaaaccgacaaagatggacaaactaagagaaaactaaaagcaatatgaaaaaatgattcgattgattgattgtagattggttttttacaatgaaccggccatgtcccttatataggggttggtcttgccctctacaggccctcctccacgtccaactcggggtagaaaccaaaggaaacccgaaacattccttcccgagcaaggaaacctcgagacccgacgaaacacaatcggattcggacctgccggtcaaaccggccacacaccgccggtctgactggccctcaaccggcggtctgaccgctcaacacacggcggtcagaccggcccactcggaggaaaccggtagacttacaaattttggcaatctttcctattttaatcctaggtgccaaatttgggtgtaaacaatcattattcttctgtgcatccttataaacaagattaaatctcctgcgatttagcctaggacccaaagaatgcaacagaataccccaaagatcatgaaggaaaagaatcgtctcatctcatcttgtggcctgtaaacacaattcaatcaccatgacccctatcttgggacagaactggactgaggcactatgtgaatcaaccctaccggaactaatggatccaagcttgcttctccatgcaatcaagataccaccagttgcccccaccgaaggaactttaacaaaattgttatcaaaatcagacccaagcatagccaagatagtgaaatgaaggaagattgtcatgtttatagagttgggatgatctaggtgacaattaattgtttgttttttaaaaaacaatagaaattttgatagagatggaaatatttgagttgcaaatatgcgtgtcatatcaggtattatatagggtgtcgcatggagtgttcagacactaataaaaaaaactaattacaaaatccgtcagtaaaccgcgaaacgaatttattaagcctaattaatccgtcattagtaaatgtttactgtagcaccacattgtcaaattatggagcaattaggcttaaaagattcgtctcgcaaattagtcgcaatctgtgcaattaattatttttggcctatatttaatacttcatacaggtgttcaaacattcgatgtgacatgatgtaaaatttttatgtgggaactacacagggccttaatcatctaacatgtactatattggtcatatctcaaatttgctagttctttggtcacctgatcagagtgatagccatctaagttaagcattttttgcattataatgtagtagcacgtcagattagttaatgtgtgattttgtgacattctaggccactaatatagaaccgggtgacagagcccagtggcccatcactgaggcactcacttgtaacaagccgaaatacaccccatagcaaaggtatggcctcctagccacagggcatgctaactggcgcgagtgcgctagttacggaactggcgcgcacgccagctggcggtcccacgcagtttttttcgctatttttttcgtgttttccttttatttttccatctttttcgctattttttcgtgtttttccttatttttttaattgttaggacacgtgttttcaaaaatattagagttgaaagttttcaagtcttaacttgaaagtttttcaatctgaagaaagtttcaaatctagagttgaaagttttcaaatctgaacttgaaaattttcaatatcaagttgaaagttttcaaatctcaacttgaaaattttcaaatatggacttgaaaattttcaatctcaagttgaaagtttttaaatctcgagtgaaagttttaaaatctaagttgaaagttttcaaattttgtcttacaaatttaaatttagagttgaaaattttcaaaatttgaattcaaagtttaaatcttaagtcaaaagttttcaatctgttagtaaaaaaatcttccaaaaaaagaaaaattttatcttaattaccgtcattatctaaaactaatttagttagttagagtctaaaatagttagttaggcactcccggaacgcgcgcgcccaatagcttttccgcctagccacacccatcatcgatgactacttatctttgatgggctgtatttgtggtctggcataggacatctgtgacgagccacaaccaaactcgtcaccaatgaggggtcatcagtgacatgtgcgagctttacacctgtgaaagatgactatagttatctttgataggctcctgttcattgcccgtcataggtagcagtgactatgtacaccctaaacctttgtaaaatggttatcccaacctagtgtactgtcaaattttgctctagcaccacaatatctagcgtaacataacacgtgtgattttgtgcaacttgaacagtatcagccaagctttcgtgaaatttacttaagaaaatgtgaaggtataaagttccaaggtgctctccagattacaataatcatccgtattttcttgtcctcctctatctcttcctcttcatgtcatcatcctcattatccctgaaagaaatataaacacgccgtgctacagatatgatgttcacaggtggcgtcctgcttccctttgaccctattcctcgagccattatttagtgacctttgtcctaactcttaactaaaaagtctttagttttccctgtatttttcctctccagtttgtattctcgaaagatataatggtatccagtttaattgatctccatatcatgaaaggccagtcgagcgaccaacttccatgcctctatcagcataggtgcattaggtaacaagagaacaagcacgtaccttctcaccattaagaacatttttttacaacatcctaagaaatattatcagtttgtcggaatatgtagggtttctaccagcgcaggtgtcgagggggtagtccctcagacagcggggagtggagacccctccccgagagtaaagatccaaccagggggtttgcggtgagaggcacggactatctgcaatcaggaagggttcacggggcccgactaccctgcacagagagggagacaggagtttatacaggttcaggccacccagaggtgtaataccctactctatgttggtgttcgttgtcttctctagatcagctaagtacaatggagaccttttcaggctacaaagcaagagtactgatctaaaagaatccaaccctttcatctgtatatggtccccttccttttatagtccaaggaggggctcacattattaccaatctactattagtcttgtcttatcagctgtcttattgtcgccggctggttccctaacacagtcttcaagaaaccctttgagtcttgcgattcatattaccccgggctccatctgagacagttaggatctcaccagtgtgctcgccacgtggtgcgtggtgggcctgacgagacccgacttgcccgaaacagtgccaccgttgcttctccacttgcttggataaatcaagtggtgcgaggcatgtgtgacgcgtgtccaaggcgtcactagtcctaggtgactcagcgctggtgtcttgtccacgtcctttcaacttcagactagttggggatcccccatgatcctgtttcaattatggcggggcatactgcctcacagctggctatggagcacgcccaacttcccggcaagtttggcaatcctcggatgagtttctcgaagatgtcgttggtgaaggaatattccaagatttgtacgtctcgatgctcctctaggcagagggagtgagccctataaggaccaaggtgagctcggggcccgaaacaaggccgggcctgaggcaaacctcagtttacacctttatgctttgtatgtcttggcactcatcatcctcgagtagtgcgtgactcatgcgaactaaggtgagcccggggcccaagagtaggccgggcccgaagcataccttagcttgttctcttaagatataaatcttgcagatttctacgccccttttgccgaggaccgtagaacctacaaggactaaggtgagactgggacctaggacagggccaggtccgaggcagaccataggctatattcttaagacgcatttggggtatgcttgggacccaagccaggtcccaagctacttttatgctcagagatttgagtcatacacgcagtattcctcctcagctagggagaatcccatatatgaaaacttaggtgggcccgggacccaccagagtgggcccctagctacgtcactctagggttacctttttatttttaaagatattctgagcatgctatttatttgataatgatccttttgccagataaatgggtaccctggtttccatttcaccgacagcaggtgagtcacaagcatgaagaatgaaaacataaggaatgtatgtaaaatcatggccgattagactatagagagaaattctcatctatgttgtaggagttgtttatggatcaactagtaaataaatatcgtcaattgctcggttatacaggattttcatttaatttacagtgtggttcactatgcgagcatcttttttatgggttaccagagtatctcattgctttcaatacattcttgccaagttgcattatcaaaatttggtgaatgataagaatttggtcagaacatctttgttcgctcaagggtctggcttgctagcgacaaatttatatgcaataggcttttgcactgatttgtgtatcaaccactgtgttgatttgtgtatcaaccattgttatcaaactgcctgaaaaacactggatatttagtcattcagtaatgctggatttgtgtttgcagtattcatttggagtaccaaagtcctaacaatatatgatagtgatattatttttattcaatctacatgttccatggttgcatctgatcatagttgcctaatatgtgttagatttaattgggtaattgatccaattaaatcaaataaattccaaggctcactatgctagaaatttatgtgtattcattctcttatgggatatcaatgggatgaaaagttttgagaattaatccatttgattaatgaattggtaaccaatatcaattactcctaattgatggttggttgatggttgtgtagtggaggatagttgatgacaattagttactctattcatcttcctattccatgactcttttactcttcatctttcatttctcctataaaatgagaatgggagaagagacacacacgtttcatccacttccaatgttgttgctgctacggtaatcccatcctgacgagtgtgtgcacacgtattaggagagtaagccttcgaaaccacacactgctatgacgtttgcacggacaggtacgacgtttgcacggacaggtgggcgatcaggtttttggggagtgcaaggcgcgactactcactattcatcaatgtctacttcatcttcatcaacatgttgactgggggaggcgtcaacggtggacatgtcggcagcggtactggaggaggcgagaacaacaacaccaacgtaggcaacagcaacaacaatgtctcatcctcaggagcgttctctgggtatattactctaatcaccttagtgttaaacatgttactagatgatgctactattgttactagtattttcatgtttagcactatcactggatcatttcggtttccacatgtcatgtttattatcttttttctggattaaaatatgctgaattatgaccatatttctaacagtatgtttgttcaaacataggagacatcattgttggctatgtttctaccacaccatagacctaagttactttatagttctctcctcctgactgtgttatctggtttataaattgtaatagtcttcaattgattatagttgcacaccctaatttgttgtccttcacggtacaacttattaaaagcttgagattcagtagatccatggaaaataaatagaaccattttgttgagttgtatgctgcacatagactacgcactctattgaacaatgttgcatcaatataatgaaaagtcgccatttaacattataactccaataaacgcctctattgatagtagaggatcatcactttagcaaatagcgtgcgcgcgcgtgtgtgtaacttccagctgcttcaaaccagttaatgtcaaacaacatatatagtaactagagaactacatcatgtgtccaagttttccctatatggctgataaacacatgcatcacccatttggtgttggtttgactggattttcacaagggtggagttaatattgagctgattgaacattttctgtatatgacgcaatacacatggagcatggaaattttatcctaggcagcctgccctgtatgcactggaattttgctcgttacttaagtaatgtttcgggttgataatgggacctacaaggctatatcgttgttaatggaacctacaatgctatatcgttgttacagacggttatagactatgggtgatgatttccacgtgaatcaccattgagatctaactctttgtaatgcataatgtgcatgattagtaccaaactcccaactagcatattgtcataaaaactaacttggggctagattgttacaaataacaatccatggctccggcaatgattaccaaatgaaaataataagttattgtggttcactaatagaacatagagccatatataacacatgtactaaatgcaatatccataggaggaaggattcactacttgatatagattagaggtctataataaaccatatatcgaaacgacaaaaaaggttgtaaacaattacatatatgattttttttacccagctcatatccttcaaaatttgaagcatgctgctaaatatgaagtacttgttgtgggctatgactctaattgattatctatccatacccctttgggagaaattgcgattatgtagattacggggtatagactattcgagattttgtagttgtctaaagaatatgttggttggaaatcttggttgtttgggaaccccatttttttaatgccagggatcctctaaagtaagtgtgtaaagactagaatacctctaaaaaactttatttttctatgaaagctcagatcctactattcaaagcaacacattgagtcatagtggacaaagctgaattcggctatagtcatgtgatctcaatgcatcatc

SEQ ID NO: 4799 - DNA, 71031 bp, Oryza sativa
tgcttctcccacccgcgacatcgccccactccacccgccttgcctcgcttcgcccgcctgctccgccgttctcctcatcgcccaacgtcgcggcacccgcccgcgcgggatcgcttcgccgccaccgacgacacagcaccatcaacgccattcacgaccgggcgccgcccttgccttctcccgtgtcgtagccgccgccgcctcgtcgcccgccatcgcctcctctcccgcctcaccccaatggcctcctcccagcagcgtcggccggcttacctaaagaagagaagagaagagtgagagagaggaggaaggaagaggagggggaagagggagggtgttgatgtggcatcctgacatgtagggcccacgtgggttccttgctgattcagcaaccatataggacaaaatcggggtaaaaccaccgaaggacctaacatgaacggtttttataaatcgagggatgttatatatctatttttgtggttgggggacaatgttgtaactcgatgacaagttgagggaccttcggtgtactttttcctttcttttaaaggtatattggtttggtatttctttttctttttttagagagaaaaatgggctggtatttcagctgccagatagtcagatactccctccataaaaaaaatcaaccttgtactacgatgtgacacatcatagtacaacgaatctggacgtctataatgtgtcgcatcttgtcttttttgggacggagggagtagaccaaggatacaacttagctacacaaacacaaaattcatttgcacgaaccccactccatgtgatccaaacggtgtgattttgcgaagttggtgtagcttttctggttagtttgtttttgtggtgaaacttgtttactggatcaaacagatgctcaagtttacggctaatcatttttttagtgttaagactatgtgccgttgataacgatgtgatttcgtcaatatcaacatatgacggcctaatcttgccgagatacttgtaaaaataggatgttcatgtgtgcgtgttcacataggtgagtgtacgtgcgtctgtgtatgtgagtctttgggtttgtattgtttgggtttgtattgtgtttctcacataagaacagtgtgattttaaaattcattttgcctaattcactaaaaatgatccatgaatatcaattttcagaaaagaaataatattatgagtttgttggaattaaagggacctcaagtaagaacaaaacaccataaaaacaattctataaactttagatacgaaaactgaagcgtaccagtcaccacttgaaagcaagagctatgttttgatcttccgaaacaataggcagatctaatttcttcagctactaacagtggattggtgtgtacactgttttgaaacctggccttgtatttgtataggcaaacatgacgtgttggattcgtgttctaacttctaaatcatagtactccctccgtattttaattttaatgtatgacaccgttgactttttaaccaacgtttgatcattcgttttatttaaattttttatgcaaatacaaaaatacttatgtcatgcttaaagaacatttgatgataaatcaagtcacaataaaataaacgataattacataatttttattttttgaataagacgaaaggtcaaatgtttgttaaaaattcaacagcgttatatattaaaatacggagggagtggaaaataagcaggcagccggtctacaaatacatgcatccatgctcctgtaatacaactcttgatcgccttattttttggcctattaacgtaacagccaggaaattattctaacgccaacccctccgcggctccgcctgttaggacaactagataaaacccgcgtattgctacaggagttattgtgataacaaaagataaaaataatagtatgtaacgtagattaaataacataagcttatatatgttgaagtgatttaaatttaagtagtatatagaatgattattcaaatttaaaagtaagatgatttggccagagaacaaaagaaggaagataatttagatcatatatctaagggttaaaaaattgagttgatatggcttaacgagagaaaacagagataacattaatgaagtgaggatgaacttatatagccatatatgtatacctatataggatattataaaaaataataaaaattgagttgatatggcttaatgagagaaaacagagataacattaatgaagtgaggatgaacttatatagccatataggtatacctatatactccctccatttcgaaatgtttgacaccgttgactttttagcacatgtttgacatttcgtcttattcaaaaacttttgtgagatatgtaaaattatatgcctacataaaaatatatttaacaatgaatcaaatgataggaaaagaattaataattacttaaattttttgaataagacgaatggtcaaacatgtgataaaaagtcaacgccatcaaacattttgaaacggatggagtaggatattataaaaaataatggagagatatatgtgaattatgtggggatgatttaacgtgtttgcattttaatttctaaaatttaataaattataaaattatggataatatagcatgctttcataatgcttaaatataataattgttattggatgatagtgggtgatgatgcgacatctttgcatgttaagctttagaatttagtgggttataagttatactaacttatactaagtgaggattccaacaaccttttgattgtaccagtttattcagttagagagatactcgcgtttgaaattttctgcatgaaacgatcaaaatatagacaacactctgatttgttattaatttcatttagaacatcacggcatagcactagtagtaacagtacacacgagctgtaattttgtcaagcaaaaccaagcagcgccacgccaagcttggcgagcttgaaggcggcgtcgtcctccgccgtcaccggcgacgtcgcgttgcccccgcggaacccgtcctcgcaccgcctcgccgcggccgccgactcctccagcgacgacctcgcctcgccgagcctgccgcccctcaccgccgcggcgcagccgggctgcctccgcgcgatgccggcgtacagcgcccggcacgaccgcaggcaccgcgccgtggcggcgtccaccttcccgccgcctccgccgccgcggagcagggcgtcgatcttgaccgacgtgctggtggcgttggccgtgaggaggccgacggcgacggcggcgaggtcccggtagctccgggcgccggcgccggcgccgacggagcccagggcgtcgaggcagaactggacgtcgaagtaggtgctcccgccgccgacggtcttgcacgacggcagcaggatgccgtcgccggtgacggtgacctcggccggaagagcggcgactacgaagaggagcggcaagatcatcaggaaggggacggtgacgccacgcgaggaggaggacgccatggccgtcgtcatggctgaattttgtttctgcctggctggccgagccgtgcgcgtgtgcattttgaccttccgaaagactaaacaaaaaaagaaattgaatatttgaattgactagaaaaaattgctcatgcgttgcgagagtgaagactattttaatcttattattattatacggtttagataaggtgaaattcacggtaggaatttacttggattttttttttataaaatcatgagctgcaattaagagtctaatcatctcaaggtagcatgtgcgagtttttttaaaagagatttcttatatgtctccttctaaatttctaaaagtgaataaacttaaaaaccgattcaaacacgctttagcgaatgaactaaaaactgacttaaatacggatgacgtaccaaagtaccggtaaaaatatgttcaatttttataatgtttaatttccgtaacgatcaacatttgtctggatacttacttattttagctttacctggccgatttctttcgacttcggattataattatttatgtactttatagtaacaaaattataaaaatttaaatgtcaattcaaaggtattgttttcagcaaataaatattaaaggtactttatttattattttgaatggtagaaagcacttttaggctgtgttcggatgccccttttctcaacctctctctcgttttccatacgcacgtttttcaaactgctaaacggtatgttttttgcaaaaagtttctatacgaaagttgcttaaaagaatcaaattaatctatttttcaaaaaaaatcagcaaatacttaattaatcacgtgctaatggaccgctccgttttccgtgatcacgattctgaatgggaacttcttctagcaaacacagccttaataggtcttcccgtagcgtcataccggtatgcatatgtataaatagttaaatatagtataatttttttataagatacattaatataaattaattagtccaaaaatgcaattacaaatttgatcaacacttgaagaaaaaaataacaaatcgcattatgtagtgtcaaattttgttgttttttctctttctagtaaatcaaattttcacgtgcatgtttttatatacatctaagagcaagtacaatagaaaattataaggtagctacaagcacatatgaaggaaaggaggagaggagagagaataaaagaagatactacctccatcctaaaatacaaagcattttaggatagggagtgcatatttatagtcaagtgcaacacggactataagaaagtatgtataagaggtgagaccagtattaatggtgtactacatatttatatatgaaactattatatgtgtaaactactagattagctctatataatatctcaatttttagagctagcgggctattaaacttgctctaacaagacaatcgtttttttttttcggggaaacaagacaatcaatttaacattgcatttgcatgtactaagcaaaatatgcaattgcaccggtatagaaaatttatgttccttttgaaatttgaattgaggtttgatactttcaaattttgaaaggtgtgtctcttggcccacctcttttaatacaaaattgaagagattgtggagagtgtgccaagaatagctggttgcccatcccagctttcccggggtggttgcacaagtgtctgcaacccaaaaacacttcggtgctcaagcgtaggcgtagctctgcagccctgttttgaccatttgaccaaccgctaaaccatgaacaacgttcttttgtttatctgaaggctaaataatggataatatatttttcaactatacgaaaaagaattactacgtaccatgatatctgaaagctgttggatctagcgaggatgtcatcatgcaaggacgcagtggcggcggaaggcgggtgtcaggtgggacgacgaggcgaggtggggagccggtgcggccgtgcgggtgtggtttccacctcgggcaggagggctgagtgacagagaggctgctatgtggagaaaggttgcataagtgcggatctgacgaggcatgacgcatagatatagtcaccgtggagacgtggcagcggtgagttccctcgtcgacggtcacctacgtggcgatgggagacggtggctgagggcatggtaggtggttgttggcagtcattaagcataaactttaaccgtcaactactgtataaaagatatcagcaatacattatcaaaatttagtgacaggagtttaccactaatcattttcactagttttggtaaatataatggacctccgacgaatcaagtgcaggcacacggattgatgtgcccacaagtcagcttaaaccgacttaatatggggccaaacatctgtgtaccgccttaggagcccacttgctggtagcctctggtgaaaggcggtggcgagaggtggggcccatgggtcggccgaacccttggttcgaccaaaccacccgtggctcctctcatcgccaccttacacgtggacatctgtgatggcttcccaatgatggttacaagcacaccaacctccacaactgccttacaaccgccattctcaagctataaaaagaggaggcttccacacttctcaacacacaactttaagctcaagtagagtacaacttgaaagtgttaattaagcctagatgggggtgaataggctaattcaaaaatcaactaaaagcagaagcagtaattttcggatatttccgaaattttcggatatatccgaaaattttcggagtcagcacaaacaggaaagtaaatcctagatctagttgcctacaacaagaatatgctagcacaaacagcaactagacctatagcggctcaaacaagcaaagctagaggagagggaggaagtaaagtcaccaaagatgaagctcacgaggttgttcccgaagttcgaattcttgaggggattctactctccgttgaggagctcactaagagccgggtcttagctaaccctttcctcaagaggttgcactaagcactcctccttccactaagggtatctcttccctttcagaggtgagatctgaccttcacaaacttctcccggccaaccacaagtagatcggtggctcgggagcgacacctagccgcctaggagttctcaacctccaagagtaacaaatgaagcaaagaactcccggagatgatgcaagtgctcacaaatcttcatgaagtcaacaacaagcactcacacaaactcaaatccacaactctcacacacacaccaaatccaaatcgaacacgggtgagaggggaaacaagaaagcaaggcacaaaagtgctagagagagagcaagccaagggcacaaatgattggaatggaaccagcagccctcacaagtgaggggagggggctatttatagccacagcccagattctgcccgttatgcacaataattgagattttcggacatgtccgaaaattccagctcagcaccaacagcaaagtcaacgaaggatttttcagacattccgaaaacttttcggacaagtccgaaaatttctagtaccaacaacatcgttctggatgttctcagaaaagtccgaaaataactttcggacaagtccgaaaatatacagaagcgaaattgactctactgatgattttcggaaaatccgaaaatcagtttcggacaagtccgaaaatatacagaaccacttttgccttcgcagtctttttcggaaagtctgaaaatcactttcggacatatccgaaaatttccagaagcgacaatctggttctgtgtgttttcggaaagtccgaaaatgagtttcggaaaactccgaaaaaatccagaacacaccaaactgaggagaaacaccttttaaaaatagattttgagcactttgatcactcctcgtatgtcaatgcatcatccctcttaatagtgcggccttcctattaactcaaggaaacgaaaacgtacaaaataccatttgctcatttgccgcatcacatcacatcaacgtattccgcgggatatgcattacgctaactcattattgaggacataacaaccttcacatttgcttaaataaaaatattagtcctctctaatcgcattgtaattaatcaccaaaatcattaggggcctagatgcactttcacaactcacttgtagtttcatatttagtatgttactttggtatagagtgaggggaagctccggaaggagtgcctcgaaatatcggagttccttcgagaattttatggaggagtgttggagtgtcagtattcttggaacggagttccggagaaaaccaggattgtcggccttcttctctcgcttatatctcggcggatactttctttattcaagtaagtgttcaagtttctttatgttctttaattaatttatttaattgagatatattctcatcggtgcgggttcattgcttagtgtgcaattaagtgctctattactagaactctggataaagaaagaagttcctgcgcaaggttagagtagtaattaataacttaggcgtggtgtctaggttaaaaattaccttcgtctgttgtgtgctcaacggaaaatgaggtaagcggcatgtggtgatagccttgtccgtccttcatattcctccaccatcgggtacatcataaagctcaaggccaaactaatcctggcagaccaggggagggacggtgcccgaagcattcaatagagttgtacctttaacttaattaattaattaaaagatataggaatcctctctagccaatttatactaagttgttgtccttggatcgaatcttgatagttgattatacacacattgtaaggggaagtgctacaacggtattccatgccctggccatggcttcttcgagcctagtctagccatgttcctccccttgttgagcctccggcggctatcgtcgccgaccccccgagtccaccgctggttgccatttttctgacccagtcatctgaccaacattggtgatgcatgtggatgccttttccttttctctttatttctttgtttggattgtccgattggatttcaatcggatttatggacaaaaattttcatggacgatgaaagcaaattgaatcggactttcctttttttttgttttaattttttcatcgttattacggacgacagaaatgttttcactttttaagtagtagagatacactttgataccatattgttcaacccaaaagcttaagctgatgagaaaaggtggacaattcactttatattccaacactccctcatgcgatgtcacaccctgtagttctcctcccaagcctaaaatttaatttataaatgaccctaagaaaatgccggtgcaaatcaagagaaaaccctaagaaagtaatacaaataataatcgaatctggcatgtggaatttttagtggaattttcagagccctagaaataatttttagtcactaacaggatttttagtggaattttcagagccctagaaataattttaaccaattaaaattgagcaaacaatattttaattccagggaaaatccttttcttcctttttctttttctttttcccccttttcttttcgagtgggccgccggcccattctccttcctcctctcccctccgctgggccggccgaaggccaaggcccagctaggccggccgcctccctcctcctacccgggacgccgacaggtgggccccacctgtcgggcccatctcctacctcgcgcccgcgccgccgcgcccgcaaccgccgccgcgcccacgcctccgcctcctccgggccacgtcggtcacgcccgcgcatgcgccgcaccttccgcgcccactcccctctctctcccgcccgcgcccgcgcccgagatggccgggattcgattttcgaatcctgcctctctctctcctctcccactcccccacgttggccggcggaatctcgcccctaccggccacgttcgagactcccctctcctatttaagctccgccgtcgccccctctctctttttccccatttcgccgaactccctcgtgctccccatcgctcccacgccgtgcacccacccgccaccgcctttcccgccgctccggccgccgctagccgccgctaggctcgccgccgcaccgcgccgtcgccgccgtcgggttcgcaaggacgaactccaccccgtccgcccttcctccgtcgggattcatcgccggaattcgcatcccctcgcgctccggtgagttctacctctaccgccgccttcggccgtggatgccggccgccgtggttcatctccctctctctaatctctctctcctccttccttagggcaccccgaagcccgtccgccggttgccgtcgtcctcccgtggcttgccgtcgccgttcgccgtcgtcttcctccgcgccggccaccctcggtgaggcttcctctcccctctattcccctccctctccttcctagccgccgcttagcgccgccgccttcgcgtcgcctttgcgccgtcgccggcaacgcgttcgcgcgcgcgcgccatcgccatcgccgtggccggtcggccggccttgagccgagccgagccgggtcgccgccgcccgtccgatcaaccccgggggcgatctgggccgtcggtcccgtggaccggcagtggaccacccacgtggtcccggtccacggtggaccaccctcccttgagccgctgccgagtagggcccgcttgccggcgcaccttttccctctctcccgagccgctgaccggtgggccccgcatgtcggcgccgcgcccccccttgatgacgtcagccctgggaattattgcgcaataaatgatttaaggactttttttatagtaataaacacagtgaatcttctaaaattcataactaattcatctgtgctccgtttaagcccattcaagtctcagtaaatcaagaaaaatgtgtagaatccattaaaaatggttttgttctctgtttcagtagtcttatagcctgtttgcaatgtttgccttgtatgtcgctagattccggttcttccgacgctccggtgtacttcgagatagtcgccgaggtttctccagcagcagagcaaggcaagtcatgcttgtcacttgaacatgttgatcctatattgcaaatgctctattgtttttcttcaaatattgcattgttttataatgttactatggggtgtttacctattgttacagccatgccatttttgataccatgctcctttgttagcttgggttataacatgaatagattttggactaggaattgcttagccatgcttagttccactagcacacaatggggaaagctcactaaaatatagactttaggttcaattggtaaggttggtttagtaccaccgttttggtgttggtcaattaaaatgaatcacatggtgggctgtgggtgcatggttctgctagtcgcacccatggcagttaaggaccggttcgcgggatgccctggaagaacttatcatacttaccacaagccagcatgggcaacggctgggcttgtagtgtagctttcctctagctgacgcatccaggcaagggtgggcgtgatggagcggggcgggccctgcgacggcctctgtcgcttctggattcacctaggcacgagaggggactgcccgctgctttgcaaggagtgggggtgaaacctgaggtgtggtgtgcttggttagagggggttatgcgaagggtcctgtcacggcctctttccggtatgtcgtggtggcatgtcggcgcacggaaacgtgttatggggctgtgtcttgtgggtatagttgtacacctctgatcagagtaaaactattcgaatagccgtgcccgcggttatgggcggtcaaccagattcaccgtgattagtcttaccctagtttagtctaatgaaattggatagtataggtggatggttgggcctgttgcaacgtgggatagcgttggacagcggatgatcaatattaattaattattgcaactgtttaattctttcaacttctgtttataaatgcttgctttatgcaaatgaaccactctagctctcctttgataatttcctgcatcatacccctattccggtatgacttgctgagtacagtgggtagtactcagtcttgctctattttttccccaaccccagagtacgagtatgtgtcagatggaggtttctccgaggagtaggcttcgtccgtgccgtcgaggatgcctgtggagtggtgttcccgctgcagttctagtcaaggcttagctcctgttgtctttcgtttttccgctgcatttatgtaagacttttatgatgtttgtaagacgtgaatctgaatgtcaacattgtcatttgtataccccggccggtcctggacggggattttaatgcacattctgcttggaattctattcgggaatttctgggcatgacatgcgaggccctttcaagcctccaacgtgggatagaagtgggctgcaattttttatttaattgcacgccagccagaattcgaacttgagacctttagctctgataacatattggatagtataggagggagagagatatactgcgtagcgtggatacattgtatcgagccttaggggccgatatatatagaagtacaaaggagaagagataagaaatgattacagatatggaatgaatccaaataaatcaatcctatcctaatataagtctagctgccatatactctaacacctatcttgaattgtcaaaatctgaaaaattttagaattttagttaccatgctaaaatattggtactgtcaatacctaggcaaattttgatattgttaattttttggtaagttgtgtgtgatgattggcatgttttgttagccaaaatactattgaaagtgctatcaattttgtaaggcatattttgacatcaaaccaaaataacccttaattataaaaattgtaaaattattcagtccgaagtaaaaagatcagtactaaaacattaacaataataagtgacacaaacgttcactgttcaaataagagtgctctatggctccgttcggcagtacaagttcccaactcctctttctcgtttttcacgcgcacgcttttcaaactgctaaacagtgtgtttttttaaaagtttctatacgaaagttgcttaaaaaatcatattaatccattttaaaaaaaatagctaaaacttaattaatcacgcgctaaaccactgcttcgttttgcgtgtcggagagtgaccctcactcccgaacagagcctatatacttttatgtaatatactatttaaagtgctctatactcttatgtaatagtcaattcatagtatactattaatatctggtcccacctatcatacataaattacatcttggaatccgtactgcaccgctacttttctatctctttctttatctatacctaataaaaaaattcgtaaggcttccgtgaggtttttttcgtccgtcggcggtttcctgccaaaatacgttttaatccgcttaatagtcggtcggaaattttccaatctactccaaaaccttgcttaatatatgatatgtatcagtcatgtatccatcaatcacaagtagcttgcccgcctggttggtggagagaaaattttcaatttgcccaccagggttcgattcccatcatctctcctttttatacacggctatattgctccgaataagtctactgtgcctcccacatctcattacttcacctttcctaggctgtattgctcggaataagtctacgatgcctcccatatctcaaatcattgctcggaataagtctactttgcctcccacagctcaaatcctactcagaataagtctacttttccctcccacttttaaatttgaaaattaaacataattatatttttcttttcatcatctgcaaaacacgacgacatattagagtccgcgccatctatttgcacctctttcttcaacagatagtgataaatcttataatgaaccagattttaatttgaaaattaaacataattatttttttcttttcatcatctacaaaacatgacatattagagtccgcactatctatcgtccacacatgagccgtgaaaatgattcgtctccacgcaagtccgtgttcgattttagaaattatatcaagcgcttaccatgaatccgatggctaaaaaatcagaagtttttgcacctctttcttcaaaagatatttagtgattctgaaatcttataatgaaccattttttaatttgaaaattaaacatatttttttttcttttcgtcatctgcaaaacacgacatattagagtccgcaccatctatcgtccacgcatgagccgtgaaaacgattcatctccacgcaagtccatgttcgattttagaaataattatattaggcgcttgccatgcaagagttgagagagagtgcatgttatgaaaatatgagtatatcaatatgcaatagtgtttcttatcagtcctgattatcattaacccactgaataatttatctattttggaacattattatatacatgttaattgtgtatttatagcatttaaccttttattatacccgtagcgaagcacgggcattttgctagtctctttaaaattttataactggtttataggttgctattgtacctgctcttactctagtgctgtgcaaatttttgagcccaaactttcagaagagccggaaccgatgaaacgagcgagtcgccgtgcaaactctacacaggatacgcgtcaacgcgggacggtaaaatccgcgccgtccaaatgaaatccaacgggtgagacggccgactgtttcccaagtcaccgtacgcggatttattacccggggtgtcagaaatccaggcccacccgtcagcgacgcgttagcataataagcaggcaaaaccacacccccctttcggcctcagatctcctttacccgcctcgccgccggtcgccgcccgccggcgccgccgccgtcacagccagggaagaactccgttcgccatggagggcgtgggcgcgcggctcgggcgcacctcggcccgctacggcaccacgacgacgttcacggggcccgtcaggaagtggcgcaaggactgggtgcccgtcgccgccgccgccgccgcggcggcggcggcggcgtcggccgcctcctccacggcgggggccggatcccgcgggaacaatctcgtgctcttcaagtggaccccgatgaacggcgccaacggcaacgggggcggaggagacggagaccaggcggcggcggcggccgccgccgcggaggaggagaaggccacgaaacggcggcggtacgtgccggtgaggactctcgatttgattcttgggatttgtgctttctcggtatattccttgggccatcgagggttcgatttggtgtccggattggatctttgcttgcttgtgtaggtcctggcagcttagatgattggataattctggatcttggttgatgcgagctcttgtggaatattaattgaattgacgcttttgaattgacggtttgaaaagaattagggttcgtatgtttgaaaaacgattatgaacatcaggtccccaaatatgttggagaattgtattttggctaactcaaggaaaataattgtttgttaggagtctagtaactgtacaatttgtagcgttttggtgtaattaggttagtgcttaggatatccctggttataactatagattgtttcattacgtacagtaatttcgaactagttggtgattagtgcagtaagcattatggtgggggtgctatcaaacaggatagctaatgttcttggttaatgagaacagatctgggctgcaccctcaaggctgcaactataattgggactattcatagtactatcgttgacataattcttcatgatttccagttgttccttttacactacagtccgatgaagtgtatgcgatgcattgaagtgcgcgggacttaattacagcagcaagaaactcagcattaaactatctaagtaacaagtaaactactaaactactgacatcagctcatgaaacaaagatccaaaaacagcagtataaattgaaaatattctatttacggtaaaaatccataagcacttattgtaaatttcatagatactgtaaattttggaatttttatgtgaatttcaaaatagactaacataatcatggaaagaactgtaaaactacaaattatttgttagataaattacagcgtaaatccatcatatatacaatgtaatccaaccaagagggaccagtataagtctagaagaactccggttaccaattatttccacaatcttgtccattcaactttatcactgcttaataatgaccatattaaatatttattcatctcagtgggaaagctggtggattatcataggctcatagcatataattggaaaaattggtagagtatcatagatcctgatagcataactggtgaataggtcctgatcatgcacactgctttctcatggtctagactcctcatggttagatagatggtcatgctcctcccttgtggacggtggggcagcagccagcaggcagaggcatgcagctcaacaaaagggttgcagacttggcaatcaaaacaattgtagcacacatgcacggtaaatcagcacgaatctaaagaaaatcccaagggacaacaaaggccttgtttagttcccaaaaacttctcccaaaaacctcacatcgaatctttggacacatatatggagcattaaatatagataaaaagaaaaactaattgcacagtttgcatgtaaattgcgagacgaaccttttgagcttaattaggccatgattagccataagtgctacagtaacccacatgtgctaatgacggattaattaggctcaaaagattcgtctcgcggttttcaggtgagttatgaaattagttttttcattcgtgtccgaaaaccccttctgacatccggttgtgacacccaaaaattttcatttcaccaactaaacaggccaaaactactgcaattaagctatatctgtgtcgacacgaatatggcaaaccactttaattaatgggctgcgggctgccactgagtgaaaagaagtggaacagtttaccatccttctgaataggtgttgcatcaggtttagtcttggatgttcatttgtatacttgcaggcttacttcttaaaacttacaacagtcgtttgctagttttttcattctattgtattctagtgccaatattactaagttcactatattctagtactcatcatgaaaagctcttggattctataggctcactcgtgttcgtgtgctgaaatttcctcataagttggttcatttttgttgagaacaaatctacttttttgaggaatagtgtgtcaccatcttctccaatgcttgtttatgtatatttgctgattctggtttggcaggtttctgtagttgaagatgaaaggcaagaatctggaaaatctgacgatgaaaataaggcaaatgatggagaaccattatccgccgaaactgagccatctaatggaaaaactaatattaatgatacaccaatggatgaatctcaggtaagatgtcacttagcattcacattgttgctacaccgttttctaatataaaccagtgccaattatacggtttgtgacaacctttgtcatgtggttttgatcctgttgttgccatgattgtttgcatgcaagcaatgttatagtacaaattgttgttataatctcatgcataatatttgcttggtaccttattgaaacctcttttttgatctaaactcgattttattatctgcccccattttttggtgaatagtaagcagccaaggcattcagactatgactttgctgactatgaatctttttctcctgtttagtgagatattttctttccctattgactagacgttcccttttttaattattctgcttgactgttttcttgtcaaccattgtacaaacacatttttacacgtttctttgtcattgatctttcctccacgtccttcaggcatcagatgaggcccgatattctggcaaaaatggcggtggaaccgacctaaatttaaacttgggtctgaaggaccctgacggagacaatgatattgatactgaagaacaagatgctgaaaacaacacacacacagaaaataggctgaagaggaaatctgtagctcctgaccttgagatgagaatgtaaccggctgcttcatttattccttggattctttactatctgcctttgggcctattgtgcaaactttcttgacatattgtcatatttagaggcaattcaacacgatagcttacaggaccagctatagtaaaatgtctgaactgaacattattaagtcaaaattttctcggtctgttgaacatctgaaaagtagtagttttatgttcatcttcaagtccctgcatgactggtaatgtttcatactacacttttgtgcgttccactctggagttgccaattctagtgtaggaaagtaaatgtagtacgtgtgaaagatgatttaagaaagaaagtagtgcaacgtgtaattgcagggtaaaggcaagtgacgagagaacagcagtgactgtagattgtaggcagtggcactgatcagagtttctatgatttttttttttttttgaaatctgaagtgtgattgtactagtagcatgctttgttgcttttctgattctgaattaagtgctgcgcaatcgttttaaatgaacgtaaaaacatccgtattagtaatggtttatcgctttatcataaaatgttgcattgagtctatctataaaataaaatgtagcattgagtctatctataaaaaaaaaacatttggccgttcaataggatatgatgatatgatcatggctaccattaatacaaccattgttcacatcaagatcaagttgtacaagtgctggaatctaattcagccgtctgctatagtactgacttcaaatggccgcaaaatgtatatatatgcttcgttttggatccataataagtacttaatggaaagctctttccaacggatctaacatcatcgctaaattccatctatgggcttgtaacttcttctggaattttttttgaaaataatattattttaatagaaaatcgcaaaattataggtcggctagacgaaatcgcaagtttagcgccctgtcgaactggggcagttcgataggtacccctgtcgaactggggcagttcgacaggggactgtcgaactggggcagttcgacaggctagttgtccaagaaaacaaataaaaaagtacttgctacagtgcccgatagggacgtatcgaacagggggagttcgatagggcgcgtggcatggacgtatcgaacagcggaagttcgataggcagtgtcgctacagtgccgctacagtgtgcgctacagtgcgctacagtgtttttcctttttttaagttattttattacctgtcgaactggggcagttcgacaggtaccctttcgaactgcctccgttcgacaggaaaaaaaaattgcgatttcgtctaactgacctataattttgcgattttccattaaaataatattatttccaaaaaaaactcacttcttctgggacttagacccagtgagcctatgtgggtgcgccccaatcaggtggagcacccagtgggcccatgtaggtgcgccccaattaggtggggcacgacggacccctaggttatcctcccacttccttaaatagatccctaggtcatcctcctgtctccttaaatagtaagtaccacctctttaggatttctcggattctatttagatgattttgtttaaattaaagtttagtcatagctacttgcttgcagcgcacatgtcgactagaccgcttgtatgttcggcttcaaaacctcaacttatcgtgtgtattcaattgtgttcatcttcggaacccaacttatcgtgtgtattcaattcctatttgtaatatcaaattgtttttattttgttcttacttgtttcttcgatttgcttgtaagaataaagttgatctgcaccggcaagatccaaaactcatagatcgacacgcccgtctgttcgtcttcggaacccaacttatcgtgtgtattcaattcctatttgcaatatcagattgtttttattttgttctagcttgtttattcgatttgcttgtgagaataagattaatctacaccggcaagatcaataactcatcgagctatttacaatatcatattgtttttattttgttcttgtttgtttcgtaggaataaggttgatctgcaccgataaggtgtatcgatcgcaaagacgcaacactaacatcttgtatggttgtatcaggttgtcaacgtttctttcaaatcatagttatctttcaacttatcgaaagatcgagctcaaggtttatcacatgatgaaacggttcgatagatcatcgaatggacggttgatccatttatttcctgtagggcataaaatcagtccgagcaaacaattgttttatgcaagtaaggagagagaaatttgactacaaattgccatttcaggcgtacacatggacatggctttttttttattacacagtgatggctggatatgcctggatcaatagaaagggacggagtctgcactaaattatatcaaacagaaaggtaaaaagaagacgctcatcacagcaaaatggcatttcgtattacaaatatccttgaaacaagtaacctatggatcggcttatccaactaaaacgggaaaattgttgatcggttgatacattagtgcaaaactgtgtctgccatgcccttcgaagttccaaagaaccgtaatgttttcatgcaagtgcgaagcacttgtctggctgcctagaaaaatccctgaaggacaagtcgatatctaacttaatctgacttgtcagatttctcctccggctcctcttcaattggaccaccttcagtgacaccaacttccgcaggacggagaacacgatcatgtagcatgtagcccacctaaaaaagaaaagaaattgttaccagtactatcaaggtagcagcattggaggactgaagatattggtgcacaagtagaaatctgggctggttgtccagggaatcactttggatcattcccattaggaatttctggggtttcgattgccttggtaatatttcatctttaaacagatcaaagtgtcaccaggagctgtgggggcatcaggacaagataaaaatgtataattgaaatacgcaatggttccctggtaaccaaacttgtcctaaactaagagtataatatgcattgactagcattagctctgtaaaccttgcccgtatgtactcctagtaatagaggtagtttcctaacaggtgccatcttttagcagaaagaagcataccggcagacaaaatcccaacagaaaatgaataaaggagctacaaatgtgagccatgtttaaataatagaataacagaaagcaaccggctattaaaaatcctcatctaccttgagttatttactacacatacctccatacatatacttatgcagttttaaggatagactatccacttaatgttattctgatggtgtaatattggaagtaaccttgcttagtattaaaaatacagacttttaagtcattcttaggctgttgcagtgtactttcctcattgttatcttaactaatgatatgcacatgaaacaatttattatcatctctgtatttcatctcattctgcagcctagacaaactctatcaagtgatttgatcgacataactataatagaatgtgatatacaaataggcaactttaaaccaacaaacattgaggttaagtaccggacttgaatgagctcttatttcagaagagaaagggggtaaaaaccctataccaaaattatcggaagagcataccttcacaacagccgcaacagttcctgatggttttgaaggatcaggaatttggaaaagcgcagcatgcttatttggatcaaatttctcattaagtggatcaaacttttccactccaaacttcttgaagacctgcacacattaaatgttattgcctttttgctgcataaagatgtaaatttgtgtaaacacgcaagcaacaggatcaaaataagtttgaatgcatgttaccaacaaaagatatgataatgtctaaatcattggcagcatataatcattaagacagggaccataattccaattcacagttgttacgaccaatgcatggaaagttgttgaaatacctccccaagttgcttttcggtcatctcaacaccctctaatagggtgtttagtagcttcactgcttcagcagattcattagatgtatctatctttgagaagctctcctttacaacagatgatgccctagataaattgtctgcaacatctaacaagctcttggagaagccctacagggatgaatagacgtgagctcatttccaaagtaaaacaagattctaaaaaatcatgaccagacatagaatacagacctgtactgcatacttctttgcattatctgattcacgctttgttctcgcaatgacgttctccatctctgcatagctgcgcaaaactttatccttcatgtctttaacttcttcattcttagatttcaacaattcttctttctccagaactagctttgtcaggtcctcctttgacaggtcaaggtcttctgtatctgaatcagaaaatgcagttcgtttagtacctctcctcctcctgttagattggggcacagaatcttgtgaacctgcttgagatgcattctcggttccaggagaactattggtttcatttgaagcttcagattgagtgcttttattaactccatcctctgtctgtttatttgctgccttatcatcttgctggggagcagaagatgaaaacccaaacctttgaaaggttgaagttgagtacagcctcggctgattcagcagaggcaaggcctgagcgtagaaaaaagggaaaaattatccaacagtccggaagatgaaaaacaagaccaaacaagaataccctgagcaatgctacaaatacaatggatggtgtcagcttattatgcctgaaacacctaatgagccgatgaatcaacataacaggctgcttccagctttagattttaatagctagcttatgccaaaggctatcagaaatcgttatgtcatcagcaacacgttactaatgagaattgagcattaattggtacttcgcaaattttgtactgttattaagtatccccagttgaaacaccgcagtattcccacaacgtatgaacacgagctactgagcaaattaagtttttaagtttagcgcaaatcatgcatcaatcgatcttaaccagtacctcagctgcccaacaaagaaaacattaggacaaaatagcacaaagaacttgtatataaaatcaaacttaaattctattaaaaaaaacccatcaatagcgaatcgagtttagattaaatcaaaaaccttagagaaccccaatgctccccctagttttccacgcacaggatacccgaacaaaaaaaaaagcaacttaatcgacggatgcatctctaaaaccctaatctcgcaccaagattagcaaccccacgacggcttaacccttcgaaaaaaaagcacgacgacacacacacacacatcgctccatccgactcagacgagggaatcgaaacccccacccccaccttgatcgaagagcagggcggggccaagtgccgccccgccgaagcgccgagcagcgccgccgcttccgcctgccgcctcgccgccgcggccgaggccacgccctgcctcgagatacgcgcgaggagacgcgccgccgcagccatctctctgtctctctctctctctcctctactctccttattcggtcgtcggcggcggagaagagaagggaaagaagaagaagaagagaagagaagaaaatcggaggcgaagatttcgcggcggcgaagggtctggaagggttttgggggaaaagctggagtggggatatttgtggacaaagaccgttctacccttagtaggtttaacgtgttctggcaatgaaggcaagggtagttgtgtccgtttcgtttcctcttcgttgacatgtgcttgtcgtgcaagaagggaaagcgtgtggtttatactcctgtgctccaattcaaatggtaaaatctaaatcgaaatgcctctctatttagtcttaactagaaaaaatatccatgcattataacgggtaaaagttattttaatcttattattatttactgtgaaatacactatcagaattcgcttggatatatatattttttaggaaatcatgtaagttagcatacaagttgttttgaaagatttcttatacgaccttatgtatttctaaaagtgaacaacttgaaatccgactcaaatacggatctgcatttccaaaagaaaatgaaatgtattttccaatacggttaaaaactgacttatacacggatgacgtaccaaagtattggctaaaacatcttcaatttttataataagtagagatagaagatgtcacatacatcagataagtactactatacatctatagacatgcatatcttctttgttattatgtcatacatatctttttttccttcttataaaagttttcttaaattacttatctgatccataatctgattgtaccattgtgttcgttataattaaatctttgtaacaagatcttacatgaatatttttatgataaaaatatttatatttgtaaattacttttattatatatgtaagttacttttatcatatatataaattacttttggatttgattaaattacttcttatacattcataattctttgagctgattacttttattactgtttttagccaattttatattttatgttggttaaacttaatttctagatagactcatgtttttatccctataacgaatttacttctaatgttgtaacgacttacttccattttaagttaagttacttttatgatttatgcaaattactttcaaactttattggttttacttttataaatgtatttacttgaaaatcttctctacactttgcttgtggatttactccacatagtttcttacttcaactcaatcagaatgtaatttcttctaatgttatagagagttgcttctattgcatagctaagtaacttttacaattcaaataaattatttttaaattaataaaatgttagaatatattcaacatggatctcattttgtcacatattttgagtagagtacaatgatgtaaataaatcttaaaaataatatgtgatttaaaatatataagtcattaaaaaggttaaaaaaagatatgtaccataggctaaaggaggatttatatattggatagaatggtttccgattaggactaacgcactgccgtgctctacctagtcacatccaattcaaatagcctcttatattcctcgtctcgtttatatacttataaggacatgagcagtgtataatgtttaaatgggtcttaaggtaagtcacacatagacctcattgagctacagcacttatattagaatgtatatgactacgagaggtgttaagatcggacccaccttttaccatctcaaccacttctttttatcttcccattcaatctcttcttctccaccgaacaagagagacacaactcacaaatctagcagtggaaggagctaggtcgtggtgacaacggctacatctaggaggaggtcgtgacgaccgcagcccacgggatgaggtgaagcagcggcggtggtggcctaagcgctcgcaggaggtcatggcaatggcggcctgtgggatcaagccacaacggtcatggtggttcaggttcgcaagaggaggttgcgacggcgtggaccgcaggaggaggttgcagcagcggcaatggctcacaggtgccctcctcccttttcccatggcggcaagcaatgaagagagaagagtgtgctagaggagagagatgaacaattgttttttattccttatggctaggcattagccataagggtagctcaaccaaaagtccgctataaatactactcccacaatgtatatagactacttaggaggcttaagaccccctctatttccacaatgtggtcgctctaagttaaaacttaaatataaagtaattttatattgttttgatcgtagattatttatatcattcgcttttgagtcactaagcactcatacataaaattttacccataaaatatattttgattcctaatagacactatggataagcataagttaaacaatgggatttctaaccagaatcattcaagggctttcaaagtcaactaaaagaattttttttaaagaaaaatcataagcgtggtactaacatgtttgggggagtttctagcagagctccccaaacagtctaagggtctgtttgggggctacagcttctcccataatcataagcttccccccccacccaaacagtttagctttggttccaatttttcaaaagctatagtggtagaatctaggaaataaattagaagctaggaagggactacaaatcgggtgcccgatttataagagaaaattagcgcactctaccgcgttactcctgctcctcgtttctttttttttctctactgcatacattgctcctgctgcatgtttgtttatgtctctgttgcacatcttcttttcccatgctatgcatgcaggagtcctctacacatgcatggctgcacggtgcaccccatcctttatataattaatatgcccccgcctctttaaatgatttttttcatctaaattaaaatcatatttacgaatcgattacaccattgtactccttgcaattaaatctttaaaaaataagatcttacacaattatattttgatgagaaaaaaacttatatgtttcaccatgcttaatcaaatgttccaattaactttataaaatgtttaggaaggtgcaacattagaaaatactgattgcaacatcaacaaccattgtatgaaacattgagtcctaacgaatgaaacatataatatatttgcaaacacttgatattgttgtttttttttgtgactactaaaacattcgaagaacaccacgtgcaacatttgcaatcaactaatgaaacatcctaaaatactagtcggaacatccgagtaaaaccacatgcaacatatataaaaaaaatccattgaaaaaagagctaaatatttttctattagaatataatcatgtaaggttttattggaaagatttaattacaatgaatataacgataaaatcggatgatagatcatataaatactagatgagaacaaatattttaaagtttcttaaagaggctattggttacatgtggaagaatatatagccaaagtggagaaaagacacgttgtaaaggacagagcatgtagagcctctgctgcctttggcgcagcagtagtagcgtgtggggggagggcgcccgatttttcagtatggatcaggaggccgacccgaatcaatctcctagaagatatagtagaagttaagaaacccagcttttctagattatcataagctagctatcaaccatcttcttcttagaatctctccaaataagccctaaattttcactcagattctgagaattataattgtagaatctagaaaatgaactagaagctataagatgtgaaagtcatctttcaaaaaaaaaaagtgaaacccagtttttcataatacatagttgtacaatctagaaaatgaaaaatgatatggaatacgttgctattaggaattcacaatgtgtgagtcatctagcattatttttttggggggataatgatttcatgaaacataattttcacaagaagtgtgctttgcatgatctgaactcatataaattacttatctcatttggttttccaggccgtccatgcctcatggtaggcgactatcaatgattgatcccctctactacgaagttcacttgctacacctatagtccatttacacttcatctttgttggccactagctcagtttagaatttgttcaaacacaagccaccataggagatgcaataaattcgtcatcagcaatgtcactatctaaaggccattgatattcaaggggaaaggaagaaacatgaaagagaaaggaggtagaagtgggcaaaaataaccaaaacagctttttaaatatagggacttctcttatgctatttgtcgaactacaaataatcaaatatgtgtagtgtgtaaaataggtgaatgggttatgtgtgatttgtgatgcccctctttgttttccttatgtttgttatgtagatcttggcgcggaatcttgatgataccttcttttaaccattgaacattaagatgcacctttagatgctttcttgtgaaagtatattctccataataccacttttctcaataagatattgtcctattttgaatagtatagattctatatgaaatagtatttatcagtcatgataagactatcgcaccttaatcgtgcctcacacgtataggaaaaagtggagcaagcgagtgtatgctaattgacgctgaagagatcaagttttcctatattagatccaaccatatgtcacactattatgttttttctctttcaagagcttgaaataacacgtactcctatttcattagagatacatgcctctcgtattcataatcgtatgatcaagtcttctatttagagtacaaacatatacaattaaatgtgtaacagagtagaatggaatggagtgtataacgtgctatgtgcgagataggtgaacgagtgacgtgtgtcctatgacacccctttttgctttctttaggcttattttatatatatatatatatgtatatatatatatatatatatatatatatatagtaaatttgtttggtgctccatggtgcccgggcaccattgttgaaattgagtatatacccaattcaaatgagtatgaatctttttcaattacttaggtattaacattaaccactttactaactagttcaaagcaagttcaaaagtttgaactgaatttgaacttgtttttgttagattttgattctaggtatatagcatccatacatatatttagttaggtatgtaatcatggattgtgaaataaagttaaatttgagttgttttgttgataggtataggtatgaatcgaattattataactaggtatatactcataatttgaaaattttgaaaaatttgagtgattttttgcatttgataccatggtgcccgggcaccatggtgccccatatgagtgtcctatatatatatatatatgtatatatatacatatacacatatatgtatacatatacacatatacatatatatacatatatacatatatatacatatatacatatatatacatatatacatatatatatatacatatatatatatatatatatatatatataggctttgacggggaatattgatgatggatactttttacatcgaatattaatgatgtgacttttgtcggtgatatgggaccgggagtatcatgactagaggcttgaggcagacacaatcgcccacgtggcctggcaccttcggggacgtcgggcccgagggtgaggtgtccgccctcctcctgatttcccccgagggggggggggggtcgggttgcgcttgccctggccccgagggccggggcaccccgaccccctttaggaagtctgcgccacgtatatgggataagtgagcacagctgtgctcacctaacagcatttattgcagtctggtcaagcgtgtcacgctgcatgcagtgcagcacggcgcgtccctttatccggtctgtgaccagtcacagaccggtcagatcacgggttaggtggcgactggcggtctgacacacgccatgccccatcccgtcaagacgaaagcctctagtcactcgtctcaagccggcgttaagcgtgttatctcttagagatgacacgttagacccggtcgatatatgccaggcttcatcttaaccattacaggcaagatgttgtgtgaagaagggcaaacatgcacgttgccaagattacacgcggtggacaagaacgaccgatttgtgaccggtctgacactgaccatatcgtcagcgcacagccatgttcccacgacgcgctcacccccggcggaagtggaggtaggtgtgggctgtcccatcggagcgtcattcggacagcaaccgtgctgatctccgcccattcaagagaaaaagaacagtccagtttggaaagagaagggtgcatgtggtatccccttgaagtataaaaggaggaccttgcccatagagagaggggggttgattctttcccagattatgagcttagaacgggggagaagtcagctgaaacttgtagctcattcatacgcagatccaccaaaacacaggagtagggtattacgcttctcagcggcccgaacctgtatagatcgtcggtgtctcgtgttttctggctggcatacgatatttccacatacagagagagtgagagcttgagatttcaccctaagcccccggccgaactggcaaaggggggcctgcgcggtctcccggtgaggagccacgagctccgtcatctggcgcgccaggtagggggctcagcgtgtgctttcagagctctcagactcttccgtgtgccccaagtttttcttgttcagcctaatggccgagcaaggaaaaacgcacgacctctcgccgagtgtgagcggcgacgacggggagccgaatccacgccgtcgagctcgtactcctccaccccctccgcgccaaagccctaagcagggggaggcgcttgagagggtcgacaagtccgcagcgtcaccggccgcaggtgatgcaggagaacggcgagacggggagcgtcgcctcctcgtctacggcgacggcagcacgcctcagggtgcgcttcaagctgctggcgcgctcctacgacacccgcctgtcgtccatgacccggagtctccagcccaacgatggctggaagacgtggccaacttggtcatgacggcacagcagcgcctgggtgctggtggacggtccgccaccaccaccaagacctccggcgccgctaccaccggctccgtgtcatcaaggcggagggcgcggcgagcggcggcggctgcacgtcattcggctgccactccctcgtctacaccgtcgactcgggaggatcagcatggggagccggatgcccgcctcaacatcgggcgccggtgtaatagccggcgtactccccgtgcaacggagggagcctcctcgtccagagtgtcaccccgacatggacgtgaagatcagccctccgtgcccccggccggtggtgttggctgtagagcctttgtggcgagtcttcggaacgtccgttggcccccaaggttccggcccaccatcaccgagaagtacgatgggagcgtcaaccccaccgagtttctccaggtctatacgaccgggattgaggccgctgggggtgacgacagggtcatggcgaacttctttcccatggccctaaaaggacaggcgcggggttggctaatgaacctgccacccgcgtcggtccactcctgggaagatttgtgccaacagttcaccatgaacttccaaggcacatatccgcgcccaggcgaagaagcggacttgcatgcagtacagcgaggcgatgatgagtcgcttcgctcgtacattcagcggttttgccaagtccgcaatactataccatgcatccctgcacacgcggtgatctacgcgttcagggggggcgtgcggcacaaccgcatgctcgaaaagatcgcttccaaagagccccagactaccgcggagctttttcagctcgcggaccgagtggctcgtaaggaggaagcgtggacctggaactcctccggttccggagtggcagcttcggccgcccccggatccgccgctcagacagggcggcgtgataggaggaggaagaagaggtcggaccgttccggcgacgagggtcatgtcctcgccgtcgagggcgctccgcgggccacccgaaaggggaggcctgcgagcgacaaaaagaaagaggccggaactcccggcagggagcgccccgccggcaggtggtgctccgtccacaacacctccctccacgatctcgcggactgtcgtgcagtcaaaaacctggctgagcgaacgaggaagtgggaggaggacaggaggcaggaacgccgtgagggcaagtccccggtggttccatccggcaaacggcgaggtgaggccaagcagaaggcccccgttgttgacatcgatgatggtgatgatgacctaggtttccaagaacctggggccaccattgccaccgtcgatggaggagcgtgtgctcacgtctctcgccggagcttcaaggctatgaaacgagagcttctggccatggcccctacccatgaggcgatgcgtcgggcgcggtggtcggaggtcgctctcactttcgaccagactgaccacccaccgtgcattgcccggggagggcaggttgcgatggtggtttcccccaccatctgcaacgtgaagttgggacgtgtcctcatagacggaggagcggctctcaacatcctttcccccgcggcctttgatgctatcaaggccccggggatggtgctccagccgtctcaaccgatcatcggtgtgacgccggggcacacgtggccattaggtcacattgacctaccggtcaccttcggtggacccgccaacttccgcacggagcgggtgagcttcgatgtggcggacctcagtctgccctacaacgcggtcctagggagacccgcgttggtgaagttcatggcggcggtccactacgcctacctccagatgaagatgccgggccccggtggccccatctctgtccgtggcgaccttaaagtcgcgcttgcttgcattgagcagcgcgcggaccgcctcgctgctgcgtccaagcccgagggtggtgacgagaggcttggcccttctgcccccaccgccccgaggcagcggatggccacttgcgacgaggtcccggtcaaggaggttgccttgggcgacggcccatccaagaccacacggatcggtggttttctggatggcaaataggaagacgcgctcgtctccttcctgcgggcaaacgctgacgtcttcgcatggagaccagcggacatgcccggggtccccagggaggtgattgagcaccgtctcgccgtgcggccgggcgcaaggccggtccggcagaaagtgcggcggcaagccccggaacgtcaagctttcatccgcgaggaggtggctagacttttggaggccgggttcattcgtgaggtcatccacccggagtggctggcgaacccggtggtcgttcccaaggcgaacggcaagcttcggatgtgcatcgactacaccgaccttaacaaggcatgtcctaaggatccttaccccctgcctcgcatagatcagatcgtcgactccactgcggggtgcgaccttttgtgttttctagatgcatactctggttaccatcagattcgcatggctagggaggatgaggaaaaaactgcgttcattacccccgtaggaacctattgttatacatcaatgcccttcgggttaaagaatgcaggtcctacttttcagcgtactactcgaatttctttgggtagtcaaataggacgtaatgttgaggcgtatgtcgatgacttggttgtaaaaacgcgcaaccaagagaccttactttcagatctagcggaaacttttgagaatctccgctccgcccgcataaaactgaaccccgataagtgtgtgtttggtgtacctgcgggtaagcttctcgggttcttggtctctgcccgaggcattgaggccaaccccgagaagattcgagctatcgagcggatgcgcccccccagcaaacttagggacgtgcaatgcgtcaccggttgcatggccgccctaagtcgtttcatatcaaggctgggagagaaggcgctacccttgtttaagctcctcaagcgctcggggccgttcacttggacggaggaagctgaaaatgccctcgcccagttgaaggcgtatcttagctctcctccggttctagtcgccccggagccaaatgagtccctgctactttacttagcggcgaccccccaagtagttagtgcagcgttggttgtggagcgcgatgaggacaatcctcattctgcgcacccccgctctgtgccgacttggcccgggagcaggcagggaggagaggcccccgagtcgaacggtggccccaggcccccgacgaccggagtcggccctccacccgcttgtcaaacggcgctgggtgcccccgaccctcaggaaggccccgaggccactgagggaaggctgcacttaaagccctttggccccgaggctaaccctgtgctgactcgacccgggaaagagcagggagaagaggcccccgagccgaacggaggccagaggcccctgacgaccggagttggccctttgcccgcttgtccgacgatgccaggagtccccgacccccaggacggccccgaggccactgtgggagggccgctcctgtcatcctccgaccccgaggtcatcagcgcagaagacgagtgcgccccgaggggccacttggacgaagaacgccccgggggtacggcccctaacgaggaggatcggccccgccgaaaggtgcagcggcctgtctactttgttagtgaggccctccgggacgccaagacccgatacccacaggcccagaagatgctttacgctattctgatggcctcaaggaaactgcgccattatttccaggcgcatcgggtcactgtggttacgtcttaccccctcggtcaaatcttgcataatcgagagggtacaggacgagtggtaaaatgggcaatcgagctttctgagttcgatctgcactttgaaccacgccacgctatcaagagccaggccctcgccgattttgtggcagagtggaccccggctccagagaccgtctcaatgcccgaggccagcgcgaacccctcacagctgcctcacgccgcccactgggtgatgcaattcgacggttctctgtctcttcagggcgccggtgcaggggtcacgttgacctctccgaacggagacgtcctcagatatttggtccgtctcgactttcgagcgactaacaatatggcagagtacgagggactccttgccggactcagagtggcggctggactggggatccgccgcctcttggtattaggcgactcccagctagtcgttaaccaggtctgtaaggagtaccggtgctctgacccacagatggacgcctacgtacgccaagtgcggcgtatggagcgccattttgacgggatagagcttcggcatgtgcccagacgggataatatgattgccgatgaactctcaaggctcgcgtcctcgcgagcccagaccccaccaggcgcctttgaagaaaggcttacccagccgtcggcgcgacccgaccccttaggggagacggatgcgcctgaccggcacccgaggcccgtcggagtccaggcctcgggacccgaagagagcgttccaagctcccttagattgattgcttggatctctgagatccaaacatacctcacagataagactctacctgaggaccgcgaagggagtgaacgcgtacaacgcatttccaaacgctatgtgctggtagaagggaccctctatcggcgcgcggctaatggaatcctcctgaagtgcattcctcaggaacaaggcgttgagcttcttgctgacatccatgagggcgagtgcggagcccattctgcctcgcgcaccctggttggcaaggcctttcgtcaaggattttattggccgacagctctcaatgacgcagtcgatctggtccggcgatgcagagcgtgtcagttccacgccaagcaaattcatcagccggcccaggccctgcagatcataccactgtcatggccatttgctgtctgggggcttgatatcctgggaccgttcaaacgggccccgggcgggtttgagtatctgtatgttgcgatcgacaagttcactaagtggcccgaggcttatccggttgtcaagatcgataagcactctgctcttaaatttattaagggcatcacggcccgttttggagtgcctaaccgtattattacggataatggcacccaattcactagtgagctcttcggcgactactgcgaagacatgggcatcaagctctgcttcgcctcacctgcccaccccagaagcaatggccaagtggagcgcgccaatgcagaaatcctcaaaggccttaaaaccaagaccttcaatattctcaagaagcacggcgattcatggatcgaggagttgccagcggtgctctgggcgaaccgaaccacaccaagccgagcgaccggggaaacgcctttcttcctcgtctacggcgcagaagcggttctcccatctgagctcaccctgaggtctcctcgggccaccatgtactgcgaggctgatcaagatcagcttcgtagagatgacctcgactacttggaagagcgaaggcggcgcgcggccctccgagctgcgcgctaccagcagagcctgcggcgctaccatcagcgccacgtccgggcccgatcactctgcgtcgacgacctcgtcctacgccgcgtccaaacgcgtgctggattgagcaaactctcaccaatgtgggagggtccgtatcgagtgatcggtgtcccccggccgggctcggtacggctggccacgggcgacggcacggagctgccaaacccatggaacatcgaacaccttcgtcgcttctacccctgaaggggggggtcgggtgtcaggttttggctcgggctaaccccgcaccccccctcgggtgtgcggggttagccgggggctaccacacatgcatatatattcctttcagcatttcaatagaagcagtttcaatttcctaaaggttgtgtctgtgccgttttttccttttgaagaatcttgacttgaaataatgtcactcgtgctcaaccttgccctcgggggctcggttcggtcggctaaaatcgccaaacggggcccagaaccgagccgtgccccggggcgtggtgaactccgggggggaatcggcaaaaacccacaatcgggtcacccatacccctcggtcaccacgttcccggcctggccagtctcgacatgcggatctccccaggcactagccccgacccgagccattcgaggaccgggacttgggcgcgagcccttattccaagctaagtcgcaaaaggaccatggcacagatcatcctcaactcatatatatagcaaaataaaactaacacaaaaatttttcatcatttctcattgcagattaagttaaaattgtacaaaaaagaggcatgaaggccttagaagaaagaacaagaaaaaagataagagtggcgggggcctgggggctcattcatatgcgcccgggtcgccggcctcgtcgccaccgccgtcctcgctgctggtgtcgccttcctcgtcggagctgggggcgaacgcaagccgaggggccgagccctcgaagccgttgacgatgtggtcagcagcatccccgacccgcgcgcgcgcctcgtcctcggtcccgggagggaactcctccagcgccatccatggggagaagttgggatcccgggcctggtaactcgccagcacgagttcgaccgccccccgggcgaggtccctcgaggatgccttaatggtcttctcgagctcctcggggagtcgctcgagaacccaagccatcctgttgaggtgcggagcgaggccttccagattggtggggggcaccgtcgtctggcctccccagaggcctgcttgccgaccggcgcgcttcatgcgggagaccgcgtcccaaagcatgccgggcccaatctcgcccgccaagcgaagggcctcggcctccccggtggaggagtccagcgcgcgctgcatgtcagcgacggtgtgttcggcagccgcgaggcgagcggctaagtcgctttcgcccgcagccgccccaccgatgcgcgcccccgcggccagctctttctcccgtgcctcgaggttagcaacccgctgctccagcgcggctctctcggcgcggacgctttcaaggttgcggcgcgcctgctcctcttgcgccgcctcgcggagggagaggctgtccgccagccgtcgcgtcgtggcctcggcctcctcgagagcccgctcccgctcggcgagtgcatcctcgcgaaggcggagcgcggactcctcctcggcgcaggcggcctcgtgcgccgccagcgtcgcctcccggagagcagtggtggcctcgcggtccatcaagcccctctccacggcgccggcatgttcttccagcgccatggcacgggcctcaagggcctcctcgcgccgccgggacgccgcttcggcttccgttgcccgccgctctcgcgcagcggcggagtcgagaaccccttgggcggcgtcgagcttgctcttcagctccgcctcccagcttgcgtgctgaagacggagggtgtcttgcgcctcgaccatcgcggtggtggcgacgagggcggcctctcgctcctcctccacctcccgggcgatctccgccagcgccgccttgcgggcttcgagctccgagatgtggcggcggtgggccttacggcccacctccaccatggcgtccaccgagcgccgcccctcctcgacacgcgcccatgcggcctcgagctccgctcgttccgctcgcaaggcctccacctgggcgctaaatccatctagcaccgcggtgtttgcggcggccaaggcctgcataatgggctcggcgctcactggggcgacgagagaagaggagaaaagccgccttggagaaaaggcgacgcggcttggccccccggaggatgcgctgggctcggggatgtcccccgggcccgtttggtcctgggcgtcgcccggtgaggtaggcccaggcgacgcgcccgcggcctcgtcgcgagccgcctcggaggatgtcgcctgagggccgcccgagggagtgggcccgagtgacgcgccagcagcagctgccgcttcagcctggcgagcccgggcggcctcctcctgggcagcttcttcggcttggcgagcccgggcggcctcctcccgagcagcctcctccgcttggcgaacccgggcggcctcccgggcggcctcttcagcttcccgaaggcgggctgcggcttcacgccggtcagactcccgcctccgctcctctgcggccgctggatcttcgacctcggactggccggacttggggcggcgggaggaatgcgacgggacatcgctgaagcagaagaaaaaaccaaaagacgaacaaaatgagtaagaaaaaacttctctttgggagaaaggtggtcgcaatgagaatgagacgaacctgcgagggggtcggttgaatgaccaccttggaggggaaattaggtttccccgggctggttccgtctcccccatcttgcggagccgcttcttcttgcgctccccctcgggctgtgacgtcggcgcagccccctccgggcgccgaccgctggtacgcactgccccgccccctcggggaggagatgggggaggtgttcctcccagcttcctcttccccggggcgtcggcagggcggctgctccccgagcccccgacgcggggcccagaagcacgaccccctcctggggcagattttttccccgggcggctctcgcccgcgccgtcgtggcccttaggggctctctcctctgaggccccgacccccagcataatggttagaatggagacgcggtcgggatcgatgcagagggggaggatctcctgaggaaggcgagacgcctccgcggagctaagattcagcaccctttggactacgatcttgaagtcctcaggagcccaatcccatctggctccctggtgggtccgcatgtagtcttcaggcccagtgtactcccaggcgctccgggcgcgccgttggagcggcgcaatccgccgacggaggtaatcgccgtacaccatggccccggtgagcccctgggatcgcaggcccgccaggcggtcgaggacggcgtcgtactcctcccccagatctaccggcgcccgccagctggagacctgcgccgggggctggctcggaagtcggaggcgcgcttcgtcggcgaggggggtgtagaaccagtcgctcttccagtcgtcccacttcttgcggaggacgcaggggatgtagcggttcaacaccggcccccgcggctggaagtagcagccgccaaccaccgatggcggtgacaccgactgcacggtgaagaaccaccggaacagctgaagagaggggcgcaccccaatgaacatctcgcacaggtgtgcgaagatggccaatgtcatcaccgcattgggggtgaggtgcgccatctggagatcgtagaactccaggacatccatgaagaaatgagaaaatggcgggaccagcccagccattgcgaaggggaggaagaagatggaccgccccgggtagtctggtgccgggcgcccctcgcccagcatcacaatctcccgaccggtggcggactccggcatgaagcggcgcggcagtccggcgtgcctctcattcacgatgcgggaaggcggcagtacactgccgtcgagcagagcagagccccgtgccatggcggtggaggaagagatgattgggaacgagcgcgtgtggcgaaagtagggcgtggtagagaaagagttagagctcaggcagcgaaggcaagaggaacaaaggcgaaaggaagggagcaaatccttttctcgatgcttttatacccttgccatcgctgggcctggctcctcgtttctcgcgcccactacctcgctccctcgtatctcgctatcttgctccctcgtttcccgtgcccacgcttccactaatcccattcgcccgcttacggcgcttgaagtggatatgcggttgtggcaatcgaaacggattgtatcgtgcgcgcgttaattacgctcgccaaccgaagcggcgttaccgtatctccgggcgagacaaatctgctcacccagattcgcgcgctgctcaagtgatgtggcagtcttgaatagaccgcccattatggacaaccaaagttaccaataccaatgtgcatggactgggaccgttggggattttgcccaactatgcagaccggtcccacctgtcaccaggctttaggagtggcgtcacacctgaccgcttcccttgggaagggaaattgctctggcataacgccgggggctactgtcggtgatatgggaccgggagtatcatgactagaggcttgaggcagacacaatcgcccacgtggcctggcaccttcggggacgtcgggcccgagggtgaggtgtccgccctcctcctgatttcccccgagggggggggggtcgggttgcgcttgccctggccccgagggccggggcaccccgaccccctttaggaagtctgcgccacgtatatgggataagtgagcacagctgtgctcacctaacagcatttattgcagtctggtcaagcgtgtcacgctgcatgcagtgcagcacggcgcgtccctttatccggtctgtgaccagtcacagaccggtcagatcacgggttaggtggcgactggcggtctgacacacgccatgccccatcccgtcaagacgaaagcctctagtcactcgtctcaagccggcgttaagcgtgttatctcttagagatgacacgttagacccggtcgatatatgccaggcttcatcttaaccattacaggcaagatgttgtgtgaagaagggcaaacatgcacgttgccaagattacacgcggtggacaagaacgaccgatttgtgaccggtctgacactgaccatatcgtcagcgcacagccatgttcccacgacgcgctcacccccggcggaagtggaggtaggtgtgggctgtcccatcggagcgtcattcggacagcaaccgtgctgatctccgcccattcaagagaaaaagaacagtccagtttggaaagagaagggtgcatgtggtatccccttgaagtataaaaggaggaccttgcccatagagagaggggggttgattctttcccagattatgagcttagaacgggggagaagtcagctgaaacttgtagctcattcatacgcagatccaccaaaacacaggagtagggtattacgcttctcagcggcccgaacctgtatagatcgtcggtgtctcgtgttttctggctggcatacgatatttccacatacagagagagtgagagcttgagatttcaccctaagcccccggccgaactggcaaaggggggcctgcgcggtctcccggtgaggagccacgagctccgtcaactttacacatagatggttctttctccataatacttctttgaacactaagatattgttctattatgaatagtgcagattccatgtgcaataccagtatttatcaatcatgattacgataagaccatcacactctaatcatatgttatacaagtataagaataatggagcaaagtgcatgctaattgctgctggagagcttttttttttctattccctctattttatattactgagtttatcctaagttaaacaaatttgtagaaaaatgtactaatatgcacaacatcaaattagtttcattaaatttgtcatcaagtatgtttttttattttatgttaaaaatgttattaattttttatataaacttaatcaaacatgagtaggattgacgcaaagttaaagtgactttgccctcagtcaaacttttttttagaaaaatgtactattccacaacacccaatttgtttcattaaatttattatcattgaatatgtttttatagtatctttattttatgttaaaaatattgcaatgtttttctataaatttaatcttggacaagattaaagtgagttatagggcctgtttggcacagctccagctccagctccaccgggagtggagctggagctcagctaaacagtttcagctccaccaaaactagaagtggagctgggtggagttctctcacaaaatgaactagagttgtggagctgggcttagacagctccacaactccactccagacctaactcctagagctaaacttaggagttgagctgtaccaaacatgcccataatataacaaagtgggcacttcaactctactctatttcctcgataaaatcatatcttactgttgaccgttgattactccgagtgcagagtgtttttatggggaaaaaacgagcggggcatgtaacctccataaataagtccatatgggtgggtcacaattatctcgtgtatgggttacacattttgaaatttactcccgaaatttgtgatatattcctgatcattcaaacttcctggaaagatttatacatctttgaccttttttaccccttttagtttccgttgttttctacacatcagatgcactctttctataaccccatgagctcacaagttatgattatgacagtccattaaaaagagcaaacgagataatagcaatttagagaaacagacaacattttctcattaactaccactgtgcaacaacaaagcatgcagttacaagtttgattatatgcagaactgcactagggtgatgaatcaccatgtgggcgagcaacatgcagatgtatcaatgagaaggatttttcccttcccaataaatagttgtcaaaatcattgcaacatctgatactgcctctacaagtaagaggtcagacaaaaaaccgggtaaacagatttcttacccttttttcccatgtacagcgccaccaattgtacaacagctgcaaagagatgaggaactgatgaaaatatgttagcaccaggaaagccaatccatgactccattctcatctttcaatcgtgttccctcaagcagcatcagcagcaaatccaggagagaagcatggctgtctttctttcatcagataaataaaccttagaatttcctgccacatcaaaaggagagctcggagctccgagggccaactggatcatggagaaacagctcttccacttgttaatctctcaccagctgaacagagatatatgtgacagcaaaagcctttgcttcatccttctggcattgagggtctatgattggtttcctggccgaccgggacttgaagaaaaggattccagcggtcaaagatgatgcgacctccccgtccaattctagcttgccaccggaatggtggagcagtagtaccactatcaataggtggatctagtggtggcctgataccagccatcttcagcttatcagggtcaattggtcttgtaaatagcattactggctcctcaggatcccgcatttcaggaacctgttaaatcatgatccaaatataaacatgacaaataaaaaattagatgagttgccatgtgaacctaaattttagtttcactatccaacaactatctagagcaacagaaattgtgcctagcaagcccatcaatttctggctgttctttcagacaaatttgggaattaggggtgaaagaagtcaaaatagataggaaaatgctcaaaaggttttctgaaccatatttttatgagaattgaaaatggtaacaaatgaatatttgaactatcagagtattagaggcggaatcattagagcagaaacatgctggctgctcgaactggtaatttagaccagaaacaccaagtcataatttgctatttcatgcggttgaccgagcaactaataagataaattcatatacacactatatataactcatagccacggatattatggaataaattcatacaaccacatgtatcattttataattatgacttaaggtgcatttagttgtaaggatgttacttggattcccagtaatcatggggtaatcctagttgattcccatgtttagttgaatcacctggaatgttaattaagaatataggattctaatacaactaagattctggtaatatgtggtattaggatcccttttgaaacaggtagcttggattactccccatcccctagcagaatcttatcattttctttctcacatgtgcatgctataatgttacattcccagtatctaattctcacactaaggattacaggggatgttaagtttcccattaatcttgctttcctgtaactaaaccgcacccttattatgtttgctatactaaacaaatactcaaaaggtagcagacatataatatgtctaaaagaaaatgtccataactacaagcagatagcctgttggtttgccccatgcatgggctggcagtagatagtgggttccaaccctagtccgataggtatttctgtggaatttaccaagcaaagccgtgcaaattccaagaaggttgtgccggttgctgggtttaacagggcatggcctagtcgctgtgtacaggcttttcactgttaggccagtgtaattattggcaatgttctccatatgaatttggtaaatcaaggaaatggtcaccaaagagcaaaatcatttccaccaccaattacgattagcctcactgtttctggttccagttctaacgaatttttattccgatcgattcagttggtagaataaggaaacagtagttggtggatcaggaatttctgctaccattttcatccctattgggaagagttgactaggaatgtattggttagttatctttgtgccttcaatagctccaaaagaagtgactgtatactcatcagtagaagtgctggttacacttagtatatgttgtgtggggtgttggggggggggggtggcaatcgtacacacccatattgcaaaacagtggtaaattctacgtcctctcattgcaaaaatcgattggagttgtgcaagaacaaagaatattgccatattggtattaatgattttttgcccatcatttagacctaaattggtaaggtagctcatttattcatgggagggcagtactacttcagagaagattttatgttaaaaaagaattaccaaaaaaaagcatacccttttgaacaaccagccattctggtggggtcttctttttagctcacgctcgcgcttcaaacgcaatggcggaacagctgatagcttattatcagggaatctaggatgaaaagcaaccgatcgtacatatggttgctcgttggccgtatcatctgaatctgcataatcatcttcacttgatccagcttgctggaggcctgatagagcaatcccatcatcaataagctgtgcctcatgctgaacaaggaataaaattgttaatcataggagataattttgcctcttaaattttatctgttttacagaaagaagtaaagcatttggggaaaaaatcctatgagactcagctacaaaactatatgcttttagacagtaattatggcccgtgtcacactttgagaagattctaaatatttggtagtgccaaaatcttggtaagtattacacatgtttggattgttaccaatgtgaagccaaaatttgatgatacagataagaaagttctagagaataatgccaaattgttcaaaggccttaccaacaatttggatttagtacaaacattcactagtactattcaaactaccaataaattgttatggcacatgttggcatcaatccaaaatggcccctagtcttataggaatttttttcccaagcatataggccgtaccaaaaaggtttacaaatactccctagaaataataaactttaagatgtgcaacaaatcccgggccatacagatcacatcaaagaataaacttatttagctagaacacataatctgatgggagctttcaggatttgccactacattgtaattcaagtatgtcactctgtgtcagtgatgtggattttggtgtgacatgtttgtgaggaagtggcaagttcctctttgtgctttccaacaagacagaatctggagatttgcatgtgatgaaaaacaagaataaaatcaacatcgtgtagccacaatgaattatccatctactacttgaacacataagggcattatgcactatcatactcacaagcaatcatcttcattttgttcgtttcttaaatatgtacactaatctactgcagaaaaaacgagggaacctacatattaagagtaatgaaaattaaacacttgcaaaattgcacttctacacttagatgccgaagccatgtatcactctttttagactaagcagggagttatgctcggaaatgtatgagatcatgtgatgaaaacgtaagtcataaattagcatttttctttccaaaatcaaccaatacttactagcaacatcctgttacacacctaccagaactttcattttgtttgttattcttcaacatgtaaattcaaattaattgctagtgcattaaatggtagaaaggaccaaaggacagaaggcatttcatatagtttaataaagcattatctaccttgtatctcatctggatacgtcgaaggtgaacctcacactccatagtctcacgttttctctcttccctctgcgaagaggatgagtgcacggtttagtatttctcatgccaaaattggcattatttaatgcatttgcataccttaatcaatgcgcccattagtgccttagcctgctctagattgcgccggacctgtattggggttttaaaacataaaaataagcaaatttaaatatcagtgtacatagacaacaagtgcatatttcagatacacaccatgttgcaagcactacagaacataaaatatgatggttatgattaagatcgtgcactacacaagaacacaaaggcaccatgacaagcaaaaaaacagagaggcaaacatactgcactattcatatcaagacattaagagttatcaataattggtccttctctgctttcttgacagtcaagaagtttgctattcaagaggacagcaaaacattcgatatttaaggataagcttgattgcttgaatgtatttgcagtctaagctagtgatagtcaaccaaatatggatcttctctagaaatacaattaagaaatatagaaatatgatgttaagataatatgatcaacccctggcacatttaggttttgatctgaggctatcctggtctgcgggacccaacacaagtattcatcctttccaatgaaaaatagagaacaacaaatacagctaagacaatgtcaaaatacttgtgtaataattagaaccatagtttcaatcaagcctgtgtatatttgtgtccaaaaaggaaaatatctaaagagttcaaaaaactacatatgttttgacaaaactattgaaaacaacgtatttaagcccaccatatcacaagaatacatatttaaacaatactataacataacagcagatttaacaatgaatttatcacaaaactatagatttgtgaatttacgtttctggcactattgtactgatggaacatttaaaattatagtttgcaataactaaagccatagtgacaaattaatgttagtatgtagttctgcaacattgtgttttaaatttatatttttctgacaactgtcaaatagctgtaatgttgtaaaatttactctatctagaaagatgcacaagtcagagacttcaacaagaaaaggataacaacatgccataaaatccttggataaagaagaaatgcctatacatacgcaattccaaaaaccaaacatatgcatatttccataattatagcggctgctccttgaaaacccaactattgctgttacacttaccacacggagtttgtcgaatgattggacactattttctcgtctttgcatctgaaaaaataaatgaacataagtacacaaagaaatataggcacacgaagatattatcactcctgtgctttcttgatgactcaaaattgtccaggagtagctattgtcaaactagtttcctgtgactcaccctccttgtgtgaagacgataagccttctcccttggtctgaacacattgtatggatttgtgtcattaactggcggaggcggcttcaccaaaagaagaaaaaaacagttactctaaacagttgtgtgatcaagaaagcaaacatataaacagcggtagttttgtggtaattttctacctgaccacagttaatgaaagaaaaagtccattttactcccccaaactagtttctagtttctagtttggggtgggggttcaaatgagccaaaacctagtttaggggcttaggtgataaaatgcaatagttcgggggagtaaaatggacttttttttttctttaatgaaatatgaaacagaataataactcaagaatgtgagccaactcataaatagtgaatttaacttgcttttgaacttttccgcaactaacgaaattcttgaaactaagacctgtcattgggcagagaagcacttgagtaataataaacaaacaccacatgtttatccaattactttctttcatttttgtagacctttgtccccagtttgttcatttgaaaatgcaaacatattataagcataagccatgatgctaggagcaccttgcaggccctactatcatttttggggcaattgctcatttgaccctgttttgaagtctaactaccaatctgaccctactttttctagtttgcttatttgaccccgtttttcaaaatcgaagatgaagattgaccctactctgtgaagtcaagataacagtgttaactaagggcaaatagtcccttttgcccttgcttattttgaccctgttatggcagatagaccagcgcgctgctccctttctctgcacaccactgccgtcgcggcctcctcacctagtgccagccgagagggatgaggttgggagtgaatggatagggttgggtcctcaagggtattttggtcagtttgaatagtaatttgatttttttttctttttactaaatatatataaccctaacggtgtaatggaaatagggtaagacggtacctttgttattgaaaagtggggtcaaatgaactaactagaaaaggtagggttacattggtagttaggctctgaaaaggggttaaataagcaattgtcccttcattttttttatggtacagtttatcatatttttcactatactaaaggaaaaaaattttaaaagtagtccatcgtcccaaaagctttccatttctcctggcgaggagaaaaacagaaactgaacccagtggtcacagaagatcttgaatcctccatgattggtgaaagccatgaggaatctgttggaaaggacctgttaagatggagaaggggaagccttccaagttgaagataattactgtcaacaaaaccgccatctgccgtccaagcttcctgctagaaagctttccagtcaccataaaagtcactatccctactggaatcatccactagaggcttccttggtagagtagcaaatgtcccgtgacttatccttgtatggaagagatctggttagcaagatgggagactgggaaatggaactttgacaagcctgatggtttagttaggtcaaccctgcacctcacacagcctgctgtttcgaccatgtgcagcagcactaacacagcccgacctagttagcagcctagttattatgatttggtccagattgggctggtaggttgctcttcaaactttgaaggaacccatcaacaacagcaaaagggattttactctagagaaccactttgatcttttcaaaacttgtagtcacaaaatctgtcaattcagtaaaattgattgtattttgcgcctactgctttaaaaagagcttagataatatctacaaacatactacagtagttgacaaaaaaagttcatattatatttaaaaagtaactgcaataacaaacacagaccaaatattgtgcacaacgataagctcagatctaaatctgtacatcaataagaagtgtgtgaaacataaagatagaaaggacaatacaaggacctaagctaacctgcaaacgtcgcaaaataggcttttgccaccgctctctctgataaaggaaaaacgaatcagtacatacaatgaataatattcatatatatcaaaaaaaacatattgctattgatgacaacagaacaatctcaaatttggttttgaaaaaatataacatgttatcctgtagaaagagacagttcataatgttgtctagaaaaggaagatgcacatgtcatatgataagaatcaaaaacatataccatgttctaaagatggaatatacctttgatttccagtagttatatacagcctggaacacagcataacgaacagacaagtactgcaaagcctggataaagaaacaccttgtaaagagcaaattatagataactagcaaagtatccatgccttgcaatgtatttcaaaatatatatctaaatttcttgacttggaaattgtatttgtcaaacataatttgcaagcaaacatccaataataaaccaagccacacacacaaagatatatttatccagccttagaagatcccaacaactctaagtgatggcagattatccaccacctctaggttcttctatatagtagagattccattccaatttcaagtaatagataacaccagcacagtaatatatgttttgtgaatcttgaatacccgaagccatacctgctagctaatagagcagtaacatcagcagtgacaattctgattaaccaacccggttctccaaacaggtgtgatgcacaaaaaaaaaataggaaggccttaaagtcacatccttctagagcaaggtttattccaattggaaaggtcctctccccagacctgaccagattggtgtagaatatattcccctttttttttctacggttagttaattatcaatttgttacatctctagtacttactacattagcagatctgcttatctgataagctctgttcaggtgttttgagactacatctctagtacgttctatggtaggagatctggtaagatagaaagtactaaagatgtaggctccaaaaggaacgaaaaatcatcaaatctaacaaaagcatccttctacagaccttctgtatctattcctccatcccaaatataaggacttctagtgtttgaactttgtccacaaatataaggatttctaaagtactatggacttccctgcatcaaccacccctcatgtaattctcacccaaccttacccccaactaccctcatttaatgaggggcatcatagtgttttcccttcatcattaatatctccaaaaaaaaggcttgaagtccttatattttggaatggagggagtacatcttagagacttttactgtcaagtccacttcttctctaaattcttaatgcatctttcaggaaggtataaattaagccacttctgttggcgactctacaaaagacaaatacatctggagtcgcatgggtaaaaaagaataaagctgtcatggcattaaaagaagaagaaaatgatttgtttatttggaaaagataatagaaaatcacaaaacattcagaaatgaaaagtgtgtactttatgaagaggtaggcagattgataacaagaaaatatttagtctactgattgaactaaacttttacattgttccagatttaacaaactctattgtaatttatatgctactcactcttgtgttgctccattctgagtgctatcaattgttccttttacttttcaatgacacagcacatatacctttttatccctttttgtgccttgatggtaattggtgaagagttcaaatgtttttggaagtcatgtgactcaaatcaaactgataaacaagaaactcgccaactcaaccaagaactgcaaactacaagtgaccatgaaatttctctatgaaatattacctccatggcagaatcaagctgcagaataactggtattggtcctaaaaaggtgggggttatgatgcctgctctttctcgagctttgtggtccaatgtttccagtttgaataggaggacctccaacctgtaatgtgtattcttattagtaatgtagcaaataataccttctattcagttactacaaatgatataaggcaattattttcatgtcaagattattttactatatactagagagaatgattggcatgtgtggcatggtatagaaatgacatgcaacttttggttacaaaaaaaaaaaaactttgtcatcacttgacattttctttccacccaacattctctccctcaccactcccatttgtaggacgattagtggatggtagaaaagatggtgtacactgtatttaagtataagattgccactctcataacttattttgatgagcaatttattccttacttttcagggttcagatttttccgctcattgttatagtcttcaagccaatcttcatcttcattgtccaaatcatattcaacaaactcaccaatctcagccctggctgcaagcagtaatttctctaagaaatgcaaccactgaagatatattcaatttttatttccatttcaattattgcggtaacaagaaataaacctcctctggcacgtatgtaggatgttggctgtgcaaaggtacgagtatagtccctttcgtatgtatcaacatcatcatactgtggtgtagggtatttcttgcacattcttcttgctggatgttggatgtgcctgcaaagaaaagaagtgtttatatctgccaaactgtaaaataaggatatcatattatgatcatgcctgtcatcaagcaaactgaactatggccaaccaactagtttattctgatcttatttttttagtgcagcatctattataaaatttctcattataattaataaactctgctaggaatttaaaattagattcaccaaaaaaatatcatggcagaaatagtggctcagctcacataaggtcaagatataaacataatggctggcttgcagcttatggatgctaaacatgtcttgaatcttaaaactaatgatacaaatttaatattaggtcaaacaaaacagcaacctctggattttggggcttatactgtttgtgctttgcatgtgtccgaaacaaaaagaaaaggtttgcactttgcatagcattatcagcagttttaacaaacaactttcaaattgtcaatgattagcaagctgatcaaatttattaaccagcacccccaattattccatttctgcgcacaaaaatgaattagcaagcaactcaattgtggagtactggcagtgaaccactccaccaaaacagcaaagaaagataacgcaacactccgtgcattacctcgccatcagccgcgggctccggctgggagtgccgcagcaccggcggcgcagcccgaagcgctagcgtggtctcatcgtcctcaagctcacgcgcggacttgacgatggggagcttcttgtgaatgtcgagcgggcgcggcctgaaggagagcctactcatggccgcaacttcatcagcgaggcctcaatggagagccttcccttcccgcggggggcacgggagagcgcccgcgcgggacgagccccccgcactacgccgaaccccgtgggcgagggggtgaggggtggtcgagggcacggccgcgggcggcgcggggagcgggcgggagcggaggaggcggcggagatggcggagaggggattccggggcggtggggtggccggaacgggcggattggggagctagggttagggtttcgggggtggaggacgtgccctagggtttgaaacggggagatggagggaagaagcgggggatgaagcagcgagagagaaagagtcgaggggaaggggaaggacagagaggcttggttcggttgacggcgtattccacgagtacgtttccctcgtgtggttacgtatccgtctcaacggtccatatcctatggacacataggcttcccatgtatgcgaactatcaaataaaattctaaaataaattggacgcatactttcaatagtattacacctacatgtgaaatcttatcttcaaatttattatattttagccgtagcaaaaacgacaaaattctgatagaattttacccttaaaactattagaattttgttgatacggctaaaatataatgaatttgaatatgaaatatgtgtaaaaaatatatattttgtagaatttttcgtgatactttctaattggtgtgcacgggaagatatgttcccctttccagacaggtggtgaaaatccttttcgcgtgttattttggttacatttggtttgggggagtttgagaatgctaatggaagcataggagattagagcattttaatctttgaagaacatgggaatttgagagagattgaaatgggaaattgatcgaactcccatcgattccatcccaaccgttcatcataaattatgataataatttcttatctcaaaacccacaaccgaacaaataacataaattcccttttaaacatcccctattatttctctctagcaactaaataaggaattgacagcatgtttggttagggggaattgttaacagggatggaactttgagaggtacaacctactgtttggttggtggatgtggaagcttgtgagggatttgagaaggagtttaaagagcaaactcccaattgggtaagggcatgtaatttctagggaatttcttttctaagtatgacgagataaatctgagctttacatcatcacttaaaattcaattatcatccatactacccatgattctcatctctactaccaaataaaagactgggaataaaaaaatgaaactcccataactcactcctctaaaacttccaatcccctttcattctcttggcaaacaaaccatgggactaaaaattaaattctgatattaattctctttgtcaacttccatagttatttttcatgcccttcctgatcgttgccatacaagctgaaacttggatattgacaggaagaaatccaaataaccccatgagcttacaccctagagttttatatgagcatacccccaaaatgaaaccaatcccaacattttggatttcctttttttttttgaaaaatcggctccaacagttcccctctacagatatgcaaaaatttaatttgcaactccatatttctcgctcttcacaagctggatgtggtttctcactcccaatccgtcgatctaagggtgttagacatgtgcaggaggggatcagggactcgcaacgcacggaaagaggccaccgatcacaccatacgcgaggaggacagtgaaccaatgattctcttggtatgggatggacctatttttttattactgggagttaacatttatttatcttcttacagggatgaatctattcacacctaaaaatctgattacggattcaagaatataattttgggatgtatttttgggctttcttttggcaattatctagaccattgactcttgaactaccttatttgatctaataactcttctttttaactcataaaattttattgtatattaagcagtgtacattggaagcgaagaacattccctaaaacatcaccatgcaaaaaattaacaacagcaaacattaaggaccatatttctgaaagaaggtaaagagattgaatggtggaagcaaactctcatactatctgatacaacagtagtggatacaatcatcgggggcccatggcattgctgcgatgattgcacccaagggcctcttcaaacatgattcccgcttgacctgccagcaatccctccgactgcctccacagatttggcactaattgaggtttggggttgagtcgtagatatgttggtggcttcaccgaactcaaccgatgattgccatggaggtcaacgtcaaatctaaggaacactatcagcattcctgctgaccaaaatcttaagcttttgaaatagaaatcatatattttacattttccctgtttttgttttcatacatgaaggccttgctatcgttccatgtggagaatgccccccttatggcacggtttagtctgttattttcttttgtcagaatggattcggaccgccacttctctaaaagcatggttcttacctccctctctcccccctccttcagggtcgtccattcggtgggtgatcccttgctctcaccttcggattttgatagttctgatgatatggcgaattgcagttatcttggtgaattgacttacatgagagtcgaccatgtagacaaactgcttataccaccaataaaataaaagttatataccaagagcggatgtttactcattgactattctttttaagccatatgtgacaattttatgttctccttaatattgcgtcgtggcccaatgagtgcgttggcatgacaaaaatgttgagtcacatgttgtgcgggcaaaaccacttcgcaaaaccctagagggtcatttggaccaaatgagaaagttcaaggaacttaatacccactttaacagttcatgatgatacatgcctccaagataaacgtttagggggtatatggactttttccatattgatatgtatcgatgttgtaaatttgcttccaccgctaactaagggcctattctaagctttaactccaaacgacagcttcctcgttttctgttagcatgcttccaaactactaaacaaagtattttatgaaaaaaaaattatatatagaagtttttaaaataatcaaataaatctatttttattttataatacttaactaattatgtgctaattagctttctcctttcgcgtacactgaaaatctccctccatcgtcaataaacaaacacatcctaaataattgaagttgtgtaagaataaaacatatatataacagttaataagaagtaggttacttgaactattatatgtttctttttttaaaaaaagaagaaataacgtactcagcgcataattcaatttgaatatctggctacaaaacacaagcattttaaactctaatgaaacaacatgttatcgtacaaacaaatctaaccctcagaatataataacaaaaccatttccttaaaactaaacatttttggtgaacttagtactactaataaagttggatatcatagcattcacaaaataacttcatcctccatttcacattataagatgttttgggttttgaatagattctttcatagatccatgtatatgcttcacatatgtgtctaaatgtatatggatgttagtaaatctagacaagagatgaagagataaaaatgtcttataatatgaaacggagaaaataatacttagttaacaatgcgtctcattttgcatgcaacttataagctccctaactcagtttcgaactaagcctaagccaagagcatttacaacgctccactcttgcatgtggccttaagtatccacctcagagccgagcgatcatcttagtggcaaaagtggtcttacccaccttcatgtgccttacagaagacacaacgccctggccccaaaaggactaggatgagaggggagagaggtggctggtgacatagatgaagaaggacgcatgacttagctagatcgacgatatcagctcctagatcgaagtgaccatgatggattgatgactagacctggtggattaaggcaaccgcacctgattgagggacccaataaccacctgggattggaaagagagagcttcatgattgtgagttgcaaggggagagatggtggtggtagtgactgaggatgctgaggagatgacgtcgttgatatttggttgtggaagaggtgagggcaacacccggggatcatggaacggtaaaaggtgaatacgaataaagagaatatgatgaaggggtaagttgctccataaaatggatcattacaaaccaacatgatgttccgatatgttttttttttcaagttcttataactacctatatatctgtacctgcttaccaagtttatcatcagcataatctaatctttctttgtatgcagctagtatacgctttagatcaccgcaactacggcccacaagaccattcaattccaaccgggataagtctatttttcctccctcaactcatggccgtgtatgaatagcatccctcaaccgcaaaatcgggtataacccatcccccaactctgaaaaccattgcaaatcaactccccgggcggttttggaggtggttttgtcctacgtggcacctttgaccctattgacttactgagtcagcagggggccatatgtcagtgacaaggataaaagaaaaaggtggggcccactgtcaaccacacttatcttcttctctacgcccttctctcgctcctccggccgatcccggcggtgatgtgccaccccaccccgccgccagtcgtcgaggctgcgccccgctcttgctcggccgcccttcagcgccacgctccgctccgcctcctcctccccacccccatcccaccctatcgcctccaccgctgccgccatccccctcctcagatccagagcggaggagggcgaacgagatgagggagctggccggcaacccttggacgtggagtggcttctcactgcaggtggaccagcgcagcccgtcttcgccgctgcgtccatgtgcatgacggcctcccccctaggcttcgccgcctacactagtgcgtgccatatgggtttgcaaatatttgcaaatcgattggggattctctggtgacggtgttttgcgtgctttggcagagtgatttagtgctgatcataagcatcatagtatcatacacgcttgaaaaatcatgatacagtcgaccaaattgctgatcgatagcttagtaaatttggtcagcatggtatgccacccggcaattttctgattgatactattgttggggtacctggctatctgcagctttgttgatggataaccattgatcttgcattgttttatatccgactgcttgcttcctggagccgtttgtagatgtaactggagatggaattttgcagcaattggtcttgccactgccgtctcacgtgctgccccagccaagtctcccccgaggccggccgcacgaatcacgctatgccgcgggccgccgccggcaatccatgtgcactgatgtgcagacataggtgcaggaggaggaggggaaagagcggcggggagaagttgtcgtacatgacggtggtacgggcggcgctgctcctcctcgtggcactcagcgcactctcgctgctcgccgcggggtctcggaacgaccgccatgccggcctcggtctcgccacgcttctgcccatccacagctgtccccggcaagcctcccccagcaacatcgtcgcggtggctaggcactgtgatggcggcgagctcctagccgtcaggatcggccggaggagcgagaaaagggtagaagaagaagtgtggttgacagtgggcccaccgtttttcttttatcagtcactgacaggtgggtcccacctgctgactcagccagtcaacagagtcaaagatgccatgtaggacaaaaccgcctccaaaaccgcccggagagttgatttgcaatggttttcagagttgggggatgggttatacccggttttgcggttgagggatgctattcatacacggccatgagttgagggagagaatgtggacttattccattccaaccagacaacgaagggcccacggcgcagtcagacttgttgttcgatttcgcctcccctgcaagccagcccgcatggccagatcgccggcgccgacgcgcaaacaccctgtacgtacgcacgcccattgttcgtgacctccccaactttcccacgggcggccacccagtcccagccaccccaccaacaccaagctttcgcgtctgccgaccaagacgaacccaatttgactgccgctgacctgtgggccccacaaccaccccataaataaagcaacacaacaacgacgccgtaacgaaggagcagcagttgcagcagcagcagtgtcttcttgcagagaaagaaggaaggaacacgaaggaaggaaggcggcgacgtcgagatggtggtgctggtggtcgccacgacgtccgacgccgcgtcggccactccggccgccgcgttcctcgccatgcccggctggacccccggcccctccatcccggtacgaatgcctcgccctcgccctcgccaccgccttcttccctgcctaactcttcgcgcggccggcgcaggacggcgtggagagcttcgcgaacggcgcgggggtgcggctgctgcggcacgcgcgcgggatcgtggaggaggacgacctggacctgcggtgggaggccgccacgggggagcgcgtctccgaggtggtcctcctcagccgccacaccgccgtctccaaccgacccgcgctcaccgtccaccccatcggcgtcccgcacctcagggacggcgtggacgtgccgccgcagggcgggcgccccgggtgggccgcgccgcccaacccgcggatcgggccctggctccgcctgctccgccggatcgccgccgaccgcggcctcgtgccggagtttgaggtgattactttacttgtgttttttttttaattttgcttttttaatttcctttgtggaattggggatcgcggttgtttgcattggttgattgattgattggttctcgtttctgcagattacgctggagggcactcaccatgggccagtgaccaacacgccgacgctgtttgttgagattggtacgaaattctccacaccttttctttctggggtttaatccactgtgtttacttaattattgctcgacagccagacatatctcacaaattagattattcatagtgatttctggataatgttttgtaacttcatcttagttgatcaacttaagttcattaagtttattctttgttttttctgttcccctgattcatttttggacaggacagtttatctgtaagttgcataggctaggaattaatgcctgcaccccgtcattgatgaacgttgtattgaatcctaaaattatagggtgagatcttggattttatactgacggccgaaaggtcctctttgttctgacaccccaaagtatgaactagttcaatggttctcttcctgaatctactatatttgaaatgctatccagcagttccctgaataaaaataatataaataagtatgatatttataatagtagaaagagaaaataatcttcaaattgattcttcaggcacacagatagtttgaagtacaagtaattatgtcctctctctcaaaagaagtaatgttgtcctgtaaatgaacagtttgaatgataggtcacataaaaggatatatctgggcaacttgcgaaagaaatgtgaaaatacaattcagatgacaataaatttcaggtgatattgcacatatagcaatagtacataaacatcaacgatttgatacttaactcattatatcatgaaccattgagttatcactttttctattgttaaacaatatattttccttgcatgcccacgtgacattgatcaccaaatacgtttaacaaatttatttctttaacttgtgtgttgtaggaagcactgaagaatactggggtagacaggatgctgctgacgcagtcgctctggttagttttcccgtttgtgttccatttcagcatctgggcgtggacaatgtagatgtttgtatggtctaccatgattttcatgttctttttccttagatatctggaattggttccaactttatggtgatattattgttcattttgcatctttgtgatgctaaggaaaggacatgcatttctgatccttagtgtcctctgtgattttgagttcgtgaacacattgtatttatggtgaaaaacacaatggaactcagtcttataatacttgcagctgctatggaaaggacttggtcttggagaagaagaatctgttggaaattggcatgggtatgtttgcatcccctctcttgctctccctctctattttcgtgtgctttactatgaaaactatcaggtggagtttacccagtacaacccccccatacatcaaacatctttagaaactgttgtcctgagtggcaaatagaccgtgtttgtaccaataggtgtgtctctcgagcacttagctcttatttgctatggaagacaagcaattgttctttttctttcattcttttcatgccattgatctcagatatagacatctagtccaatgtcgatttccatactagtccaatggaaagtaagcataattttagtacatgcgaagaactctcgttatattttccaataattagcatatttgataatccaccacaactgatattattccctggaaggtaggagaccaatgtatcaccgtttaatgctaaaagaactaatttttggcacttttttgatagtataatgcacacaccgaacgctttgagattgtttctgttagaatcaaaatcagctctctgttgagaactatacataaaatcactcgcccaagcatgctcccagcatgggtactcttgactatcttgcttgtatatgtttttttaagtgaactgtttatctattataatgatggtttttgctatgaatttgagctgcattaagtctgctatattttcatgtaatgcaggaatggtgaaaaagtccttctaggcataggaggtggtcattatgctcctcgtcatatggatattgtaacgtaagcgccattttctttcattgattatgacacaactttcttagcaggatctaagagcattgatttaagggagtatatttcttcaatttttgaaagcattttcgtcaatgttatatcttgaaaatgtttcaggaaagatggtgtatgggtgggccacttgctctctgggtattctttgccaatggaggaaccgaagcagatgaatggtaaaaatgtggctgacgttggcggtatgtggaagcattccattaaagtttcatatgaagcaacaaaagcggctttcccaggaggagagattattgcacatattgatcaaaagtaagatggcttaatctatagctaacttgtgttccattagaatacactatcttttaatgaacattattctatttcatgttttgggtacacattatttaaaaattggccatcctgattcatcagtaaagattacaaaacaaccatttcaaattttgccttgacggtacacatatataattgtatccagcaatctagaaaatcatcaaatgcatcagttgagggcattcttatcactggaattttataaattgacatttcagtaaaaaggggcttccttctaagggtatggacttcttcaattgtctgactgttctgttatgttccatctgtctgcttctctgattaaaacatttgaattctaatcatcatatctgctgatagtatgcattcttttgagaaatttggcagaattttttcatttcatttttattttgcacgttgctaaataaaatcttgtttagctgcagagcacacatgcatagtgtttatcatagtaggttcaactaaaatatgcagtgtatggttgcatccaatcatttcaaacgatgcatcatgcattgatttgaattttggatagaatatgaaaattgtggtttgtacgatagaaaacttacatataaataattgatactgctgcaaaaaaatcaattaatcataagacaagtctacttacggatatttaattacatgcaaacagtgttctaacaccaccagatcaaggaagcttgcaagtagtccactaatccatatagttggcccttttacttggctaacctatttatgtgactgatttgcagtaacctgaattagtgatagagaactgctcctttgtttggttgttctaaccaaaattttgtttctatttcaggagcttcaaaggatggcaaaagaacgcaattacaagttacttgcaggagttgaacatcagggtaggaaaaccaaatgatttcttttaagaagacataacaccggggtagcagtactcttttggtgttattgctaggtaattagtatgtgtatgctaaagacctcgcctccacggccctgagataataaaattaatattttgagccctgaactcgtgagttatattgcctgtgcttccatactgctgagttttgatctctgcaccgcatgagcatcacatattcacatacgtatgttcttccatcctgagaagtcatttttgtttgttagcatcttgtattgaattgtgtggattttttacctacattagccctgtggttttggttgagggcaccctatcgaagaagggtacctataccgttcacccactgtatacgaccgttctctctagtctttctgaaaaggttttgaaatcttgtgggctctgggctcccgtggaggagaaggctctcataatttccaccttgaaattttgatgagttcttgaggcgttcttgctaccaaccttgaaagagaagtgctacgactcaacttatttgcttatgtgataatgttttgtccagctgaattcttcgtgcttctcacctcattatatttttcttcgcgattgaaaagaaggttagtataatcaccacatagtaggcatctggaagaagcttcatgtttcttttgaataattggggtcaaagaattgagtatggtagtgttttgttggagctctagcttattcgacatgactgccgtactaatgaacggcctcttttagggcattaggagtgcgtcgcaaaaatataccgttcctcgtgtgataactcagctcaagaacaccaggaacattgttagctacatgctccatggtgcatatccctttgagtggatcctactagtctttttttatactctcactttttctctcctctctcactcctctatcccttctccaccagtcgaaccgaacaaagcgaggcactggaagtcgatgcggcggaggaagcgaggcggcgaccggagtgcggcagggcccgggcggcgacggcgctgggcggtggggcggacggaggcggcgccggtgggcagtccgagcggcaaccccaccaccaccctgatcttcgtcactctcccacgacggggaccaccccttctttgctccgacgaccggcggctctcctcccaggccggcaacgcggatctggcggtacaggatgacctcggagcggccggcgagctctgggcggcacggcggtgacaacagctcgatggtgccgccctccttgtccccctcgactgccgacgcctctcctatcctctctccacaacggatctgggaggcgacgacgacgacgacagagggcttggcggctcgtcggttgcagacggcgacggcaggctaggcggctcgtcggcaagaggcgacgtcgacggtgggctaggcggcgcgcgcttgagggcgactgcgggcacgggaaggagggcgacgccactcgctccacagcgcggaagcaacgctgtgcctagcctcacgcgccctctttttcgcccaagaaccggtggccttatttggacacaagaacctcattttggtgggtccggaagcaaaggcggtatgtgtcctccatctttgccgacgtgggatggcaagggagaatgccatctcagtgtactgggaaagcccttctgtttcgtccttttggggagaatatacaaaaatttcatgtatcattgcattcagagtgaaatccatgttctgggcttttactccaatactttgagaattagactcccaataaaaaaagttaaatccatgaccataagttttacatgcatgggcaactttcttttccatttagcttgatgctggtgtgggtcctaaaatccatatatcctaattttgtttgcaaggctataaccattgtggtatttattatcttattgcaatattgtgttatactaattgtagtatctactatatcctcataaaaactattttgtaaactaaggaacaatagcttcttcttcttcttcttttctttttgtgagcatcctttgcctttgcttcccttctggtgttactgcattaatatttggtatctgcactgttcggtcaaattatttccgctacttacatttatgagttgatatatatatatcatcagaaagtgatgatagattgaaagatattctgaaaggacatgtaaggcacaagccaaatgtgaagctcttgcatcatatctcaaactaactcctgcaaaattccccgtggaactggtgcaacgtaatcttgaatatttgcccgtattggtgtacatataaaactgggtatctattatatggctgcattagaatactccgttggcattatgttcctttcaggttctataaagggaactaagcaacaagaagctcccctgggagatagaggctcaggttagctgtattgtaaatttcagaaaattgcaactatagagacactctgttattgcagcaaactgaaataggtcactaatgttgcagcaaactgatagttttgtcactacgttgcagttttctaaaatttactctttcataaatgataaatctaaagaatgatttccgttttgcttcttctgtcatgaacttctgcattgcctgtgcgggcgcaacaatctatcgtcatgtctgttggcagcaataatttctaaatgaccacttgttattgctacgtgttattcatcaacccatacaactggcaagcagtgattaatatgcgatgtaatgcgctttatttgtcatgaccctgttgcccccatttttattcgcacactgcttttcacgttaactgctggaaaagaaatttatacaaattcatattcatgaatatgcaccattttggattctaaaacaaattaaggacatgagtacattgttggagttctaattacatgatcttaagctttagtctataaacaatcaccttttgcttatgcggaaaaataattgatctactgacctgagttagaagccattaccgttcttctttcttcttcttccagagatgcctcacgaaccccttccagtgcctagatcgattgggcgattaattagggtttgagattagagagagagagagagtttggtcgtctgcctctttccttctctttctttatataggcgacactggtggggctcgggggttatctcaattagtttaggattctgttttctgtaccgatcacataaaaaacaaatttatctcttagtttgtttcttgtcaggataaggaaaccgatggtttagatcctctcctaacccttatcgacacaagtcgacaaaatcaaccaacattctccccttgattttgagacttacttacgagtttattaaataaaatagctccccaaggcaatgtgtcttcaacaacattatgcgtcactgagacaacaagacctatagctcactatagtactcaaataaactcaagcttaacttagtgggtgttgattgaaaaatttagtccccctcatccaggatctcagtaaggctctaatttacatatatacctggccagaacataatcttaattaatcttatttttatgagccttaagagtatggatccattagcaaatgcttagcttaataattcgatcctgggacatgtctttcacaaccatatcaatgtgttaggcagaaaacacacaatatgttgctactagaatagaaaactgtgtttaattagtgcacaactctcactaaaatcacatcctaagggacaagatatatactgccaaacttaatgaagagcgattgctagagcctgccaccatagtaatatagtagagcatgcaagttagcagatagtacacagatattcaagtagatagtactacatacttattgtcagttcacagagcaatgtattactaaatagtacagcatgattcatgccaaaaagaacaaaatatgagctgtacgtgcaccaaggcacaagcaccaatgcactttaattatcagcactataatgtatcatgttctatttggtaaaataacggacatgacccgtttctcatatgaatttaaaaaattaaactagtaaagtttctcttaatagagtgaacaaataagacattattgcaattgctgtgaaactaagtgtgaggtctccaacaacacttcactttcatcttcactccatcagttactctgagtgttcactcccctctttgctaccgtttggacggtgcgagtttcctgtaatgagttagaaacatgcacatcggcattgagtcaaactcactaagtattaagggaaaattcatcacaagggatttatttaatttcatttatacctttcttgactaaccacgctgtgaagcgtgtgcaatttctctgccaatgtccatctgacgcacagaagtggcagtagggacttgtacttaaaggaacagctgaagtggaggccttgatcccttcttgcttctgctcaccctctggctcactattcttattagaggattccccttgatagacctttttgcctttatcaaaggcattagtgaggttgagccggtctttaatcttctgcttttcagctttctggcgctcttcctcttccacggagtgtaagatcaattcttgtatggtccactcctctttctgagtattatattttgttttgaatggatcatagttaggaccaagagatctcatgatgatgtgcactaaaaatccatcagatattttcatatccatggatctgagttgatttgccatatgagtcatctcaaggatgtgcttccttataccacttttgccattgtaatgactagtgatcatctcatttacaagcatattggcatgagtgtcaggtgcaaattcaaaactttcttcaatgtttgccagatacatcttaatgtcattatagtcaatgattcctccaataacttctggagagatggcacccttgacataaattaagcacattctgttggacttctcccagttggctaacttcttattgtaggcccacatgagattatcatattcttcctcaattatattgagttcttcggccagttgaggttcctagggaggatcctctcttatggctaagtcataatccaacatggctaagttaataagcacattatttctccattcaacattcaacgtaatttgatccatcacgaagctgaatagccttaagttgtcctaatgctgaaaaattaattattaattaaacattagtaatgcaattaatttccattggcttaattaatcacatacaaataaatcttaattttcataatcaaacaccatagggtagaaaagattatgaaatggcagagaataatgaattactgaaaattaatatcctaaatcaaattaccaaaatcaggtagatatgatatagggcataatgctattagtaaatgacatgaaattaaagtccttagccatatcaccgttgggcagaaatggtaaaggaattaagcttagtaacaaattagagatcattgatcatatcaccgtaaggcacgagtgacggaggaattaatgcactagtggcataagtaaaattctaagtcatatcaccgtaaaggccaaaatgacaaagaaaatgaaaataatgattgacgatacttagatgtttccttaattacatcaccgttgggcagaaataattaaggaaataacaatcttaatgaaatcatctttctttctagataaacttcccgttggttccattaatctagaaataaattactcagtattgcaactgatcttaaataataagcattgccaattgcataaagttaatttacattggcttaatcgatcatatgcaaaataaacttaaaatttcatagtcaaagcaccattggtcataaataattatgaataatcttaaaattaattcctcaattatatcaccgtttggtagaaaataactaaggaataaaaaattataattgacacgcaattataataaagtgggttaaatataacttcacatcttaatgctttctagtcgaatttctcgttggttccattcgactataaataattaatatactaaggaaatgaccatcataatgatgttgacatgaaatcataaatactttctagttaaatttccattcaactagaaataaattaagtggcttaaggaaataataatcttaataaatattgacatgaaattatattaacattggtcaaatataatatcatatcattaatttctttctagccaaacttcccgttggttccatttaactagaaataattttctaagtgatcaaataattgaccataattttccagaaattttaaaatagctaagaaagctcataaatgaatttatggaaataaataaaacattaaatggcgggcttaaatataataatgcggccaatatttccttagccggcccataaaaaaggctaaaatcaggataaaatttagctaataaagatataacacattatgagaaattaaattcgtgggcttaataaattaacaataaaggcccactcttatcgaaaatccggcccaaaa

SEQ ID NO: 4800 - DNA, 60629 bp, Oryza sativa
ggtgttggttaattaaaataaatcacatggtgatccgtgggtgcatggttttgctggtcgcacccatggcagttaaggaccggttcgcgggatgccctggaagaacttatcgtacttaccacaagccagcgtgggcaacggctgggcttgtaacgtagctttcctctagccgacgcatccaggcaagggtgggcgtgatggagtttggatgggccctgcgacggcctatgcggcttccggattcacctaggcacgagaggggactgcccgttgccttgcgaggagtgggggtgaaacctgaggtgtggtgtgcttggttagagggggttatgcgaatggtcctgtcacagcctctttccggtatgtcgtggtggcatgtcggcgcacggaaacgtgttgtggggctgtgtcttgtgggtacagttgtaattaattattacaactgtttaaatctttcaacttctgttcttaaatgctcgctttatgcaaatgaaccactttagctcttctttgatgattccctgcatcatgctctgttcttaaatgctcgctttatgcaaatgaaccactttagctcttctttgatgattccctgcatcatgcctctattccggcatgacttgctgagtacagtgggtagtactcagtcttgctctacttttcccaacccccagagtgcgagtatatgtcggatgaaggtttctccgaggagtaggcttcgtccgtgccgtcgaggatgcctgtggagtggtgttcccgctgcagttctagtcaaggcttagctcctgttgtctttctttctttcccgctgcagttctagtcaaggcttagctcctgttggctttctttctttccgctgcatttatgtaaagacttttatgatgtttgtaagacttggaattctattcgggaatttctgggcgtgacaaggtgtcccgccttcccccaggccgggaccgcttacatctgatagctttcataggtcatagactgccctcacagggcaacacatatcttttctgcacactttgtcctcactcgtgtgcacccggaaagaatttcccggtcggtcacccatcccaaattgctccaggccaagcacgcttaaccctggagttcttcggagattggcttccggaaaaagcttccggaaaagaagttgcaacttgttgatatgagtattctattaatcctattaagccctaggccgggatgttacatccggcgaggcggcgcggaggcgacggtgaacgtcgacgcggccggagctcgtcggcggggaggggagggggcggagtccgaaggcagccgccaagccggcgcttcccgtccctggcgagggacggtggagggacactccaagacggcgcgcgcacgggaagaccgacgcggccgcaaggaggtgaagtggcggcgatgctgcttccggtttagggggcttcaaaatccggtatgtcaccaaacccgagcctaattttcttccatttggatttaattcggactttgtgacttagggttcttccccaaagaattagggttcttcatttggggattttaggccgattggatccggcttatggggatttcgggaaatttcaatcttgtttattcccatatgattaaccgtggggagtttcaatcttgtttatcccctaattcttgtttgctgagtactagccgaaaccttagtttcggtctaggaattttgagtgcgggaattgggaatttccctttgctaaatttaggggaatttcaatctagtttatccccttcttagcttcggcttagggttctgagtgcgaggaaattgggagtttcaatatgtttatcccaatcccttttcttctcttaatctccactgatggataatcaaaatcgaaaacttgaattaaacagcttcttcaataatttgcttctcctactgatggccgaaaccaccagtataaaagggcttaatacttaaagaaattaatccaatctaattcaaaattgctcatgccgaatcaatcttgtatttttataaggatggcttctaatcacagggatgatgtgattatgagggattgagtggactaaaaattaggctctgataccacaatgttggagttctaattacatgatcttaagctttagtctataaacaatcacctcttgcttatgcggaaaaataattgatctacttacctgagttagaagccattgccgttcttctttcttcttcttgcagagatgcctcacgaaccccttccagtgcctagatcgatcgggcgattaattagggtttgagattagagagagagagagtttggtcgtctgtctccttccttctctttctttatataggcgacattggtgaggctcgggggttatctcaattagtttaggattctgttttctgtaccgatcacacaaaaaacgaatttatctcttagtttgtttcttgttaggataaggaaaccggtggtttagatcctctcctaacccttatcgacacaagtcgacaaaatcaaccaacatacataggcataataaagatacatatatactgcacacaatacaggagtcataaattgtcaaaaacaggcttctcactgagagtgtgatgaagactgattttatagaagatttctctcgttttctgacgtgcacgcttcccgaactactaaacggtatgttttttgtaaaaaaatttctatagaaaagttgctttaaaaaaatcatattaatctatttttgaaatttaaaataattaatacttaattaatcatatactaatagctcatatcgttcgttttgcgtatcttcccgatcatctctttcaccttctcattaaactcagccttagccatacgaaaaatggggtactctgctgttttacctagcagcacaaggcttgtaaattgtaatgccttgtgctctcccgcaaccccattttaatggttcaggcttctctcataattgatttttcaacgataaagacaaaagaagttgactacctgtgtagacctttcacctgcacatggaattaatctgtcactgtaaaaaaacctagatttgtttttattccatctggacagagtagaatatgtcacatccaattctaaatttattttttttgatagagagagtatgcaggattctattgtatcatagtcctaggctgggttcgttgttgtgtgttgggaatacatttctagcgcacgaaaaattgagcggtccattagcatgtgattaattcagtattaggtaattttattttcaaaaatggatcaatatgattttttaagcaactttcatatagaaactttttacaaaacacacaccgtttagcagtttgaaaagcatgtgcgcggaatgtgagggaggtgagttggaaagttggagaaagaactcagccctagcgttgttggtcatcctattggacccgctattgatcatcgttttggtaagctgcaacaagcttagctaatcagaggagaccctctccttgggcatatttttacttctactactcaacctatggggtattaggaaccatttccagattcataatttatataaatggactcttgacattaaaataatcaattaaggtatcattagttggatttccaagattaagaatgccacttctatcaaacagataaatttgtctctcgaactatagctttaatttattttcaaggatggtcaataattagatttctactattgcccataaaattgtaggtcctgctcattcagcctctatcataaacaattgttttttggtatgggggaagtcaatcattggctccacaaacagtggtgtgtacatgtggttagggtaagtgctataatgcttcatatgttacccttaaaagtgacacatagaattgggtgatgaggtggagaagagagatgatgagtcactcctaaatcaagaggtagcctccacacaaactccaagaaggatatgggagtattataggtattggtatttgtgtattaggggtgacattgtatatattacctcttaatttatgagtgaataacatagataaatttggaggtagcaatcacatctactatagatcgtgtcactgcaatcagctaaaggaacaaagaatgagaacacacggatcatgatttgtcttggccacttgatgtctcgacctacggagtaacatcctcggccttgagctgaccttgtcagtcctcgtcacatggacactaacgagaataaaaagttaatatggttcactaatagaacatagagccatatacaacacttatactaaatgcgatatccataggtgagcatgttatccctcacgacatgatatggagtagcggccacccattatttgttaaggttggtgaagggaaagagtgtatcctacattttcttagtttatgaattaatgtgttgctttgaatagtaggatctgagctttcatagaaaaataaagttttttagaggtattctagtctttacacacttagtttagacaaatggcattaaaaaaatggggttcccaaacaaccaagatttccaaccaacatattctttagacaactacaaaatctcgaatagtctataccccgtaatctacataatcgcaatttctcccaaaggggtatggatagataatcaattagagtcatagcccacaacaagtacttcatatttagcagcatgcttcaaattttgaaggatatgagctgggtaaaaaaaatcatatatgtaattgtttacaaccttttttgtcgtttcgatatatggtttattatagacctctaatctatatcaagtagtgaatccttcctcctatggatattgcatttagtacatgtgttatatatggctctatgttctattagtgaaccacaataacttattattttcatttggtaatcattgccggagccatggattgttatttgtaacaatctagccccaagttagtttttatgacaatatgctagttgggagtttggtactaatcatgcacattatgcattacaaagagttagatctcaatggtgattcacgtggaaatcatcacccatagtctataaccgtctgtaacaacgatatagcattgtaggttccattaacaacgatatagccttgtaggtcccattatcaacccgaaacattacttaagtaacgagcaaaattccagtgcatacagggcaggctgcctaggataaaatttccatgctccatgtgtattgcgtcatatacagaaaatgttcaatcagctcaatattaactccacccttgtgaaaatccagtcaaaccaacaccaaatgggtgatgcatgtgtttatcagccatatagggaaaacttggacacatgatgtagttctctagttactatatatgttgtttgacattaactggtttgaagcagctggaagttacacacacgcgcgcgcacgctatttgctaaagtgatgatcctctactatcaatagaggcgtttattggagttataatgttaaatggcgacttttcattatattgatgcaacattgttcaatagagtgcgtagtctatgtgcagcatacaactcaacaaaatggttctatttattttccatggatctactgaatctcaagcttttaataagttgtaccgtgaaggacaacaaattagggtgtgcaactataatcaattgaagactattacaatttataaaccagataacacagtcaggaggagagaactataaagtaacttaggtctatggtgtggtagaaacatagccaacaatgatgtctcctatgtttgaacaaacatactgttagaaatatggtcataattcagcatattttaatccagaaaaaagataataaacatgacatgtggaaaccgaaatgatccagtgatagtgctaaacatgaaaatactagtaacaatagtagcatcatctagtaacatgtttaacactaaggtgattagagtaatatacccagagaacgctcctgaggatgagacattgttgttgctgttgcctacgttggtgttgttgttctcgcctcctccagtaccgctgccgacatgtccaccgttgacgcctcccccagtcaacatgttgatgaagatgaagtagacattgatgaatagtgagtagtcgcgccttgcactccccaaaaacctgatcgcccacctgtccgtgcaaacgtcgtacctgtccgtgcaaacgtcatagcagtgtgtggtttcgaaggcttactctcctaatacgtgtgcacacactcgtcaggatgggattaccgtagcagcaacaacattggaagtggatgaaacgtgtgtgtctcttctcccattctcattttataggagaaatgaaagatgaagagtaaaagagtcatggaataggaagatgaatagagtaactaattgtcatcaactatcctccactacacaaccatcaaccaaccatcaattaggagtaattgatattggttaccaattcattaatcaaatggattaattctcaaaacttttcatcccattgatatcccataagagaatgaatacacataaatttctagcatagtgagccttggaatttatttgatttaattggatcaattacccaattaaatctaacacatattaggcaactatgatcagatgcaaccatggaacatgtagattgaataaaaataatatcactatcatatattgttaggactttggtactccaaatgaatactgcaaacacaaatccagcattactgaatgactaaatatccagtgtttttcaggcagtttgataacaatggttgatacacaaatcaacacagtggttgatacacaaatcagtgcaaaagcctattgcatataaatttgtcgctagcaagccagacccttgagcgaacaaagatgttctgaccaaattcttatcattcaccaaattttgataatgcaacttggcaagaatgtattgaaagcaatgagatactctggtaacccataaaaaagatgctcgcatagtgaaccacactgtaaattaaatgaaaatcctgtataaccgagcaattgacgatatttatttactagttgatccataaacaactcctacaacatagatgagaatttctctctatagtctaatcggccatgattttacatacattccttatgttttcattcttcatgcttgtgactcacctgctgtcggtgaaatggaaaccagggtacccatttatctggcaaaaggatcattatcaaataaatagcatgctcagaatatctttaaaaataaaaaggtaaccctagagtgacgtagctaggggcccactctggtgggtcccgggcccacctaagttttcatatatgggattctccctagctgaggaggaatactgcgtgtatgactcaaatctctgagcataaaagtagcttgggacctggcttgggtcccaagcataccccaaatgcgtcttaagaatatagcctatggtctgcctcggacctggccctgtcctaggtcccagtctcaccttagtccttgtaggttctacggtcctcggcaaaaggggcgtagaaatctgcaagatttatatcttaagagaacaagctaaggtatgcttcgggcccggcctactcttgggccccgggctcaccttagttcgcatgagtcacgcactactcgaggatgatgagtgccaagacatacaaagcataaaggtgtaaactgaggtttgcctcaggcccggccttgtttcgggccccgagctcaccttggtccttatagggctcactccctctgcctagaggagcatcgagacgtacaaatcttggaatattccttcaccaacgacatcttcgagaaactcatccgaggattgccaaacttgccgggaagttgggcgtgctccatagccagctgtgaggcagtatgccccgccataattgaaacaggatcatgggggatccccaactagtctgaagttgaaaggacgtggacaagacaccagcgctgagtcacctaggactagtgacgccttggacacgcgtcacacatgcctcgcaccacttgatttatccaagcaagtggagaagcaacggtggcactgtttcgggcaagtcgggtctcgtcaggcccaccacgcaccacgtggcgagcacactggtgagatcctaactgtctcagatggagcccggggtaatatgaatcgcaagactcaaagggtttcttgaagactgtgttagggaaccagccggcgacaataagacagctgataagacaagactaatagtagattggtaataatgtgagcccctccttggactataaaaggaaggggaccatatacagatgaaagggttggattcttttagatcagtactcttgctttgtagcctgaaaaggtctccattgtacttagctgatctagagaagacaacgaacaccaacatagagtagggtattacacctctgggtggcctgaacctgtataaactcctgtctccctctctgtgcagggtagtcgggccccgtgaacccttcctgattgcagatagtccgtgcctctcaccgcaaaccccctggttggatctttactctcggggaggggtctccactccccgctgtctgagggactaccccctcgacacctgcgctggtagaaaccctacatattccgacaaactgataatatttcttaggatgttgtaaaaaaatgttcttaatggtgagaaggtacgtgcttgttctcttgttacctaatgcacctatgctgatagaggcatggaagttggtcgctcgactggcctttcatgatatggagatcaattaaactggataccattatatctttcgagaatacaaactggagaggaaaaatacagggaaaactaaagactttttagttaagagttaggacaaaggtcactaaataatggctcgaggaatagggtcaaagggaagcaggacgccacctgtgaacatcatatctgtagcacggcgtgtttatatttctttcagggataatgaggatgatgacatgaagaggaagagatagaggaggacaagaaaatacggatgattattgtaatctggagagcaccttggaactttataccttcacattttcttaagtaaatttcacgaaagcttggctgatactgttcaagttgcacaaaatcacacgtgttatgttacgctagatattgtggtgctagagcaaaatttgacagtacactaggttgggataaccattttacaaaggtttagggtgtacatagtcactgctacctatgacgggcaatgaacaggagcctatcaaagataactatagtcatctttcacaggtgtaaagctcgcacatgtcactgatgacccctcattggtgacgagtttggttgtggctcgtcacagatgtcctatgccagaccacaaatacagcccatcaaagataagtagtcatcgatgatgggtgtggctaggcggaaaagctattgggcgcgcgcgttccgggagtgcctaactaactattttagactctaactaactaaattagttttagataatgacggtaattaagataaaatttttctttttttggaagatttttttactaacagattgaaaacttttgacttaagatttaaactttgaattcaaattttgaaaattttcaactctaaatttaaatttgtaagacaaaatttgaaaactttcaacttagattttaaaactttcactcgagatttaaaaactttcaacttgagattgaaaattttcaagtccatatttgaaaattttcaagttgagatttgaaaactttcaacttgatattgaaaattttcaagttcagatttgaaaactttcaactctagatttgaaactttcttcagattgaaaaactttcaagttaagacttgaaaactttcaactctaatatttttgaaaacacgtgtcctaacaattaaaaaaataaggaaaaacacgaaaaaatagcgaaaaagatggaaaaataaaaggaaaacacgaaaaaaatagcgaaaaaaactgcgtgggaccgccagctggcgtgcgcgccagttccgtaactagcgcactcgcgccagttagcatgccctgtggttaggaggccatacctttgctatggggtgtatttcggcttgtacaagtgagtgcctcagtgatgggccattgggctctgtcacccggttttatattagtggcctagaatgtcacaaaatcacacattaactaatctgacgtgctactacattataatgcaaaaaatgcttaacttagatggctatcactctgatcaggtgaccaaagaactagcaaatttgagatatgaccaatatagtacatgttagatgattaaggcctgtgtagttcccacataaaaattttacatcatgtcacatcgaatgtttgaacacctgtatgaagtattaaatataggccaaaaataattaattgcacagattgcgactaatttgcgagacgaatcttttaagcctaattgctccataatttgacaatgtggtgctacagtaaacatttactaatgacggattaattaggcttaataaattcgtttcgcggtttactgacggattttgtaattagttttttttattagtgtctgaacactccatgcgacaccctatataatacctgatatgacacgcatatttgcaactcaaatatttccatctctatcaaaatttctattgttttttaaaaaacaaacaattaattgtcacctagatcatcccaactctataaacatgacaatcttccttcatttcactatcttggctatgcttgggtctgattttgataacaattttgttaaagttccttcggtgggggcaactggtggtatcttgattgcatggagaagcaagcttggatccattagttccggtagggttgattcacatagtgcctcagtccagttctgtcccaagataggggtcatggtgattgaattgtgtttacaggccacaagatgagatgagacgattcttttccttcatgatctttggggtattctgttgcattctttgggtcctaggctaaatcgcaggagatttaatcttgtttataaggatgcacagaagaataatgattgtttacacccaaatttggcacctaggattaaaataggaaagattgccaaaatttgtaagtctaccggtttcctccgagtgggccggtctgaccgccgtgtgttgagcggtcagaccgccggttgagggccagtcagaccggcggtgtgtggccggtttgaccggcaggtccgaatccgattgtgtttcgtcgggtctcgaggtttccttgctcgggaaggaatgtttcgggtttcctttggtttctaccccgagttggacgtggaggagggcctgtagagggcaagaccaacccctatataagggacatggccggttcattgtaaaaaaccaatctacaatcaatcaatcgaatcattttttcatattgcttttagttttctcttagtttgtccatctttgtcggtttgcgccataaaccgtccgccgatgctgcgagagtgcgacatctctttgtaggtttgtcctgaaaacctttcgttttgcccacgagatgggtagttatttagaaatcggctccgctagccgatttagttatcaaaacccatctaggtttagctctttgctagatcgaggtggttggcgactctaggatcaccgcaaggcttaaggtgctgcgatcgtgcttgtcaacttgtcaaaaaagttgccaacaatgataatctcaacagggccatgatagggacgtttaggtagtcaaggaaatccccttgcatgttagaaattatacttggtcaaataatagggactctcttactcttgtcaaattggatagaatgatcttttgctcagtagaatgggagtcacattttcctaatcatgtcctacatattgctgcaacagaggattaggatcatcgccctttgctgctagccatctacaacatttggtatctcctaaccaaagtacttttataaaaggttgatttatccaagataacgtcatgcttgtgcaacaaacggcaaagttcttgcaatctcaaaaggagccaagaattgctctcaaattttacacgtgtaaagcctttcactctgcttttcggccatttttacttgaagtcttgcataggatttagccaagtttagcgggatgttttaagtaggttgttggctaggttttctactcaggtactcttaaatgtactcacaacgtgtcaatttctcaccggcatgggcttcagcaaggagatctcgtgtccttgatgctcttcatcttggtaacgactaggtttctcacatgttgtgtcagacggtcccatgccccttgctcctgaatatgtaagacgtttaattgggccttcaaagcccattaggagtctgatgacgagaaacgcggcggcctgggagttcggcttagttccagtacaggtccaaaacgcttttaggtttagggcgtgccagttagtttgatccgatcaccaacaagaataaacaagaaaatcaatcaaattagaatacgatagccgatcagccagtaagtcgatgacatatcgtgtgaacctagccgatgcgatctgaccgaatcggctgtgaggtgtaagatgaatgaaattaagtaaacctaaaatatgttccatattttgatgataatattttataaaaacaataattctaaattaataatatgaaaaaagaagtttacgagaatttaagattaatatatgataccatcacatactaaattttcaaatgaatgtatactaagttatccttagcatactagtttgtcatataaaagataaaaattacacatacatctaggctcataagaagcttgagctcgggccgacaaagctcgtgaacttgcgcatgggcttgggctcggctcattaagagctcgatttgagctcgaatccagtccgaaacgagccaagctcgagtagcgcacaagcctcgagcttttttgacagccataattgtagtgttgttagtagtattaatgtagtatgttgtatcgtttcatgtggactcttaggtttgtagaacttggtgggataggatgaggacctagtaggacaaatcattgtagtttttagtatattttattttttaaagtctagtttagttagttattatcttatttgataattgttgttgacctgttctgctcctgcttaagtgataacaaatgtttgaaccttttgcagttttgaagcattatgcttcgacaagataattggggtaagtggagatctggaagatagttgaagaccatggagagcaggtaatagtgcgtgaaccatggggactatgtcatagatgcaaatcgatcaaaacaagcaccaaattccatatatatagtttagaaacacgctattgttctttgtttggtatatttgctttgacactcgattattgcagcccaatgagagtgttgattgagaatctttagcttttccttttttacttcgaaacaccatcatatttcaaatttaccttattagataaggtgcaatggtagcagcaaaaaaaaaaaagctcatgtcatcacatttgcacacctcatgtatctatgatgtcagtctaatggcgaatccttaattgccacttgtaagagtggcaaatagttaaaatatatgtactattttttacacaacctagcatcttcaacactttcgatgcaacattggtcaagtgatggcaatctgtctacagcatttaacagaacaacatggtctgccaattttccatggttctatttcattacaacatagttcatccggaatagtagtattgctatggacaacacattagggtgccaaagcaacaagaatcgattcaagaccattagaaagtcaaaaaaacagttaggagagaaaaaaatcaagtaattaagtacgactagtgtggtacaaacatgatcaatggtgatagctcctacattgaacaaacaaaccatgcgagcgttaaatgcaacgtgagacaaatattagtaagagagcaaggacaagtttgggagcttcctgtagctatagctactcccgaaatctcgagctccctaaatagttcagacttagtgtttatagaatcgagaaaataaaatagtagcagaggctggataacataggcagcactcaaataggttgtctatctgagctactctacggcatggaaaacacgatagataactagaacatgattaattaagtaccaactattgtaaacatgacaaattgttttatttttttaaaataaacttctatacagaaaatgtttggaaaaaaatcatcgtagtagtttagttagtgtgttcacgataaccgaggaagtagccaattagagaatctcatcaaatgatgccttagcttctctagatttttcaccaaatggatactcactagctacttagaatctctatctccaccaaatagatggcatagataaaataagaataacagcactccaaaatatagtcggcacttaggtacttagacaagtacgataagaacaaatgtagcattgctaaattattcaattaaaatagatgagtaaaccaactcataaagttatcaaagatttattatagctagtgagcttgagccttaaacgaggaaacatatttagacaaaattcttcatcatattgcatttatgcctcttggcaagaacttgttgaatgcaaggagtagatcaggatacccatcaaaaaggatcttcacacgttcaataacagtatgagtgttaatcctgcataaccaaagtttcaataaaacttgttatccacatacaactagtaacacatgagaatttcttgctccaatctatccagtcatgattttgtaagcaaccaccctatgttaatgcctattactcacctgcccctggagaaatcaatcatggtgtgtatgaatgcatggaacttctcagggtgacgcaaaaatttattcttgatggtaagaatgtaattcattgcatcttctgtcgtcaacttatgcaccttcaccgatgtacgcatggaagtttgtggcttaatggaccttcaatgataagaagataaatcaaatatagtaccattaatactcgagaatacaaattgataaagaaaaaaacaggaaaaataactagagccttttactaagaacaaaggtcaccgggaagctgagttgaagaatgatgttaatggatgtggaacctaccggtcaatatatttagtacaaaataaatcctacataacatgcatttgaaagaaatttaaaaggtatagtgccaacacaacaccatgcatatttagttatgattttctcagttcaatcctaccagcgattatttcttctctctttgatttgggagggacgagatggttacaggtagggacggacctaggttttgcggagatctgggccggcacatggcatgtttgggccaagaccaccattgggtctgttcggttcagctgggctgtggctgcacagccacagcgctgcagctctcctagcataatcttgcttcctgagtcctgtagctacagcgcttccgaactcacccattatatggtgaaagtttgctggacctaatgggctttgtttcctaggcttcgggcaatggcatgtgtgtcttgaggcttggtctgcccttaacacaggtggagcaggagcccaaaccaagcccaaaaactagattcgccactagacctgggacatgaacctcaacaaatctagtcgacgacttggattgatacccaattaataacaatttgtaatgtaaattttatattataaccatatgacacgtgaaagagtgaaaaggtactagccagcccacactattccaacccaatagcctttagcccataaagtccaactactaccaactctcctctgccctaatttgtctctcacagtcagcctactcccccatcccacaccgggccgcctccccctcacgccgcctccattcctccccaacctcatctcctccatcctccccctcatgccatccgctttcctcccaaacctcaacttcaccataatgtgctcccattcccctcaaattcaaaatgtatctcaaacaacaaaggcgtacaagagatagtcgtagagcaaatgaaggctagaaagtaatggtgaccatggtggagactagagaacaagatgaccattctaagaagaaggatttacatcatgcaaattaaaacccaaaagattttcaaacactaaatcagcaattcttcactcaatttcacaactaagacgaacaaagagtaaaacaagaagaggataacaagggatcgtagggattgatcggtctgactactcaccgtttgaaccccatggttgtgcctgccctttgatatggtctctctctccaatgatggtaatactcaatgaagacctactagactagctcaccctttatttgttaaggttgggcaagggaaggaatgtatatatccattggtaggatgtgtgctgacataggaaattgaagattttgaggggttttctagtctttacacacttagcttagataaatggcattaccaaaaaccggggtagccaaacaaccaagatttgccaaccaacatattttttaaacaactacacaaagttttctataacccgtaatctacacaatcgcaatatgtcccaaaggggtatggatagataagcaatcagagtcatagcccagaactagcacttccaacatagttggaatatttagtagcatgcttcaaattttaaaggatatgagatgggtgaaaactatcatcatgatagttgtttacaacctcttttgtcattttgatacatggttatcatagacctctaactctaatccatatcaagttgtaagggataattgttccgcctatggatattacatttagtatatgtgttgtatatggccatatgttcttttagtgaaccatattaactttttattctcatttggtagtcattgctggagccatgaattgttgttcgtaacaatctagcctctagttagttcttttatggcaattcactagttgggaaagtttggaattgatcatgctcgttatgtgctacaaatacttagatctcaacgatgattcatggagaaatgatcacccaaagtccataaccatatgtaatatcgatatagcattgtaggttgaaagaaccttgatgtcacctaagagtggtgaataggcgtttaaagcttttacgtaaatgaggaagctagactttttggatattccaaactattttcggatatttccatattatttttggatattctgaaaatctcagatttacgagcaagctagtaaagcaagcaaaaaagtgtagtggtacaagtaaggaaatgattgcacaaacaacaagtaaactactagcagcatcatcaattagctaagatagatgagtgcgcgagatatatcaccaggattcttgtaagacgatatgctcccgaagttcaaatacttgaggggattctactctccgttgaggagctcataatgagccaggtcttttccaaccctatccttgtgaggttgcacaaatgtactcctccttccactaaaggtatctcttcccattcggaggtgagatcgtaccttcacaaactccctcggcacaccacaaacaaattggtgtctcgaggttgactcctagtcgtctaggtgtcctcaactaccaagagtaacaaatgcaacaaagatttcttggagatgaattgagtgctcaaaagatcttcacgaagtcaacaccaagcactaaaataaactcaaatcaaccactctcacaaacacatgaaatccaagcttatagatcggtggagaggaagaagtgagaaagcaagactcaaagtgaatctcaaatcaacacaagataagcaatggagccaactagcttgaggttggagggtagggacggcaattttacccacgggtctgggtatccacgggtatctgtggatacatggcccgatgggcacgggcatgggtgtaatattttgcccgtggccacgcccactcgagacctgagaacgtagcagacagttgtcgagtattattttttacccgtaggtaactcatgcccgacccggtacctatgtattagctaatttttgcctacctagccatctcttaattctcacaccctttctcttggctcatttggctcgttaactagggacacatatatactcaactaataaaccctaacctaattccccattcccctctcctacccccatacccacagcggaggccggcagtggcactgatgcgggaaggcggaattggcatagtcatcatcctcgtcctcgtcacatgcagccgctgtggtgctctgcgatgccatgaccagcgacggaggtggaggaggagcggtggagggacgggaacaagctaccattgaggaggagcccgtgttgctgccgcccgtatacgaggctccccgcgtggaggcagtgcatggatgcggtgctcgccggagggatctggaccgcgacgcggagatggcgaggcgaggaggaagtgggatggaggttggaggagagtacgctcgtgagtcgcagcggtgggcatgaggcaacggctcacgggcacagtgggtactcgttgggcatgcctgtggttgacaggcatgggcacggtcacggggttttgcccgatagactttacgggtgtgggtcgtgcatgggcacatgggtctcgggctgggtatggatttgctctgcccgtgcctgacctgactcgttgccatccctagggatggggcctatttttggccacaccctcatatctgcccgaaaatcaccagagagcaaaattaactttcagaaatttctaccgtgattttcagaagttgctatagtgttttcgcaagtttccaaaaagtgtaaaaaattcagcatgagcatagtagaaaactgggcaaattagcatgttggaaattctgaaaatattttcgaaaagaaatccaaaaatcaccagataaataaactttcggaaatttctactgtgattttctaaaaattccgaaatcaccagagagcaaatttgttggtcatatcaattttggaaattcagaaaggaacttttggaaatttccaaaaattcagcgaggacgagggcgaggctgaggccgcaagggcgtgaccagcggtgaggcagtgaccacgccgaggcaagtgccgctgccgagctagcagctgccggctggggcctgcctggatcatctattcatctctgcatcatcaagtaatttgacgaactagactgtcatctcatctctgttattagtctgtaaaagtattttgattcttgaatgattgattggttggattgattattgaatcaaatacatatgtgatatgtcttttcttttgtttataaaaggaagtttttgtttcctcaattgcttcaattcctcatcatgtcttccagcaatagaaaatatgattcactgactagatgaagcagaatctcaaaagggtgcttttgatagctttgttgtaagagaaactcaggatgctactgttgctgacggtcatggtggtgatgtagaagaggtcgaggttaatgttgcccaaggtgatgcagtagaggcaaatattgatgaaggtgatgtcgataatattgccgatgaaggtcatgctgctaacattgccgaagaaggtcatgaaactcatgatggtaatattgccgatgaaggtaatgatgctaatattgccgatgccatcaattgttcttttcatgatggatgctaatattaaagttatatagttgactaaaagtatgccatgtttatatgatattagatatatgaaatttccaaaatttacggccccaattatcattttatttaggggccccagatttctggagatggccctgagaatttctctctctaatctaatcagtcatgatattatatgcggtcatcatgcattcattctttatgcttatgggtcatatgactcacgtgcggctattagaaacccctcatgatttggacgaaccaagaagtctcaggatgttatttgtaaatattgtaaccttctttttatatatatttaatatagcgcagtaggagcctctcctgctgtttcccgtcaaaaaaaagtctcaggatgttctcttcgtacccaatgcagcagaggcgaagccaggggatctggaggaacccaggcctccccaggccaataacaaccctcccccacccccaccccctcttctctttttcacataataatcatctttttatcacctagtggccatgttcagctgctggttcgcggctgtggcgcagccggcaccaacagtgccgcacgcacgcggcgcagttgccgtagcaggcttgctaaacaggcccagaatgtcaagtgtaaaatttgatatggctatggtatactgttcaaccatgaactaaaccttccatgctgtaatgtacctctacataatttctaaatgagtaaaatacacggccaatccttaaagttggagcgaggtgtcacttaggtccatgatcttgaaaaatcaaaattaggatctgtgatcttgtttaagtgactcattgaggtccaaaggtcatctgaccgggttgactggcttacatggcggaccagagtggtaacatatttgcatttcggtccctcctccccgcatccaatccaacgggagcaccggcgggcctgggaggccggcggcagacgagcacggtaccgtcggcgggcagtgggtggagcggcggtgggcaagcatggcggtgggctgcggggggagcggacggcgggagagcgcagtagcgggcctgggacgccggcggcgggtgagcgcagcatcggtaggcgggcgacggatggaacaatggtgggcgagggcggcgatgggcgaacacgacagcagttggcgggcaacggagggagtcagagaagagcttgcgaagcaccgtcgccatgaccattgtgggcgagcgagcatcaggcagcgggtggtggtggtagtcttgtaggcatcctactcctgctacaactccatccaccgtctctccaatttgccgccgccgccacggacagcgtctttgcagctagtgtgccggtggcgccgcgcctcaccgatggccagatttgccggtctcccttcctgcgggtcgtcggcggcagattcgcggggcgatgcctcgccgccggagtgatggatgccgagctccgcctagtcgctggcgctagatccagccgcagctgggacgacatccaccggtgtgcgcgccgccgcctggcacggtgacgtccacggccttagtgtggccgttgatggcttgctgccttgccggagtgcgccgagtcgacggccgatgtcccaccggagaaggtagagctcctcaagatggcgttcgatggcctcgctgcgccattcgccgtcttcctcgccgacggcctcgctgcgccgtttgccgctgcctaccagcttaacgcctcagcggtgccacctcatcgtctactgcagctgccccgatgtcgagggcacccagctctgcagcctccttaacgagctctaccacaagcccgtcgtgcccgctggcatcttgctgccgcccgacactggcgacgaccgcgaccgctcggacatgatgcggtggctcgacaagcagctagcgaggtcggtcgtctacgtcgcgctcgggacagaggcgccgattacatcgggtaccgtccgcgagctcgattcctctaggcgctacgcaacgccagcgagtggctgccggaggggtacgaggcgcggcgtggtggagatgaggtgagtcccgcaggtgcgcgtgctggaccgccacgtaagcctgtcaacccggtcacgcgttcctgtgtgcaccacacgaagaagtgattggatcggacacgggaaagcaaagagggggaggggtgcaaaatacaaatatgtttccacgctggaccgccacgtaagacagtcaacccggtcagaggtcctttggacctcaacgagtcacttaaacaagatcatggagcataatgtcgatttttcaaaattgtggacctaagtgacacttcgctccaactttaaggaccggccttgtattttactctttctaaattattagtcaatacttgcaagatggatatattgttgctcatttgcctggatgttgctcatttgccttgatctagttttttttatctgattgtttatctatttatctagacatttaactcagataatattatcatcacttgtgatatgtctccctagaacccgtattgctgaaagtgaacagtaaatctaaaaaaataggtccttgagaaggtacctatttttttatagtaaaattttgctacctcgagttacctagtacttacttgtagataataagttttacactagaaaatgtgatacctcctactaccttctgaaggatgataaattatcattcttatgataatgtttttttatgttgatatacgatatattacctttgggaagccttaaaatttgatattttttactatattttctaattgttatgatcacttgtcaagttgctcccctcatgcttagatgctggcttccccagtgaatgcaccactgatgatagaggcatggaggttgatggcttgactggcctttcatgatatggagatcaattaaactggataccattatatcattaaagaatacaaaatggagaggaaaagtacaagggaaactaaagccgttttactaaggacaaaggtcactagatactaggtcgtggaatagggtcaagggaagcatggaccttacctgtgaaaatcatatctgtaacacattgtgtttgtatttcttttggggaaaatgaggatgataacatgaagtggaagaggtagcagaggacaaaaatgtggatgattattgtaatctgatgagcgccttggaaacttatacctgacatttttgaagtaaattttaggaaagcttgactggtacggttgaagttgcacaaatcacacgtgttatgttacaccagatattgtggtagaggcttacagcctagagtatcacgaaatcatacattaaccaatctaacgtgctaatactacataataaaaataaatacttaacttaggagtactccctccgtcccaaaataaggcaacctgtgaccactcctaatacaacgaatctagacaacccttcgtccagattcattgtagattagatgaccaaagaagatgcgaccataagttctcaactcatcttcttcattttccacatgcacgctttttaaattactaaacggtatatgttttgcaaaaggtttatatagaaaagttactttaaaaaatcatattaatctaatttttattttttatagttaatacttaattaatcatgtgttaatctattggtccattttgcatgcggaggggaggggttcccgacggaaccagatcgtctgacatagagcgatctacgccagagggacatacaacgcacgcccgccgttcatttgctatctaaaggtgccaagcgagcagagagtacagagtgaagcgagacagcctcactttcggcccactccaataaaatcagcctgctaaaccggaggaatcggcgacgccgctaatgcttctgcatctcacagccgcagccccaccgcctgttagttgattagttgagtctgtttctatctccatgcatgtgataatgatcagtttagttgtgataagataggattagatattatctcttcctttatatttgttatcacatgctggtttctctcccgagttggcgcggttgttgccgatctcgtggacttctttaatcgccacggtgagggctattctcaccatatattaacgcgtaagcaacgcactgatcgaaacatgcgattgtttcctgccaaaatcctcacatggtatcagagcctgatccaatctaatctagcgatgttactcgatggcgtcctcctcctacaccaccagtagcgccaatcctctccagggaagcttggtgagtgagaagcttggaaaaaccaaccatgcactttggaaggtgcaggtctatgctgcaattcacggcgcgcgtctacaggggaacctgactggcgcaggaaagaagctagacgccgagatcgccgtcacagttgatggcaagacggagaagaaggcgaatccggcatttgaagattgggaagccgtggatcaacaagtcctaggcttcctcctcacatctctttcaagagatgtgctcatgcaagtcgcaaggtgcacaacggcggctgaagcatggacaacaattgattagatgtactccacccacaccagagcgcgagcgatcaacacgtactatgcgctcaccaacaccaagaagggaaatatgatggcgcttggtgacgagatggcggcaagcaccgggcgacctgttgaagaagaagagatgatcatgcacatcattgccggccttggcgagggctacagcgaggtcatctcagcaatgagtgcgcgccccgaaccaatgaccatgggagaattatactctcagattgttaacttcgagggtcgcatggcactctaccgaggaacccaggagaacgtcgtcaactttgcaagccgtggaggtggcggcaatggaggaggttgcggtggcggcaacttcagccgcggcagcagcggaggtgctcccctaggcggttgcgggcgcggcaacaatgccggaggtcgcgggcgtggacgagcaccaggagctgcagatcgccgaccaacatgccaagtctgcttcaagcgaggccacactgccacagattgctggtataggtatgatgaagactatgttcctgataacaaacatgttgcagcagctgcggcggcgagctcctcccatggcatcgacaccaactggtacatcgacaccggcgctacagatcacatcaccggtgagttggaaaaactcacggtgaaagacaagtacaatgggaatgagcagattcacaccgccagcggagcaggtatggatataagccatgttggcaatactgttgttcatacccctaatagtcacaacattcatcttaaaaatgtgctatatgttcctcaagctcagaaaaatcttatatctattcatcgtctagttgaggataactctgcatttcttgaactacatcgtgattattttttgtcttaaggatctagccaccaagaaaacgctccttaaaggaagatcacattgcaggctctatccccttcccaagccatccttgaagtatgcttgcaatgccaccaagatctccttccatcgatggcacagtcgtctaggtcatccctcctcgtcagtggttagacaggtggtcaataaaaataatctcccatgtttagatgtgtcaaatgagtcagtttgtaatgcttgtcagcaagcaaagagtcatcagttaccatttcctgtttcatctagtgtctcccaacaccccctagagcttgtcttctctaatgtatggggtcctgctccagagtctctagggagaaagaagtactatgttagtttcattgatgattttagtaaatttacttggatctatatgctacagcataagtctcaagtctttgaaaagtttcaggagtttcaggttatggtagaacggctgtttgacaagaaaattctagccatgcaaactgactggggacgggagtaccaaaccctaaattctttttttttcgaaaattggcatagttcatcatgtgtcatgtcctcacacacaccaacaaaatgggtctgctgaaagaaaacatagacacatagttgaggtaggtctctccttactatctcatgcctctatgccattgaaattttgggatgaagcctttcaggcagccacctatctaattaatcgagtccctagcagagttaatactacccccttggaaaaattatttcatcaaaaaccagattattcggccctacggatttttggttgtgcatgttggcaaaaccttcgtccctataataaacacaagttgcaattccgctctactagatgcgcctttctcggttttagcaacatgcacaaaggtttcaagtgtcttgatatatcctcaggccgtgtatatatttcccgtgacgttgtctttgacgaaacggtgtttcccttctccgaactcgatgctaatgcaggagctcgttttcagtctgaattatctctcttggcacctaatattattagtggggatgaacaggaattccattcatgggctaatccacttgctaatctgcctaatatgtctcacaatttgcctcaagatgctgcaacagatcaaacggccacagaagatccaactggcgctgactcccatgatgatccctgcgcccgccctgacagatctgtgcatcgctcccctgcgcgcacgcctgacgcgtctcctgtccgccagtccagtactgccatgtcgccacaccagcattcgcctgctgctgatcgcattgttttgcaggggtcaccgtcgcatcgggagacaagggggcagcagtcaggcacagcgacgggtgatgggacgtcgggcagtcctgcaacagatattgaaacacctgacaccaatgacattgatactgacgatcttgatgtcacaggtattaatcccgatgccgacactatactgcctcattttcaacagttggagattcaggaaccacaacaggtccatcccagaacaaggctacaaagcggcatttgcaaggaaaaggtatataccgatggcacaattaaatattcctgctttactagttcaggtgaacctagtgatcatctagaggctctaaaggataaaaactggagattagccatggatgcagaatatgaagcattagttaagaataacacttggcacctagttccacctcagagaggaacaatgtcatcggggtgcaaatgggtgtataaaattaaaagaaaggctgacggttcactagatagatacaaagctcgtctagtagctaagggattcaaacaaaggtatggtatacattatgaggatacctttagtccggtagtaaaatgtaacgccccgattttcgttcgggattaaaaatcattaaataatgcattttctagaaattaaataaaagttaaatcaatttaatcaagtgaaataatgggagaattaaaattttcccttaaaaatcattggccgggaatattttgcaatattctttgtgccctaatgtactctccggaattttccgtgaattttcggagctcgagaaatagttttaatagcacaaagatcattgcatcaattaaaataaaaagaaaacaaataaaattttcccctctttgtcttgggccgctttcggcccaagatcttctccctctccatcctctcgggcccagccgccctccttttcccctcctcccttctctttgggccgtcggcccggcttgccccctcctcgcgcaagtccgcttcgcctccctcatcctcctcctcttcccgagccgccgacaggtgggccccacctgtcggggtcacccccaacctccagctcgggccagcaaccgccatggccgcccgagccgtccaacgtcgccgccgtttccgcccacctcctccaccccccgcgcgcgcgcttgtccgtgggacctcgccgcccacgtccgcgccgtttccccccactctccccgcaaaatccggccacgtcgccgcctcccgcgtctctctctcccccacgacgccgccccacttcccctcgaaatccgccgctccccggccctctcctcgcccccttgagctataaaatcaatccccgtggactcctcttcctttttccccgttttcccgagtaccccacgccctctaccgagctctccacgccgatccccttcgccgccgctcgccggcgatctccagccgcccgccaccgccgctcccgtcgctgccgcgctgcgccgccgccacctatagcatcacagtgcctcgccgcaccccggcatccactccatctccctcctccaccgccggaaccaccttcccatcgcgaggccgagccactaccgccacacaccgccttcagccggccgctgccgccgcgttagccgtcgccgcacctcgccgcttgcaccaccggcttcgccgtgccttgccgcacctcggcccccgctccgttttcccatttcatcgccggaaccacctccccaccgcgctccctctctccaccactcaccgacgagctccagccgccgccaagccgcgccctgccaccgtcggcttcgctgcatcgcgtggtaccccggccgctcttccaccttcgttggagaccgccgaatcaccgccgtcgtcttcgccccgtgggatgctgccgcctccctctgctcgagccccatcagccgcctccttcgccgccatgcccctcggtgagctccgccgcctccctcttcgcctcctccgctcgttttcgccgctccccggtcgccccctcgctcgtcgggccgacgccgccatcaccattgtcgtcgtcgtccttcccgcgtcggtgagcatctccctcctcctcccctccctttctttttctctctttgcccgccggccgccgcatgcgtgtcgccgtcgcgccgcgccgcgtcgccgcctgtgtcgccgccggtggtcatccggccgcgcgccgccgtctggtcgggttggtcggcgagccaaccctcccctccgccttgcacctctaccgtggactcggtccacggtgggctagatccttttgcccgctgacgcgtggggcccgctcttttggtggacccggtccaagcccgcacctccttgacccgctgacgtgttgggcccgcctgtcggcgccggcgccccttgctgacgtcagcgaataacatttcctttgagaaaatatttaataattgcgcaataaatcgagtttaattatagaaatccatttaaatggctcaaaacttctaaaattcatatctaattcattcgaactccgaattgagccattcaaattgcaaaattcatctaaaattaagctctacatgtttgtttactttttatgtactgtttccttggtttttattagagtttttcctcgttttgcgtgccagcgtgtagtttccgtcgtttcggaagtccgcggtcgcgaggaaaagagttcggaagatcaaagtgaagaagcaaggcaagtcacacattctccttgagcatgttgatcccaatttataaatgttttaccgtttacaaataaatatgcatgttttgctaattacatgggatcagggttttcctatctgctcgcttgtgccatgtttacttgatatctatcctttgtcaaacttgggtgataaattgactagctcgtgttacttatgtgacctagctagaactatatgcttagccatgcttaattaccactagctcagtcgatgggataattgcagtattagacattctagtatcttgttgagccgcgtgctcgagacatctggccatgttacatggtcataattatccaactaaaatgcgactgaatggtgggctgtgggtgcatggttttgtgagtcgcacccatggcaattaaggaccggttcacgggaaaccctggaagacttacagtgcttaccacaagcgggaatgggtaactgcttgatctgaagtatagctcgaccctttcctaggcaccggtggcgagggtgggcgtgatggagttgggtcggccggggtgtccggttgtccagctgccggattcaccgcggcgcaagaggggaccgcccactgccttttgaggggtgggggtgaaaccttagcgtggtgtggatggttaggggagggttatgcgaagggtctcgtcacaatcactcgacatggtgacgtgtgcatcatgggcacatgatgacgcggtgacatgtcggtgggttgtgtcttgtgggtacagttgtgcacctctggccagagtaaaactattcgaatagccgtgcccgcggttatgggcgatcgaccagattcaccgtgattagtctcacacttaataaatcgacccaatgcactgtagtacaggtgggttggttgggcctgttcaacgtggtgtagcgttgatcagtggagattttaatgttactttaattactcaacagttttactgtttgctaaataaaatgttttacaaccgcctttatgcaaatagccacaaacccctccttgtatccccttgcacgtccgcatcgttggtgtggcttgctgagtacggtggttgtactcagccttgctattattcccccttttcagaagtgtagtgcttctgagctgaagatggagttagaggaccaaggctcagaccccagttgagttttgcctgtggagtggagctgaagccccgctaggatcgcctttttccgctgctgctgcttttgtttcggtgtgaggactaagtgcctcttctgtaagtattttatgctttatttacgtttggagctgtttattacttgtcgttttgtgtaccctggctggtcctggacagggatttaatacacaaaatagtctggaaatttgggctaaatttctgggcgtgacataaaagcagccacaattaggataatatgccgtgtctagaggatggagtcttagacaactggatgttcagaatgcgtttcttcatgggtatttagaagaggaggtgtatatgcaacaacctccagggtttgaggatgtcaccaaaccacactatatatgcaaacttgataaatctttgtatggactaaaacaagccccaagagcctggtttgctagactgagtcagaaattgattgaacttgggttcagtgaaccaaaggcagacacttccttgttcttcctgaataaatgggagttcactatctttgttcttgtttatattgatgatataattgtagccagttcatcagagagggcaactgcagctttacttcaggatctaaagacatattttgccttgaaagatcctggagaactacactacttttcttggtattgaggtaagcaagatacataatggtattattttgacacaagataagtatgctactgatttactaaagaaagtaggcatgataaattgcaaaccagcagctactcctttgtcagtaagtgaaaaaatgtctgttcatgaagggtctcctttgggtccaaataatgctacacaatatagaagtatagttggtgctttgcaatatttaactcactagacctgatatagccttctctgttaacaaaacctgtcagttccttcatacccccacaacagtacattgggcagctgttaaaagaatcctgagatatataaaacaatgtactaagatgggcttgaatatacataagtcagggtctacattggtcagtggattttctgatgcagattgggctggcagtatagatgacagaaggtcaacaggtgggtttgctatatttattggctcaaatctagctagtgtcatggaatgctaggaaacaaaccacagtgtcaaggtctagtactgagtctgagtataaggcgatagctaatgcaatagcagaaattatgtgggtgcagactgcttgctgagttagggattaaaagtccccgtgcaggtaaaatttggtgtgacaatcttggtgcaaaatatttatctgttaatccagtgtttcatgcaagaacaaagcacatagaggttgactatcactttgtcagagaaagggtaagtcagaaattgttggaaattgattttgtttcttccggtgatcaagttgctaatggatttactaaaccattgtcaactaatcttctggagaagtttaaagccaatcttaacctaaccgagaagtttaaagccaatcttaacctagcaaggttatgattgagagagggtgttagttgagtctatttctatctccatgcatgcgataatgatcggtttagttgtaataagatatgattagattttatctcttcctttacatttgttatcgcatactggtttctctcccgagttggcgcggttgttgccgatctcgtggacttctgtaatcgccacagtgagggctattctcaccatatattagcgcgtaagcaacgcactgaaacgtacgattgtttcctgccaaaatcctcacaccgccatccgaggacgcggcggtggcttaatttcgtcggcggcggcacccacgtccggcgctgactacgtggcccgagcagtttcacgctatgtttactattctcattagtgaagcagtgagccggcgcctgccacacttagaagttagaacaccatccaactcaaataagctcgtcgcatgcatgctgctgcatgcatctctgggaaacagatcgaaagacacaagtcatggcagagctgtattaagttactgaaccagtgaagaaattttggactgcatcactgcatttgttcaataggaaattaaagcacattgttgggtcaggatagtaatcactgcagaaacttgactacttcaatttcccttgagaagaatatcagacttgacataatgatgcaatgatgcaagactcgtgggatttgagtcgagacgtgacagtcgaccatcggccaggcagtcatgtgctcgagtggcaggatgctgatgggtggcggggcaggaggtcgagttgaagtagtacgaggtgctattggtccactcgacgttgtagacctggttgccgatcgacttgccggaggcgactgacaaggttgaggttgcagccatgggccatgctggcatatcaagagcaccttgtgaaactgctcgggattcggcgtcagcgtcatataggagagccaccgctgcggccctcgaccggccggtgaaactgctgcggaaaaaagtacaccgaaggtccccgaacttgtcatcgagttaaaaaacatcctcaaatcgtaaaaccagatatccgacatccctcaactaattaaaatcggtcacaataggtccttttgtggttttgattatggttttatccgacgtggcggctgagtcaacgtgggccccacatgtcaggatgccacgtcatctctcccccctcttctctcccctcccctctctctctctctgacttttcccggctcgccgtcgctgggatctagctcctcccctcgcggcggacgcggacgtggactttcctggctcgccgtcgcttggatcccctccccccgcggctgacgcggacgcggacttccctggctcgccgtcgccgggatcccctcccctcgcggtggacgcggacgcggacttccccagatcgccgttgccgggatcccctcccctcgcggcggacgcggacgcggacacggactctggcacggtcgcaatctgctcacgcgtggcccgccgtcgtgccgcctcaccccatcctcgcgcggccggccggcgaggggagcgcggcggagaggatggcccgcgcgacgtcagttccccagccgccatcgcaggatccatggaggaggaggaggcggccgcttgcgagatcgcgcgccttccggaggagctcctcgtggcggtgctctccctcacctcgccgtggtctgccgtgacttccgcgccgccgccgactccgacgccgtcaggtcccgcttccttccccgcgacctcccgtgcctcgccgacggtgagctctccctgccgctgtccatgaaggagctcttcctccgcctcttcgctgcgccccttctcctcccacacgaactcacggtgagatcccttgcagtggcggcgccgtcgccgcttcctcctcctcgccgctgggctactagccccggccgcggcagcgtcgggccgcccgccatgactgaggagagaagtgagagagaggaggaagagaggggtgatgatgtggcatctgacatgtggggcccacactgattcaatcgtcacggtggataaaaccggattcaaaaccaccgagagacttaaaagtaaatggttttgtaagttaagggatgtcatatatctgtttttgcggtcgagggacgattttgtaacttgataacaagttgatggatcttgggtgtactttttccaactgctgctgcagcgttctcagctatttctcgcttacctgttagtggaccgattctattacagtggaccgaaagcgaggctaggttctctccgctctctcggcaccattcgatagaaaatgaacggcgcgcgcgcgttggacgtccctttgacgtagatcgatctggttccgttcccaacccctccaaaagatacttattactcctctggtttgagaatacaagacgttttaacttttatcaaagttaaactgttttaagtttaactaagtttatagataaatatagtaatatttataatactaaattagtttcatcaaatcaataattgaatacattttcataataaatttattttgggttgaaaaagttactattttttttacaaacttggtcaaacttaaagcagtttaactttgaccaaagtcaaaatgtcttgtaacctgaaacggatggaattgatgattagacctaaattattctcctgtcgttatgtgcttgataagaaacttggatccatatcaattctagcgaatataatgctgctattgtttctgttgcactggcaactggcaagaatgatcaattttgtgctgaaatgcgcttggtttgtcacgattttgttgccctcattttgatcttggacattgcttttcatgtttgcggttggaataggaatttgtacaaattcataaatgtgtgcttatgcacaattttggttctaaaacaaagatgaagaatatctggaggtgctctttttctcctgaacataaagataaaaatgaagattaagtgtttgacgcaaaacgaggtggtattaacgtatgattaattcagttttaatcattacaaacttaaaaaatagattaatctgatatttcagagcaacatttatatagaaagttttcgtacaaaacgcaccgtttagcaatttaaaaagcgtgccacaaatatccaaaattttattaacctttttagtggaaacgaacggattaatgctagtgaacatgagcacgtcccttgcacttctctaaaggaaagacctatggtgaaaaaaaaaactgaaggcgcacacggaagcttaattagaaattttgtgatgtctagaaatttatccctcgcctcagcagaattgtagcaaacctatttttggtgattctgaaaagacattcatactagactatgtaacacaaatttttatggttcagtatcaaccaatcattaaaaagaaggaattaaacttttcaaaccaaatcttgaatcttcattctaagggcctctttagatcccctagcaaaagttttcaacctgccacatcgaatgtttggacacatgcatggagtattaaatataaacgaaaaaataactaattacacagattgcgtgtaaattgcgagatgaatcttttaagcctaattgctccatgatttgacaatgtggtgctacagtaaacatttgctaatgacagattaattaggcttaataaattcgtctcgcggtttacaggcgtaatctataatttgttttgttattagtctacgtttaatacttcaaatgtgtccgtatatccgatgtgacacgccaaaacttttcattcacccctatatctatacacagcctaagcttctactccctccatccaaaaaaaagacaaaccctagtttccgtgccaaacgtttgactgtccgtcttatttgaaaaaattataaaaaaaattaaaaagacaagtcacgcataaaatattaatcatgttttatcatctaacagcaatgaaaatacgaattataaaaaaaatcatataagacggacagtcaaagttggacacagaaacccatggtttgccttttttttggaacagagggagtagtcctctattcaaatataagcaataaaaaaatcaggccttaaaatccaattgcaacgtcagatcaatcgtttctcgaatgaaaatcgtgttcccaaattcacactccaaatttgccattcaaatccctccacctctacaaaaatttctactgttcattcgaaaacacaaacaattgtttattggatcatcccaactccatacatatatactatatgatgcccgcggatcatatatcctaactccatacatatatactagatgatcctcgtgcttttctgcgggatatatgttagatattggagaaatgatgaaatgatttagtttgaaatattatgaaaatgatttgtcaataatgaattagcatgtgtatgtttagttttataataaaatagattgtagatataattactatatgcttgcatattgagttttgtgtgcttaatgggttaatgtagcatgcttgcatgtaggttttaggagtacgaataaatacaatgcttgcatgttatgttttaggtgcttaattagtagcttaataaaaagaagggatatgaaaaatcgacaatctttccttcattttattggtctgaatggcccaaaattaagtgcagccaaagcaatcccagcgaacacggccacaccaagggaccccaagatcatctccatggagctcaccgtggacacctcctccctcttgacatgcgccgacgcggcggccatcaccttcctcaccatctcctctgcggtcgccgcgtcggccgccgcgagccgccggaacccctcgctgttcttgacggcctcgatgccgcgcgcgccggtggcggcgacgtcccggacgacggccgccttgagcagccggaggccgagcctgtcggccagcgcgtacgtgtcggccgccgtggccggcgtgacgcaccgggccagcctgtcctggcacgcctggctcagcgcgtccatcctgtacaggtccgccgcggcgagcaggtgctgcgccatgtgcacgccggtggcgtccctctcgctgttcccgggcagctccggcagggtatcgtcgtaggcgaagcgcagcatggcggcgaacgcgtcgggctccatgtcatcgatggtgatggtggtggtggcatcgtcggtgtcctgtgtctcccccatggcgcgcgccgccggcccgtggagctccgccagcaacacgggcgaacgcgcggcgagcacgcagcggtgcgcgcggaaccgctccccgcggacgacgaacgtgacgtcggcgcccgtgccgtcctccagcatgcggcggaggccgcgccgcagctcgtcgtcgagcggccgcgggccccgccgcagcacctcgtcggcgtcggcggcgaggagcacggcgcactcgaccacgaggcggtcgccgcggagcaacacccccgacgcggcgaggtcgtgctgcaggatgaactccgggaagccgaagcagccgcggcctacggtggctggacccgggccgaacacatggtacccgcagcgcgtgtacgagccgtcgtcctcgccgccgccggtcatcccgccgcggcggtagacgagggtgaagtcgacgagcacgcggacctgctccctgtggtcgctggagacgaggcggaggaagacggcggcgtaggggctgccactgtagtagccgccggggaagaagaggatgtcccagaggtggccgccgaggctgaagagaccggagatgacgggcttgccggagctgaggccggagaaggaggagtacggcgtgatggtgaggcgctgcgtcgacgccgtctcccgggtgggcgcccgatcgccggacgacggcgaaggtgcggccatgtcgagttagattggaattcgattttgcttaggtttgtcgtaataattagtaggaaaattttttgaagaggaagccgtgcttcattgatctttttgatcatggcgaattattacagtgtcctctagatatactccaagattatatcaggaaacataatatcactgtattttttttcattactactccaaattatacccgtacgttgcaacgggtaaactaaaatacccgtgcgttacaacgggtaaactaaaattataccaaatataaaaatattagatgattgagtcccactccggtgctttctactcggagtagaaagtaatttgggccattggtcgtatttaattgtagggctgagatctagttctactcccaccagtattagtattagtggaagtagaaatatggaagggtgttttcgtcaagggaaaaaaatcgcgtaggggtattatcgtatttttcagtctcttacccaccctatccctatccgattcctctcgcatcgtcgccatttcaccacttcccgtcgccattcccccccatccccgcttccgccgccgtccatctccctcgccgcctccgtcgcctgtcctggcgtctcctccccctccagcgccgtcgccttctctgctccctcgccgcactcgcccttcctcgccgccttctccaccgccagcgcccctctgtcgacgtccgcctcccccgatattggcggcttccctccgtcgaagcccttccttgtcgccctcgccgccttcgcctccgcccgcgtctccgcgccggcttgtgagcccccaccgtcgctgtcctcctcccccgccctcttgtctagcgagtcgcgtgacgtagccgcccctccacccgcctccgccggcgcgcgatgagtcctcttcgccgcgtcgcctccccgcgccaccaccgccacgttctcctccccatggaccgacgcacccttctccactccacctctgtcgccatcgacctagccgcccccttctctgaagtgtgaacatgcccttggcaaccgatttaacccagtgtaagcgatactctattagttaataggagtactactaactgtgtcatattaatcacaattcaccaattctattgtcttgaattgcagttttttttggttaatttacaattttccatctttagtgttcagatactatgcgaggaatcgagaggagacagccgagcttcaggtacattctgaatcctccaatcttaccatacttttcttaccaatattcagttatacggtatcagaaagacaacgaagagaagttggtaaagagtatcatcttctaatgcgagattactcatttactctgttgcttcagccttcattatagtgctcacctaagcagcatcttaatataccaaccactactgttatgattttgcagataaaggttgtttgttcttgaatccattgtattgtatattgattatttgattgaatggttgggagcagggtcagtttgcaagacggtggcatgcgcgaaggggatccgtatgccggcgaaggggttatcggtgttcaggtgcgacattgtagcatacgcacgtcggtgacgtcgatagctgactgcgctgagtcatcccgaagcgtaaggtttcatataccgctccttctcaaatggattgaaatatgaattatgaatattatctcaaaaaggcatcaatgtttgggatccatcaaatacccaagtagtatctaaattatttaataagggtaagagagcatagtaaggtaattgtggtaaatgtttgacagataatccatttatgtcgtggttggtagcagtggacgatctttaatgttgttcagttcggagttgatcaaaattccggctaagtcctgtcgaaatgttttcacttccttctgcataatgcaaagggagtgcattttaaatggttttttgtattgggaagcactggtgcaaaatatgaatagaggttgttgtagttgcctgtagttgaatttctgggagataagatccgctccaatgctccatgaacttaagggtgtacaggccacacgagaagctacaagaatttagtcgttaggctaacatgtttgcgtaattgaataatgtgaatatcatgtggaagagtttgagtcacccacccgtctccttgctttggcaagttttggactttgttgtactcccattcggtaatattgaaatcaggccaatcgtgttttaactgtgggtgctgattctctgtcccgtgtaatcccctctcaatagctagcagctggaaagttttgtgcaacgttggtacggttaaaacatagcaaaaccaatttgaattatacaagtggaagtgtattgcttaccacacgccttagatcaggtcgatctttactgattggctttgcgagcgaatctagtatttgcacctcacatcgcttggcgttaagaacggctaggtaccagtgtgtatctttaatattaattgggaggaaaatctgcatatgttcattgttcaacactaagatagagtcataaattgaattagccattacatagatagagtcataaattgaattagccattacatagatagcttgaataagtattaccatgtcaaatgctagatagtcgcgtgccatatctctaatccatcgtttatctcgaggtttgcttgcttcgacatgcgctccctctacatttagtagacctgttttcatggccatctctaggaaggccttgccatctcccctgattcctttctctttatagcggaggcataggatgtatgcatccatgacctgaatttgaggttagttcagttatataacaaatatagttataaaagaatagtaggcttgttaaataggcgaacttacatcatcattcaagaattctggttgtgttagtactttcattcttatccgtttaacctccacttcttcaatatgcaccatcactttgttatcctccgtgttattaatgtaggtaatgaacgggtcttcttttttagtcaactctacgaaggttggacaaattagtaatagatctatagaaatgttaaatggttagtcattaccttctgaattttttaacattgtttggccattcgtttttttttcttcttttgacctcgtaaggcgttctttggtggtccgttgtctatgtttttttgcgtaagatattccttctctatgtacactagaaaagggtaagtcaaatcagtaacacacaaacatagaatataagtaaaaaattatggatgatgtagagagttcatacattcggatatttcattcagtgtttggttgtcttgtttcctcttcttttcaccccgtaattcgcctgtgtctggcatgtaagcttctttattcgtttgcgcttgaaaaggagtaaagttagtaccattgacatgagcatatgcaactatgaaatagcatagtacctattgttttctttgtctgtgcttgggttttgattatgtccttctttttacctcttgtttcgtagatgaagtcagtccgattagttggtttgtatgttcttcctgtaggacctgtaagcatcttcctgctttgattgctctagttactattgtcctgttaggtaataaagtgcacgttagtattatgataagttgtagtaacgttagtgagagaaataaaattcagtttaccttcgtttcacaagtcatgtttacattttgatttatataggactcttcgttatgatttgatacatgctccctgggatcaatttgttcttgttcaacatcctgcaatagcgtcaaccttttttttagcggtgttacgtaagtaataatgattaacagtctagcatatgatctttacctcaaacacatgcgtactatcttttcgctctgggcattttgaatcattttccatgcaatctagtatcaatgatcgcatacgtggccaaaaatcctttgtgaaatcgttgaaattatcttgtaaagtttggatgctttcttgtaacctttcttgtaaagtgatgtcggctgattgttcagtggatgttatagagtgtacctgaatagcacaagtgagaaaaggatgtcaaacatattttgttaaatagagttcgtattaaaaccccataatatatacctcttcagaagtgccttgaaaatcttcattgctacgtgtttctgagtcattgtcctgcgctttttcatcggggatttcattgcaatgtatagttcccgtaatgtcgtcgacaacctatttttagtgaaaaaggtgtattagagattttacagacagttgatatagttagtacatagtattaaaaatgagatagttaccttcccttgtccaaaaaggtaagaaattcttttttttttttgtcccagtactgaattagtggcctttgacgaccagaatgatatattgtcgcagccaatttatctattcgcactttttcccaataccaaatctgcaaagcatttgtacataagataattagtattgctatgaaaatatgttcatgacaattttgtaaagaaactcaattttgaaacgaacctgtaagaggcatacgttcccctcaatgtttgttgtcttctctctaaattttaatatgcctttcagtaactgatttagtgttagactagaccagtttagttccctcatgttgtcaacgtcgtcgacgagattgagatattctgagcgcacatatctttgagttgtaggacatatgaaggatccaattgagaaaagaataaatctttgaatgaagtggtcatcgtagctcaaggagttgattattgcttcccgtaatgcttgtaaagtaattgttgtttggccttccttttttacaggttgaacaattctggtttattgatttttggtgcctcaaatatgtcatctctttttgatggcagtccaagcaaacaatcaacatcatcgagtgtcatcgttacgaaagtaccattaatattgaatgctttcttctccttgtcatagcttcttgcaatctcattgcacaagtttcggtcaatatgtatgttgtcaatctttagcaagttgccaagacctgaaccctcgatagcttccttttgacgtagacttagatggagtattacctcgtacatggcatgtggagagcaaactagagttccctaattaacagaaaagataataagagtttagtccatgtgaaaatttatgcaagtgctcatatatatgattgcacattaccaaacctagagatcaattaatcctgctagaaatcaattagaaatcaaaggaaataattaatcctgctctggcatgttactcgtctgacatgttgaagtgatgtcctccatcactgttctggcagtctatatggccctctctataatttgttcaatgttcattcttatgtgcaggattcagtgaggttgaggagtttgaggggagcaacatgagtgaggtcttcgagggcaacatagtactgtcaggtttgtgccaccttcacccatgaccacatccctcactttggtttgaaagtttgaaagtgtgaaattctgaacatatagtggctaatatagatcggtcgtcgaggcgtggtaattatattgaaatttccaatcaattctaacatatattcagtataattcataagatctcaattgggttgaagattcaacaaatataattaagattgtctggatggaatatcatgcatgattgtgtttctaaggtagatggtcacagtgtgtctgtgtgtggcgtagccctgctattttacttctttaatcatgaggccaacatttccggattcaacataaatatgcactgcatgtttcctatttcattgctcatgaggccagcaccatatttcagacagtaaaaaagataggctcagaaagcagtataaccgtttctaagagtttgaattgttgtagtattaacaaaattaacaaacagtaggtgctaatgaagtgctgtagtgccattgagtttacatcatctccgcacattgttggctgaaatttaaacttgtaatcttggaagaacaggcatgcaacccattataaccagtatctgaaagttggtttcttatattacagagtaaatcattttctttgttgtaggagattacatatcatggaacctgtgctttcagacatctgtgtataccctgacagtgaccaggattagatcttcatttttagacagtctaaaactaaactaggtcaccaacggaaacacatatgaaaacattgagcctctctgaatatgctacatctaagttttacctctttagatttgtggagaacaccatgagtttggataaaaatataagaaatcctgatttccttaattggttgtagataaattattttatacttaagtcagcgatgacccctatttgttaatgccagatcttcgacacgaatcttacactttgtttttgttatgcaatctatataaattctcatcataatatggctatgataattacttgtatgataattgcttcgttatgattctcagaaatcctaactaattctcactaatcaataatatatatcccaatacatcagcacacatgaatctttgctactgcagggcgtcgccagtgccattgtcagcttcccgccacaaacgcctctggatctcaaatccaccacgtcgaagcaggggttggtcaggccggcagaccatctacggctgcgcctaacactccccgcaggtacattgcttcatcccattgctcccataggcttttagttttttttttttttggcaaaaagtcgagacaaaaagttatatgccctaatggcatgtggatgtcatgtaattactaaatttttagcatgctgaatatataacatggatatgttgctttggattaatatcactgtcttctcaaaaattaggtgccattctgttcgttttttgtatggagtatgacaagtatataaaatagttgtatggagtaggacaggtatataaattaggtgccattctctttttttttatggagttgtacaagtatattttttgggatatcttgccgtgctgtgtactctgtgtggctgctacatcctctatacaattgctccagagactagccagagcttaaaagaggcacacagtaaaatcaggggagagactatattcgttaataatctaatcatatgtgctgtaattatcgttgcgccttagacctattgcaactttggcttgaggagtctaagatttcgacaactgatgtatacaagagctgaaagtgaatgttgtatgtaaaaagacgtacccgttttttcttatgttggcttgtgcccgtcgtcgctgcatgaaattgttttcgtttgctccccgtcggcggctcgtaatttggcctcatcttgttatttatttcgtaatttttgtccagaacatgtgaacaaaccgagaactgtctcctatatatatatatatatatatatatatatatatatatatatatatatatatatatatatatatatatatatatatatatgtatgtatgtatatatgtatgtatgtatatgttacatgtggattaagctcggtatgtaataataggagatcaattaggtctaaaaaataacatataattcggcaggaataaataacagataattcgaaacaaatcaattcggttagagaacggaaattatgttagacttctgctacctacatcgctagtatttgtttaaaaaacctcgtgtatttaaaacgcaggaagttcgataagttccgacaagattttatttgtccaaaacaatcggatccgatatattccatgcgatctggatggtcggcgatatgattttttattcgtccaaaataatccgtttcgctataatatacgagcgatcgaccgaaaatttatgaatttcaaaaacaggcccggtccagacggtcggcaacatgattttttattcgtccaaaataatccgttccgctgtaatatatgagcgatcgaccagaaatttatgattttcaaaaacaggcccggtccggacggtcggcgacatgattttttattcgtccaaaataatccataatccgttacgctgtaatatacaagcgatcaactgaaaatttatgattttcaaaaacaggcccgatccggacggtcggtgacatgatttcttattcgtccaaaataatccgttccgctgtaatataagagcgatcggccagaaatccattctttttaaaaaaccgacctggtcggcgacttaattttttatttgtccaaaataatctgttccgctataatatacgagcgatcggccggaaatttatgatttttaaaaaatgacctggtcggcaacttaattttgtatttgtccaaaataatccgttcccctgtaatatacgagcgatcgactggaaatttatgattttcaaaaaccggcccggtgggcaacatgatcgaccggaaattgttttcttacaaatcgactcggcccggaccaactcgagtacgtacgtgaaaaccatgttttcggatatcggtactgttagttttaaaaacctcgtgtgttaaaaacggaataataggagagcgttaatataacgcacgaagttcgataatttccgacaagattgtaatcccgttgttgtaggaattcatatttatttgttttctaaaaaatcgaccggaataattgttttataaaaaatcgaccgtcccggacgtaataattattttgttcgaaataatccgttccgctgtattctatcgcacgcccaaccgaaaataattgttttctaaaagatctaccatccattggactagcctgtaacctagtaacttaacttgttgtcatcagaagttcagaatattagaaaggattaaactaatccaaaagcatgcacaggggaaacacttaatatgcacatcttgagaaaagattaaactaatccaaaacaaaaacaatgccaataatacaaaagatacaaagtttgtgagccacaattacctaattggttatttgtgtgcaatgtctcacggaatggccttcgtctcttagatggagctcattttgccctaatctcttcaggatcaagtactctcttctctaatggctggttactagatgaaaagtgagttggcataggaccaaaatctccagccacgatgttctcatcggatgacgatcctttatccaaaatcccctttaagaaatccatcgccttttctgtctgctagagttcctagcggcctcgaagaaagcatcactacccagatttcggaggctacggtaacgaaccatgtgttcagaccacacattaggatcggcattcctgtctgacctaaatgtcgcctttgctcccattgtccacctatccacgacacaacaacgagagatggtgtcaaaaccaaggaacttgagtacaacaaaaatatgtgagcaagggatgtcttcgcactccatcttccgacaatgacattccacaccttccaaagcctggcctttaaaagtaaccctcacttcatcccacacctcattatcgtccttcaaaccaacagcatacaatgacgaaccatcttgattagtcccactgatgacttcaagtcctgcaattagccgtatctgtgcacggattgtcttgaacacgactgcagtgtatatacgggcaacgtctttctccaatgggtcggcgtctattctacaaaaagggaccgaattggtagacttagcgtccaactgagcctccttcttatgcaggcgttgtatgcacaacttaacatgtttgactaagcacattagtgacatgtttctctttagaagggtgtgaagctttgagttcagtgactcactacattggttgctgtgcatacccaacaagtatttccaatatgtataggcagctgcccacttctcccttagtcggtacatcagagcgatccattgtccatttcccgtgcctccattctccttaaaatcagcccaacgtctctcgaacttgtcctcatccatattctcataaattaattttcttagctcgtcgagttttggcttacgaaggtgacgactcatattctcctctatatgccaagtacacaatctatggtaagcacccggcattaccttactgatagccttcgccattgctaggtcgccatcggtaatcaatgattttggatgcacttgacgcattgcctccaaaaaagtctcaaggagccaacagtaagagttgacatactcatttgatagaattccgcacccaaaaattgttgtacttatgtggtagttaactcctatgaaaggaatgaaaggaagattgtacttgttcacatggtaagtgctatcgaaaataacaacaccaccaaaagcagcatagtctaaacgtgattcagaatctgcccaaaacacattcctaagacgcccgatatttcaacacatcttcagcatcatgacccttgatattcttcatctcgtaccgtgtaaagaaattataaaggtccttcatcacaaaaccaacctcatctaactcatcatggttattctccataacctccatgatttgaaagggcctaaggccactcatgcgaagctcgaccgcttgggctttcttaaaatcactcatcacatgatgaactcctaaaaaagcaacatggtcaggatttgcaagttcgtgcgtatgttggttatcaaactccttaacaaaccacacccccttctcctcgttccgctcaatctcaagcttagctaagcaaccgcagcgggtcagtgcccgtggctcccttttccgctctgtcctctcaaagtgctttaactccctgtacccttcacatgagcatacgaattgcctccatataatctcaccgtccttccgtttcaagttgtttttcctcacactgaaacccttcccctttgcatagtctaaatagaatttgtaacattcctccttgcttgaaaaaaccacagtacccatcattttatactcttcctgatcctctagaatcacatagctcgaagtctcagacctcacctacggaaaagtaaaaaaaacaaacagatcaagcacccaaatatataagcttacgtcctttatacctcataagtatataaaaaaaagaacaaccatcaactgcataaatacatgccattctaaactattgagcaattactacagttcccccacaatggctgcaaattttgtacgtactataaattgttatactaaaatacattttctgaaaatggttgttcagagataatttttctgttttcatttcagctgtacagtcaaattttgtgttgcacatcatccagtagtttcagtaatctgtttcttttttcagcacctctggagaatgtatgcatttgtgtatttcacaatgacttcggttacatgctcctctctgataattctaccattgttgaaacccttataaaaggaagattcgaaacggagccaggtcattgcagcttattaagacctatttgtagtcagatcgttgccacaattcctgaatctgttttgcaggtcatgtggattcctatggacataatcaagttagctgacaaactagcaaaagaagccaagtccaatgttaatgcagcccctgtctatttttgtcaaaatatatcgcatttgtcttatcctaccagaagatgtcatgctaaatcatatctaaatatcaatggtcagttcgccagggcagcaagccatacatgcacagcaaaatcaatttaatattgttcatatttccttcaaaaaaatatttctttcaaaagttattgttcatatttctttcaaaaaaatattgttcgtcagtttcatcgttcatacttacaactcaacatacaaaatcaatttaataaatctcctattcgatttacaagctagtttacacagacattaacaagcaagtatatgcattaatagaggagcaattcagacaagttcaccactgaggatatgaaggggaacagaaagccaggttgggggggggggggtggggatgggaggagtggatacctgatgatttcgccgtgcccagccgctggccgcgccgccgcctgcgtcggacagatgcgacgcgtggcgccaccggccgcgacgccgcctgcctggaggaatagccaccgggcgcgtagccgcctgccggtgcctgcctccgaccaaatgcgaaccgaagggggagggtgaagagggcggggagatgtacggcgacggagggggcgaagacggcggcaacagaggaagcgaagacgaaggtgacggatggagcgaagacggcggcgagggcgggggaggcggacggcgacggaggggggcggagaaggcgacgcgggcggaggagacagacggcgattgaggaggcggagaaggcggcgacggcgagcgatacggacagcaacggaggcgggcaaggcggcgaggccgggggaggaatggcgcgacggaatccacacctgcgatgcgaaccgatgcgaacagaagaaaacatcccataccaaatttacccctaaaggatattagaagattacttacctaccctttaaaataaagggtccagattaattctactcggagtagaatacttcaagtatattgtaccggagcattcccctagatgattagggtttagttttacatgatatgagcattttaagaaaatctattactaatgaaataaaaaaagaaaatccattactaatgaaataaaaaaagttcaacttaagagacctcaagtgaacttatttcgtgtggagcgtacacgcggcccatgaggcggcctatagtgtgggcggcctgaaaacatattcggggataactttagggacaaaaagtgaacttattctatgaggagattacaagcagcccaatagtgtgggcggcctgggaacggcacccggcccgacgcaggagaagctggagtcgtgcgatctgatggacggtcctaattcattgcgacctatatataagttcaaaaggtccaaaccctaaccctaaatcatttccccttcctctctctctcagtggtgccgcctctcctcctccagcgctcctcctcgccctccccggcggcgccgctctctctctacctcccccaccggcggcgccgctctatctctccctcttcttcctgaccgtccttccccccttctcttgcctccctcgcgcgacggattcggcaacggcggtgtcggcggcgaccgtgggtggatctggccgcggtggtggcggccaaggatgggtccggcggcggaggctccctccgacccctctcgcctccctcccatagcagatttaacagcggtggtggcctcggcggctaccgcatgtgcatctggcggtggttcggcacggcggcggacccagcggctgctgctcctcctctcaggtgtggcgacgtggccgggagtggtgatgggctcaggagcggcggcgggctcgggagccagtcacggcggaagacgactacggcgacgacggcggtgaccacaaggaaggcggctgcgggaggcggctaggcttagggtttggattttacttttgaattggacatgactacgacgagacggtagctggattgtcgtaaccagcttacctcactcgttgctattagtacacctaatagtgcctttctttatttcttcttatagaattttcttttgatttactcattcgaattacgatctgattgcaccgctgtgttcataacaattaaatctttaaaacaagatctcacataattatattttaataaaaaatgataaattaattttataatatatctaaattacttttagatttcaataaattacttcttagacatataaagtaaattcaataaatcataaaaataatttaagaataacttaaaagaaaaagaaagtaacttatcacaacaataagagtaaatctattgtggggtaaagaaatatatcaatctagaaattatatttaataaacatattgtagaactaaccaataaagtaaagtgttcattgaatgtctaaaaagtaatttaatcaaatatagaagtaattattgcatataataaaagcaatttacatatataataaaagtaatttacaacataaatattttttccatcataatataatcatgtaagatcttgttataaagatttaattgcaacaaacaccatggtgtaatcggattataaatcaaataaatagtttaagagaaaattctataagaagaaaaaaagatatatactattgggtgtactattagcaacctagagtactcttatgtatgggtgtctctcgttaaggctaaaccggagtgttctcggtttagattttaccttttgaattgggagttgattttgtggggattcttgattttgatttgggattgcaattgagtgattttgtgattcatgtattttgggaattggtggcaaaggggtggggagcaatcagctgatctactcagggtttttttttaaaataaaagacggactcggactcaaacgacgactacggacaaaacgggtgatcgaaagccctacgtattttttaagtaggtatatagatatggaagaaccaccaacacatactacattcataccgttgacacctgcgttcgttccctggagttgggaacgttcatctcaagcacgaaaatcagagcagttcattaacatgtgattaattaatactaattaattaagtattagtaaaataaacttgaaaatggatcaatataattttttaaagcaactttcctatagaaattttatgcaaaaaaacatagtttgaaaagcgcgcgcgcagaaaacgagggaggagagttgtaactctcaccgccgaactctctaacatatgctgagatgaaagctaacggcaatttcttgatctaactttaaaaaattccttatgtgtcccttaaaactcatctaatccctttcatatctttcatatttgcttggtccttttgtaccactgaatttttactttgatcactaatatgcctcagctgttacggccctcccatcgcctcccggccccatactcccgtcgtcgccatcgatccctcactctcatcgcccccacgagcagtgatgtcaatttcggttccctatcggcaagcaaatatgttagccgaattttccagggctttttttttttccaaattttacgaatttggtgaaggtttattaaaatttccgtgcaaaacgaaattgacaacctaaatacttgatacctagtatcaggtctggtatctaaggatatcagaccgatctagataccaagtacctgatacctaggtatccgatacccaataccaagtatcaagtatcaaggtaccatgtaatcgatacctgaggtatcaggtatcaggcctagtacatatggaactaaactgaatactttggcttactacttgatacctagtatcagggacttgatacccaggcatcaagtaccatatgggtgacatgtatgatttgtgggtatcatgtcttctacacatctgttcaagctattaactctatatactagaagagtgtcagagcaggtctctagtgtgatctttggctgcataaaaatgtttaccaaagaaaagctagtagtactttagtacataagtctagtatatagtagtactattagtacaacagcatacatacagaaatccggaggcaactctagcctctgaccaacttagcaatgctaaggccccctttgattcaaaagaaattcataggaattttagaggatttcattcctatatgaatttttcccacaaagctctttgaatcaaaggaatgaatcctatggaatcctataaaattcctatggaatgcctcttaccatacaagttttgaaggaattttaacaagaggtagaacctcatggaagaaatcctttgagtctttatctcttctcaaattcctgtgtttttcctgtagtccaatcaaacggtcatttctatgtttttcctgtgttttgcaatcctctgttttacacttacattcctgtcagaattctatgtttttcctattcctccatttttcattcctgtgattcaaaggggccctaagtttttctcacgtcacgcctggcccgccttcgcatgctctcagaacatatctaaacatgaaaaagaacggttcactcataacttatcccattgtttagacagtatcccgtttcctagtttttctcctttagcgtttccttcgataaccgggggatgctttacatccgatattacggttgagggccccttttattcaaaggaaattcataggaattttagaggatttcattcctataagattttttcctatatagccctttgaatcaaaggaatggatcctatagaatcctatgaaattcctatggattgtcttttcccatgcaagttttggaggaaatttaacatgaggtagaatctcatggaaagaatcctttgagtctttatctctcctcaaattcctgtgtttttcttgcggcccaatcaaatagtcattcctatgtttttcctgtgttttgcaatcctctgttttacacttgcattcctgtcagaatcctatgtttttcctattcctccattttttcatttctgtgattcaacggggccctgaaagatgtgaatcgatatcgggctagagtcgagggtgacgaaacacacttgttccgctccacttcaccaaacaacccaaaatgcaggcataaggaaaaagtacatcagaggtccctcattttgtcaccgaattacaaaatcgtccctgaaccacaaaaccggatacaacgcatcccccaactcacaaaaccagtgcaaactaggtccctcggcggtattgtctccggttttggctgacgtggcgcctacgttgctcctttcactaggtcttagttccatgtggcaatgacgtggcgcttatgtggcaatctgatccaaaaataaattaaaaaaactggggcccacatgtcagttgcatgcggcgtccaggagggagcgcgggacttgcggaacggctggcgggggcagtggggcacccgctcacgccgccggtcttcacgccgctcctcctctggctcctaggcagaggggcgctttttcttctcgcgcggcttgggagttgggggttagtggacgaggccggcgagtcggggaagctgtccatgtccatgaggcggagagggagcagccgtcgacacaacaacgagggtggggagcggcgcagcgaagcgggacgcgaggcgagagagatggtggtggagcagccgatgattccaagagaaacgccgttgcaggagccgttgatctttgccgctgccgtcgacccctgcggcggcgacggcggcacggtggaccacctcttcctgcatgtgctcagcggtgatgtcccacgagagcgcatccctctccatcccgctaggccgtcacgctctctgccctctcccgccacttccgcgtcctctcgtgacccgtcccagttcggccgcattgactctggcgaccttccccgacctgctcccgtcgctcccggcgaggccgtccttcatccgccgcctcgccttcgcattccagcaccgcgggtgtcctcctccgccttctcccgactcctcgacgccaccgccgaccgcggcctttccgagcttgccgtctgcctgcaccgcaacgggttccttcccaagaacctcctctccatccgctccctcaccgtggtctcactcaactcatgcgggttgcctcgccggttatggaggaacggcaggtgggccactcaagctgtgcgggctgccagtggcaacccttcaaatcactcaaactcacacttgatcggaggtggaagatgatgaacagtgaaaacaccagctgtttgatgcaggaatttttggtgccgcgtagaacgttgcagcgtttttttggggtttacttcacttctataaagcaaattacatgcaaactaaaatcaactgaaaaactgggagtgccatagtggcctccgtcatgtgtgccaatactccatgagacgtgctcctggccaaaacacacgacgctcacgctgcaacatgcaaacgcgctcatgcaacatgcaaaaacgaaaatataatcttcggctgcacatgattaaagaacgctaacacgggcaatgccggagcagacgctggagatggacatcggcgaggaggccgcgccgattgacaacgaggaggctacgctgcaacatcactggggcggtggtgcttggtgagtaccttcggcggcggcggccacgggcgccgaatggatcacaccgccatgtcgctggattgggtaagaaaagaagaagaccgagagattggggaggagacgtgggtcccggccgtgctgctcggccacgtgcgactgtcgagggcggcggggaggccggcggcgagagacggagagggaggaggcggggctgacgagggggacgggcaggccgaggagctggcctgctccgcccaacgccgtgtagcaggagagagaagaaatgtgaagagaggaagggggagaagagggagaagaaaacgagtatgacatgtgggccccactgtttttaatttattttttaatcggactgccacgtaagccccacgtcattgccacatgtaacaaaaacacctagtcaaagaagccacatagacgccacgtcagccaaaactaggaacaatactgctgagggacctaatttgcactgtttttataagttaggggatgcgttgtatccggttttgcagttcaaggatgattttgtaactcggtgacaagatgagggacctctggtgtactttttcccaggcataaatgttctgcattcgcgtttgtgggccgaataagtggaaacagtagtacgtgggttaattttgggtcgaacttcaacgctttgcgggctgaacgcacatgggctcgatcgtcctttctggcccagttggggagtgcgacccacctttccctggcctcctcgcctcgccacttcgcccgccgcctgcgcctgcgccgccggcgacctccatcccgtccccgcgcgagcagggtccccggcgacctgctgcttcctccgccggtgagctccggtacctaggcacacaatcctctccagtgtaacaggagatggtggagcatgccactcttgaatcctctaagccgcgcgccttccacccacatccgcagcttagctcgtgtcctactctcatgcctccccaccggcggcgaccgcctccggcgtttgaacccggccatccatgcccgtgccaccgtcgcaggaagactcgacgacctcttcctcaccaacctgctcctgcgtggctactccaatcttggccgcctccgtgacgcccgccacctgttcgatcgaatgccccaccggaaccttgtctcctggggctcggtcatctccatgtacacacagcacggccgcgacgattgtgcaatttccctcttcgtggccttccagaaggcctcttgtgaggtgcccaatgagttcttgcttgccagtgtcctacgtgcgtgtacacaatctaaggctgtttcgcttggcgagcaagtgcatgggattgccgtcaagttggacctggatgctaatgtttatgttgggactgcgcttatcaacttatatgcaaagcttggctgcatggatgaggcaatgttggtgtttcatgcactccctgtaagaaccccagttacttggaacacagttatcacaggatacgctcagattgggtgtgggggagtagccctagagttgtttgacaggatggggattgagggtgtccgtcctgataggtttgtactagcaagtgctgtcagtgcttgctctgcacttggctttctagagggtggtaggcaaatacatggttacgcgtatcgtagtgccacagagacagatacatcagtgatcaatgtgttgattgatctatattgcaagtgctccagactgtcagcagctcggaaactgtttgattgcatggagtaccgtaatcttgtgtcttggacaaccatgatttctggttatatgcagaactcattcaatgctgaagcgataaccatgttctggaatatgactcaggctggctggcagccagatggttttgcttgtacaagtatcttgaactcatgtggctctttggcagcaatatggcaaggaaggcagatacatgcgcatgtcataaaggctgatctggaggctgatgagtatgtcaagaatgctctcatcgacatgtatgctaaatgtgagcatctaactgaagcaagagcagtatttgatgccttggctgaagatgatgcaatttcatacaatgctatgattgaaggatactcaaaaaatcgtgatcttgcagaagcagtgaacatattccaaagaatgagatttttctcactaagaccaagtctattgacctttgtttcactccttggggtgtcatcatctcagttagccattgaattgagcaagcagattcatggccttattataaaatcaggaacttcattggacctttatgctgcgagtgctctaattgatgtgtactcaaagtgttcccttgtgaatgatgccaagactgtattcaatatgttgcactacaaggacatggtcatctggaattcaatgatttttggccatgcacagaatgagcaaggggaagaggccataaaactcttcaaccagcttcttttatcgggtatggcacctaatgagttcacgtttgtcgcactagtaactgtggcaagtacactagcaagcatgttccacggccagcagtttcatgcttggatcatcaaagcaggtgttgacaatgatccgcatgtttcaaatgctcttattgacatgtatgctaagtgtggcttcattaaggaagggaggatgctgtttgaatcaacatgtggggaggatgtcatttgttggaactcaatgattacgacttatgcacagcacggtcatgctgaagaagctcttcaggttttccggctgatgggagaagctgaggtagaacctaactatgtgacctttgtcggtgtgttatcagcatgtgcgcatgcaggttttgtgggtgaaggattaaaccattttaactctatgaaatcaaattatgatattgaaccaggcattgagcattacgcttctgtagtcaatctttttggtcgttctgggaaactgcatgctgccaaggagtttattgaaaggatgccaatcaaaccagctgcagctgtttggagaagtttgctgagcgcttgccatctttttggcaacgctgaaattgggaggtatgccgctgaaatggcactcttggcagatccaacagacagtggcccttatgttttactgtcaaatatttatgcctctaaaggactctgggctgatgtgcacaacttaagacagcagatggatagttctggcacagtgaaggaaacaggatgtagctggattgaagtgacaaaggaagttcacacgttcattgtgagagggagagaacacccagaggcagaactgatatattcagtactggatgagctgacgagtctaattaaaaatttgggttatgttcctgatacttctgaccatactctgttgtgtgagactggttaatctagtaatctacttgttaaggcttctacacagatttcatttgccagagtgtcttttactgactgcaactttgagtgagaacctaaatggcaaatatttttagaccgatctaagactaacagcttaagtgctgtttatgccttttgaccagtggttttgcacataatatcacgcttgctacagacttgttctttgagaatgtttgacagactaactggcagataaccattaaacctgaagaggtttccagtggtggggatagcacggaccaaaaattagaaggatctgcaaggtgtggtatgcctgtaattgttttgctgtaacgccatttcatttattagtagagttcttgcaacgacatctttatcagtttatcttcattctgttatcagtccatttctttttagttaaaattttctcacataattatcatttatacctgaagttttcaacttgtgtcctgacaatgagatacacctgttgggtgcccaacggatatcaacgatggttcttcaggtccactttcatcattgtctgccctttaacttgtctgtgctccacaggatatgacatccagcagaactttaccctggcattgttttattttgtgtgaccactgcccatgggcctaaatgtatttctattcaagggaaaccagttgagaggaatgtttgaatatacctgatgttttgtaaatttccacttatatccactcatcacttcacttttgttcatcagtaagagaacaagaatatgggcatcttttcaacaggtacatgtagaataatttggtggatgctgattcttttatcggtgatttgcggaaaaagtcttattaatcgtagttacatatggtttatcttaggttatagccaacgcactaacaatttaagtcttaactgctttgagctctatctccaaggaatcaatatattgatatgtcaatagtggcatgttgaattgcagctactaagatggaatgccagattgccagaacatatgtttaactggagtacacggtgtaaggtcatatttctcacacctgcgtttcatttgattctaacaaggaagactgatttaactgtcctgaattttagctttctgaacttatcatcaatagtagtgtaatacttagttgagaaagtttgttccaataagatagtaacagtattctgaatttaaataaccatgcttaggctgtgttcattcctcctggttgggaacgctcccctctggcacggaaaatggagcagtccattagtgcgtgattaattaagtattactccctccatcctaaaatataaggctcaaccattcataacacaaagaccaagaaaagttttaatcatcttcttg

SEQ ID NO: 4801 - DNA, 7442 bp, Oryza sativa
  unsure (1)..(7442): unsure at all n locations
tacacaaactgacaatttaatatacagattcatcaaagtaactaaaacgataaatacttacttatgaggcacttagtcctcatcatgaagaaaactgcagcggaaaataaaatctagcgaagctccggctccactcccacaggcagctcaactggggtataagccaaacgtcttctccttctggatcctttttcttcaactgaggttgattgattattgcaaggtgagcatatgacatactcagcaagccacacagcaaatatgcaagtgcacaaggataccaaaggatggcataatattggctcatttgcaaaagcagcatttagcaaaacatttaagagaagtaaaacagttgagntaaaattttanaattccaanggaaaaaattttttttttttaaaaaaatttttcccaaaaaaaaaaccccaaaactgaacagcacacccatgctgcccaggcccaaccattctgaacaaccatacccggctgaacagatctaactccaaaccgggaagctaaccaaatattaccagttattaccatcaatacttattgtgagaggtgtgggactaatcacgaaaaacattgctcaactcgcccataaccgcgggcacggctattcgaatagttttactccggccagaggtgtaccactgtacccacaagacacagtctcaacatcatgtctaccatgcgtcgtgatactggaaagtacccgaatagaggctgtgacaataccctctgcataacacaactcaccacagtgcaccattcctggatcataatcacccccttataaaacaaggcatggactccccagcgacccccgtgggcttatctccgccacttctcagtctggtgctccgcaatgaaccatgttatacaaaaggtaaagccgttgcccacgctggcttgtggttggcacggttaatgtttcacaataatagctcgcgaaccggtccttaattgtcatgagcacgactctcaaaaccatgtgctcacaacccaccattatcaagttttagttggcaggtaattaattaaccaatcacgattgaccatcgtgaactatcattaagccatcattaaataatgagtcataagttatcccaatagtgtactaatgtttctaagcatggctaagcaatcatatctaatatctagctgaaccaatatataaagctcaactagtcaagttataataacccaaggtatcaagaaataaagtaatcaatgcaaacaggccataacaaaagaataggttaattccacccaatgacattcgaaaataaatgcacagttgaaataaatagagaatttaaatataggatcaacatgctcaaaggaattgtgtttgggatctgtgtgacttgccttgcaataatcggtcttcaattaatcttcttgaatacttccggcgcactcgcgaaccttcgcaacgacggaaacgacaagctaacacgcaaaacgaagaaaaagactaataaaaaccaaataaacaatacataaaaagtaaacaaacatgtatattataattttagatgaattatgagacttgaacggcctcattctgatttcatatgaatttattatgaattttacaagattaaatctatttaaagcccatttaaaaagaattaaataaatttaattcaatttatggacaattttattatgtagatctttattttatacaacttttgcaacttgaaccacattaaactgagttaagatgaattagttatgaatttttaaagattaaatcggattaaaacacttatatggattttaattgaattatgacgcaataatgaattatttttgaaaaggaaaagaaggattattgcgtcagcggctagggtttgcggtggaccgggtgcacggcggcggctcacggaaacgaacggccgagatcaaccctatccaaaacggacggccgagatcgatcgggtccacggcggctcacgggagagggcgacgatgacgtcagcgatgacggcagcgatgacgtcagcaccggcggcgactcgggcggctcgggcgcgcatgctcgccggcgaacgacggcgcggcgacgcgaacggagggcaccaacgggtagagggcgacgcggcgaactcaccggtgaccaaaggaacggcggaagggcaacggacggcgccggcgacgaggaagaagcggcggcaaccttcgggtcgacggcggcaacggcgctccggcggtcttcggcggtggcgaaacggtagacggggacggcgacgaccttgcgaacccgacggcggtcttcccgagcgacggcgacgactggagcaacggcgaaggacgactggagcgacggcggcgacggcggcacgaagcggcacggcgctagggcgctacggacgacgagaggcgaaggcgaaggtggcgacgggtagaggagagctcggggtgcttatataggggcaaggaggcggcggcggaggcccacggcgaccggcgacggcgaaggaaaactagggttcggaggagagaagaatccgattcgatctcgattccatcgagtttccaaaccgaattaggcgatgattccaaaagagaaaaggaagaggagatctcaaggatcatttgccctcaaacgattcggccggagaaggaaagacgcggccgaatttggaaggagacggcggcggcttgcgttagggtttcgggcggcggcggcggcgcgaggaggacgacgggtctgacaggtgggccccacctgtcagcgacagagagagagaggagagcagcggctcggcggactgggccgactgggccggggagggagagagaaagagaggttttgggccggctttcggcccaaagccaaaagaaggatttaaaaacatttttcaatttaaattatttcttaaatgcaattctatttattaaaaatacttccttagctcaaataaatcccagaaaaatttaggaattatagaattaagcaaagtatttaataaaattttatctagcccaattttatattgagatttaacaaattaaaattagatcttctcttttaggcttttaaaatcatttctaataattccttttaaacaacaatttataatttaaggatttttaaacaagaaaagctcttaacaattataattgatcaaataattactgaactgttctttgtatcatttaggaattgagctctgaaaaatccgagaaaatttcagagagttgacttaatcatggagaatttaataaaaattaaatccatccatgctttagatttaagaaattttatttcccacattttacttcacttgtaaattaaagaacatttaatataaattctattattaatttattaaataatttttaaatcctgaaacgcaaatcaggatgtgacaaatcggtactgtatattcgcagcttaacaagtacccaaggggactagtcccaaccaaacctttctatagcgagcaatcacgaactctcttccttgagaagcctgctttcccaaccagatgaatgtgttcagctagcaacatgatgcgggctatggccgaccaccatgcagaataatttcacatatatcatgcgttagcacaatcggttaggaacatacatgaatttcactgtctaaagtcaagtcaggttgttaggttgttcttgcattgatatggaagagcaaaatcgagtggaagaggggcgaatttgtagggtttgggggaaataccgtaccaaataagcccttcaaaaatctagaaccataaacatacatatctatcatacatgctaacatgcagtatcaatcttggtattcaggtagggctagttcttggtgaatcaaagacaaggaaatcaaatcaagggtacattatatattatatgacttgcacctattgttggttgttgctaggatgaagtacataagttttaaacatcatactaatataatttgttggataaagatagaggaggccacgttaattggtgactgctgtcaaaaggaactgaccatatattgtctcattgggccatagtatcaatgcattaacattttcttcctaatcttttgaccggataggtacaattatgcagatcaaaatgcttgtggaaaaatcaatttgtgacttctgttctgtcctattcacatacttctccttattggtaagaaaaggttcaacattttattacttgaggtttgtagtatttattacttaattaacagctagctcaaatcaagtttatcaacgattaacatactattcagttccaaccatcctatgtgaacaaccatgaaatgtttaggaacagatgaaaacttctcaaggggagctccaaccaatcattttttagggatatctccaatcaatcataatcatagatgtataaccagatgagatatacaataaggagcaaaagacactaaatctgtgagaagcttaccatgctgtgcatctatggtattttttttaaccatcatactaatctaatttgttggataaagatagaagaggccacattaactggtgactgcttaaatagctagctacatcaaactcgacaaacagcaccatcagttctaatcaagacagaacagcaccataacgacatattaatcatgacactgatatggttcaaacctaagccagattaatcaagacactgcatcaaactcgacaaacagcatcatcataatcccaaaaaggcttattccaacgagaaccatcggtcctctagaccctgattaaatagctagctacatcaaaattgcgcaccatgttcaaggccttgttcttgacggtggatgaggaggagcccttgcagttggagacagggacagaccaagaacccaaggaacaagaaccaaaccctaggtaggacagggagaagagaggggaaggaagagagactcaccggtgagaaggtggccagcggaggggacggtcgccggaggggagaacgccgccaccgccgccgcactcgcctcatgcgccgtctcgtgcactttgaggcccagaatgagggggaaaggccggggtaggcctggatccaatccttgccgggcttaaccgaacgcaatttttttggtgggccggggtttaatccaagccgggctgatccaccggtattgggccgcaacccagcccgaccccacccaaaacgaacaaggcccattgtaaacgggctgggattctatccaggcctaagcacgtggacagaccggaattgaggccaattcaggaaagaataagttcatctgaggtcccttaagtttacaccgaatccgattttcatccttgaaccccaaaaccagatgcaaccggtctctaaactgtcaaaaccggtgcaaacgaaatccctcggcggtttggaacaatcaatagtagtaaaataagcattcatatgaataattagacggcaagtgaattaaacataccagttatctccattcatcacacgacaaacaagttcgtcgtgccttaacatcattgataacccgatgtctgactggcggtaccgaaacactctaaatctaaataacaaaaaataacactcaaaattggataactacaaatctaaaaggtaatctttagtcactaattagtcaattaaaatctaaaaagctaaactttacgaaaaacatgacctcactgttctagttataatcctgaaactactttaacaaagtatagaaaataaatacatttagagcatttacagaaaattatctaaaactttgatgttgagtaaaaactctaagtcggtatctattggttgtggatttaaaaagaagaaacgttgtgccagtttgaacctggttagcagcactatcctaaaccgcttatctgatttatatgaaactagagccgttctataaagatagcgacgatactgcaaacgtcgcttcgatcatgacacctaatttatattagattaataccaaaattctaattaatggtgtgtttagttcataccaaaattgaaagtttggttgaaattggaacagagtgttcgaaaagttgaaagtttgcgtgtgtaggaaagttttgatgtgatggaaaagttggaagttcgaagaaaaagtttaactatatcctattgatcggagaatggtaatccaacagactaaaattatttaaccgccacgatttcaaattaacggacaccaattgctgtatttcgcatagctcaaagaactctatgtatctactgtctcagatcgtttgtccataggatggttcaaaaattgaattttcacgccacccgtttaaccggttctgattaaatcttagggcatcacaatccattacgaattgggaatagccaactccggagaataaaaaaagaacgataattagaaactacatggatttctctgcaaatacatcatgcggcatagccccttttttagaaaaaaaaataaagaagaagaaatatccagtgtggattttggatatctggatatcctctttggcacggtttcgaatccaaaatctatctggatattcctaactccacaactccatggatttagatctatgattattttgataacatttgaataaatcattttgttcccaatttagataaaattttaaattttaaaccagtataatttcacatacaaactttaaatctaacatactttcgatattcggagctgtgccaagcagtaccttaatttgatttagcattagctctagcttggaattttttactctaaaaaaacccacgcaaattttgaatttgaccccagaaaccacccacaggctacagtacaatggcaattcaaaatactccaattaattaagtaaaatagtttaggaacaaaaccgcttgaaaccctacttatactccccttccatggtttggttctctccgccttgtcactgccgaaggtggtcaaacgatgctactatccctcctccctgagtaaataatttcatcatccagctttatattcagtgggaatccaacttgtaaaaatctaaagaagttttaaaggttctagttaattttctagaatgtgaagaacaactggattgatttagagagcttttaattttcggagaagccgcggcagttagaaactccttcaaacattcccttaatttgatttggcatttaactcaagcggtaagcctgtaacatttcccctgtacggaatttttactctactaaaaaaatctcaggtaaaatttgaatttcaccaaaattgacgaaattccaccaaaaatccaaaaccacctacaggctatactggaagtctgcaaattttaacactccaataaagtagtaaaacagtttgggaacccacaaaacccctcaaaaccctaccactacactcccccccttccatccatggcctgattccctccgcctcgccgccgccggaggcggtcaaacgatgctactacccctccccccgcgccgacgtctcctcctcctcatctacc

SEQ ID NO: 4802 - DNA, 13236 bp, Oryza sativa
atgggccgcacgaacaatatgcacgagacgttcgtagtctaccattttataccgaaaataaaaacgaaacgagacgtattcgcccacagtaactgcctgacgatgggcctcttacgtcgtgtaagcaaccgcaacgttcgtcccccaaaactacacccacagtccctgaccaatggactccacccatccgggaaccatccgggcccaccatgtcagtgactgcctacgacacccccctcggagaaaaaatccctcgcacacggatcgcctccggcgaggagaactagttgctttcttccacctcgtctcctcccccccctcccctctctctgaacccgtcgccctcgcctccccgtggaccgccccccgagacgccccccctccgccgcgccgcccaccggagcgggcgcgcatcggacccccctcctagcccgcggagttcaccgtcagccgggccaccgcgatgtcgcgcggcggcggcgggtgctgcccgtcgatggatctgatgcggtcggaggcgatgcagctggtgcaggtcatcatcccggcggagtccgcgcacctcgccgtctcctacctcggcgacctcggcctcctccagttcaaagacgtacgcaccgctcgctcgctcgctcgctttcgatttcgatccatttttgcgcctctggacggtgtgtttctcgatcgagggggtgggggatttgttagggtttgtggcgtggtgttcctcctcctcccgcacggatctggcgtggatcctctagggttttggggctccggtaccgtgatcgcctagccagaatgagtaggacggtaattaaggtttctgatgcgccaattagagtccaggaggtgaatggatggatgtgtggatgctatttgtgaaatacggtgggagtttcgcaaattggtagtggtgatcgcagagtagttagttagatgaggtgatcttaagtggcagtttaacatgggcgatcctgttgctaattatagggtgactcttgatgagctaaagatagcaggtaggatgcttcaaattgtcgaaatggttaaaacagttttgtgacagttgtacgaattatttttctgctaaaagggatgtcttgacaaaaaccaaattggaaacatttctgcagaaaattaataataataataagaattccaacagttactttgctattacatttttcatattccatattgatgtaaatcttgttagtagagatcttatatattgttttccctaactgatttaaatgttttaggtgatgcaagatatatagaatgatatgatgctacgaatgaatataaatatcctttccaaaagatcaattgaaacactaatggttttcaagttaacaattacctagtttatgtcccaatgatacatttacaatacattaaaaatttgagataatggtttgacacatttttttctggaaatcctttcatggcagtcctatcatgtgaataataataaggaatctaaggcaaacttactttattgttgctaccaataatacctaaaacctatgggcacagggtactggaaactgctattgggtcatgccatgcctttctagttctgttgtatggtggtttagcctggattgatctgacatttgtttattgcttcagcttaatgccgacaaaagcccattccagcggacttatgcttcccaggtactcttatcttctgtgtttgttttgtcttctctctgatgtcatgctgtgttttatgatcttatatctagctggtttatcaatagaaacgattgtttgaatacccaaaaaagcttgtagtctattctattttacccagtcatgaaaaaatgttttggacatcgacatggtttaaaaatgaagctttgaccactatttccattataacatatttatattactcaataaaactacattactctgaaaatttgagacaaaaatacacatgattttcatacatccagcctaagtaagtttggaaaaaaaaagcccagagcatgaaaagtatagttggatgccaaagtttggaaattgcatgtcaaaaagacatgttttcatgaccagagggaatatatacttcagtgagagtgctgttgttggaaagagtacctattgtgaatgcctaactttgagcaagtaatgagaagacttattttgctatcaatttctatcatcaattcaatttttaaaactaattgtaagatttgacccctctatatattccactatgtctatttgcaatcaattatgcacacacgaaatatgtccacttgaggcaccctagacgtaatcgtcttgtgctggttgacattttttagattagtctcttgggaattgactaactcttttactttatgttgtgttgcaaatcttaacattttgttttacaaatgcatgctgtcctatgaatatttaccatcttactgttctgcctatactttacaccctgcaaagatcaagaggtgtggtgaaatggctcgcaagttgcggttttttagggaacaaatgtcaaaagctgccatagcaacttctacacaattttcagggacttctttggaaattgatgatttagaggtatttagcaaagaaccatacaccattatcttgtgcaaattgtgtataatgaattttgctctaaccttgtgaaacaaacaggtcaaacttggagaactagaagttgagctgactgaagttaatgcaaataatgacaagttacagaggacatacaacgagctggtggagtacaacattgttctgcagaaggtttgattctagctaatagcatcaattcttagttagtgacaagtgaaaagagctaggttcttaaaattatcattaggtggaactctggaaagcacaaaaaggaaaaaaaaagtgcatgccagtaaaatcttgaataaaggagaattgttctgctcataccactattcggttcacatatttattttaaacacggaaaattagtaatatacactctcttgcaatttgttcttttacatgtcttgaagtttagcagctgatcttcgattataggtagaaagctacaaagataaaatatatagtcactgatgtgtctttctccaaaaaccatctcattattttgacaagttttggcacatggttcaattttttttttggggttctcattttctaaatcaaattttaactttgcctagaagcaggtcccagagtgcttttgtgatgtagtccaaggctatttctcttaactacatgttcccacccagccagtttgcgatgccttgtttgccttactatgagtttccaggcagtccttgtctccttttctcttccatgcgcggatgtgcctagcctttaacctaagtatgtatcttgtgatttttactacactggatattagctcgttctcttttatgatggatcaaacttgatgctcccttttgtgctgctttttgtacttgcacatgttcatggtgaaggatatttttcaacattactataaattcctccttactgttttatagcacaatatacatagttaaccatactttaaccattcttggaccacttagtactgtgtttttgactcttgatatttgctttcaggctggtgaatttttctattcagctcaacgaagtgcaacagaacaacagagggaaatgtcagcagatcaatctggcgattcttctctggagagtcctttattgcagcaggcataaaccataactctagaaagcaatatcttagatttctttctgtgttctcctggagccccccttgatggtctttttccttatttcaggaaatggtgacagatccatcaaaacaagtgaagcttggttccctgagcggtcttgtgccgaaggaaaaggctatggcctttgaacgcatacttttccgtgctactaggggtaacatgttccttagacaagaacctgtcgatgaaactgtcactgatccattatctggagaaaaggtcactatctctaatatcccttcgctggaaatttatggaatatttctaatattttttaatattatcctgtttcccatttttgtttctgcattgaagacagctgtaatcatttcaatcattttaatgagtgaaagatgcacctaatgagcatactatagggcacactgtaaaaagcttaagtgacatgtatctgtaaaacattagttttacaaatttatttttcctgctagttttattattctgaagttcagttgttctttctctcttttgaatgcttgtactatattgacaggtcattaaaaatgcatttgttatattctactctggggagagagcaaaatccaagattgtgaaaatatgtgatgcttttggtgccaaccgttacccatttccagaagatctaggcaaacagctgcagactattcaggaggtatgacacgccacacttgttgtcttcattttgatcttgttgcagtagttctatgagattttaattttctttttgtgtctccaaaatgtaagctgtttttttctcatctgaaaaatagttgattgcttgctgtagcctgaaacttgaaagaatttcatgccagatgattcttgatgtgggaatttctttatgtattaatctttcatgttggatgagatagttcctcttattttgtttattcacactattcatgcttaaattgatctctttttgtttccaactgcatttttcaaaacatatgttttatagcaattgtataatttaagtcagagttattgtctgttctgaaatatttgcaactctgtatttttataggtatctggaaaaatatcagagttgaaggcaactattgaaataggtttagctcaccgtgacagcatacttaaaaatatttcttccgagtttgagcaatggaacaccctggtaagcttgtattattcaagatgttttctgtaaattccctaccccacaaattttcaacctatactatttgaataacttttacgtctgtatattttcttttgcttgaatttaagttcttttgtgttttttatacaaatgtgccaggtaaagaaagaaaaagctatttaccacacattaaacatgttgagtcttgatgtgacaaagaaatgcttggttgctgagggatggagtccggtgtttgcaacaagtcaggtaaccagatgcactctcatccttctgcacttttttcttttgtctattgacacatttttagttttctatctgttttctggttttcattttctttatttcagatccaagatgcacttcagcgtgctactgttgatagcaaatcccaagttggttcaattttccaagttctcaacacacaagaatctcctccaacatttttccagacaaataaatttacttctgcattccaggagattgtggatgcctatgggtaagctcaagaagcatagtgctgagacacttactcttatctattccatgatttggatgatttattttgtctttatatttttcttaaaaaatattttagctttttataatacatttcttgattccttagagctattgtgtatcgttgctgtttatttcaggggtgcagtttccacacataaatcaatcctaaatgttataattcatgatacactcatagtaaacatctcaaaaccattgtaggttgcaatttttttgcttgtcattttggcaacttttgctttgtacttttaaaaatgttctttattaacttgcatgctacatgaagtacataatgagcatatacagatataaacggattataaatgtgttgtgagttgtgactttaagttataaaatctatgccaatacaaattctgctaaaaatgtgaattattctgatgtggtattattataattaaagagatagctagttttaaataatgagttgtgagttgtgactataaataaagtaaatttttaccttaaactaatatttttagttttactccttagtcatcaaagaaagatattcatggcttattagcagctaccaagaaaaaaaaattagttcttttacaatactaccctttgaactcacctccattgggaatttgggatcataacttgctgtattgaatacctggtgttgtttacttattaagaagtgcataataggggcctaagtggccaaatccaaacaaagttttgtgtactaaggccctgattggtacagctccagctccagctctagttccacctctcttggagctggagctcagccaaacagtttcagctccacctaaaatgggagcggagctaggtggagtgctctcacaaaatgaactagagatgtggagctgggttttggctgctctacaactccactccagacccaattcctggagctaaattttggagttggggctctaccaaacagggcctaagtgagaggcccccaaacaacttcactccttacaggagggagtatatgatagcataaaggactcaaatcatgtactatacattgtttgtatactaatattatgttaaaacattggctgcaggattgccaagtatcaagaagcgaatcctggtgtctttaccattgtaacatttcctttcttatttgctatcatgttcggagactggggccatggaatttgtttactacttgcaacactgtacctcataatcagagagaagaagctagcttcacaggttctcttgacagccttcattataattttattactgtggatgtcactgttactattaccctgttgaaattatcttagggattatatatactcccctaaagattaattaattaagcctaaagagaaagattaactacaagaagacattccattgctcctttattttctgtcagttttggatgcatacgtatcctggaacttagtttctaataactttgaatttggctttccagaaactggatgatataatggatatgatgtttggtggtcgctacgtgattttgatgatgtcactcttttcaatttacactgggttgatatacaacgaatttttctcagtcccatttgaactctttggtaaatctgcctatgcgtgccgtgatccttcttgtgggtaaggagcttttgaactgctaatttgcaaaccttatttgatgcctttctaaaatttaatgttctgccattgttttatagagatgctactacagaaggattaattaaggtgaggccagcatattcgtttggcgtcgatcctgtatggcatggtagccgcagtgagctgccttttcttaactccttgaagatgaagctgtctattcttattggagttgcacaaatgaaccttggaataatgatgagttactttaacgcaaagtttttcagaaatgctattaatgtttggtaagtaagaatcttctatggaatatgccatgattgagttgtatgacaataagattacatatgatacatgatatttttttagaactattatattgttttacttaaaacagtaggccattctcattcagttgtgtaactatgtaacaggtatcagtttattcctcagctgatattcttgaacagcttatttggttacctttcactcctcatcattattaagtggtgcacgggctcaaaagctgacctttaccatgtgatgatatatatgttcctgagtccaactgatgatcttggggagaacgagctatttcctgggcagaaactagtgcaggtttggccataatcattttttgctgctatatgttgattgtgttgtacatgcacaccgtattctgaacattttcttaatttcttatagcttgtactacttctgcttgctctggtttctgtgccttggatgctgattccgaaaccatttttcctgaagaagcaacatgagcaggtatgtgtttgcttgtctcagttgtgttcttaactgacttcccaccagagtttataaatacccggcttaatttctgtttttgctctgtattagaggcaccaaggccagcagtacaccatgcttcaggccactgatgaatcagtgacagagctagaagaacaccaggatgaccctcaccaccatgaggagtttgaattcagtgaagtctttgttcaccagctgatccacacaattgagtttgtgctcggtgcagtctcaaatacagcctcttaccttcgtctttgggctcttaggtacctctgaacttacatgatacataacaatgccacctcttaatgtcacatggaagaaattgacggttgagtaattctattgttcgtgcagtcttgcacactcggagctgtccactgtcttctacgagaaagttcttgttctatcatgggggtaggctgctctctattctactgttccttttctctctcacacaagttcgtgcgcgcacacatgctgacttgcttgctttctctgcaggtacaataacattttcatcctgatcattggagcagtgatctttctctttgccactattggtgtcttacttgtgatggagaccctaagtgcattcttgcatgctctgaggctccactgggtggagttccagaacaagttttacgagggtgatggatacaagtttgtaccctttgctttcgcatcaatcatcgaggaggaagattgaatctgaattgttgtatgtaatctagaatgtaaaatcgtaagagtccttcccttgaataatcattgtttatcaccattggtgaagattcagaaaaccccagttcgttgtgtctgagcaggggatgccaaatcattcttttttgcctacacgattagccatgctaggttattctgtatattatgatctgttattactttgagcggtgacaggagcggctgggacgaagttgcaaataagtctagtgcatagcataactgcctttttacatggtgctatgttaataaaagttctgtactcatggctgtgacacgagtgatgtgtcttttgaattacacttgtggaaataaataagttccattctttgtgattattatttcattgtagtggtttatcatccattgaccgtgaagctaaagtactaggactctggatttcactagaaatttggcgcacctgttggtgcgcctgttagatttagcccgttttgtattatttagagttaatatataatgagctttatgaaaatcattgtaaatcttgtaaaaaattatacattttatttaaatttcagcaaatagcttatatttatgtgttattttttgttgttaaaaatattattatttttctttcaaactataaataccataccttccactgtgtttgtagttctactttgtgattatatttcaacttctattgtacttccactgtgctttttatggaattaattcagctcccattgaatttctaccaagacttggaagaaacacttgatgggttattaatttgtaacttaacatgtataatagtagatttgttgaattgaaaaacctcaagattccctttgctagctctcatgagtctaaatcttggggttggatcgattggggcaccttccatattctggctcccatcggatggcctattcagccaaagaaaaagccaaattttgaatttttaaacttaattttgacattgattttaagatattttcaacgtagtttctttttcagcattggcttttaagtcaccgagaacacacatataaaagttttacctacaaatttatttttattttctaataagccgttttggcttattaaaagaaaagccaaacgatggggccctcttattggagctagtgacattcttattggagctagtgacattcttctagatcgcatctgttgccattttatatatgtagatctccttcataatacaatagcaaaacactaaatagtaaaataattagtgaagggaatttagcttccaacttaacctatgataaatcgaggttttctcattatccctgagaaccagaaatcttgatatttcccgtattaaacatattctattttttcgcatgaaagatacattataattttcaatagatttttttagtgatgtatggaacatagagagtttagtttatcttcatacatacagtgttggattcattttgtttctttcatcatctctaacgtaaagaagtagataaaaatagcttctatatgtatgtgatttattagatgtgatattagtaattttctagacatattacttaagcaactaaaaaaatatatagcgcaatatttttttttcttttgatattcttttgtccacttcaattgggaacttagtagaagttgatggggatgtgttgttgttgttgaagtcaaagaaaggaagaagtgcgagagaagagtatttgagacttttagcctagaaccctctagaagtttgtgctctcaaaagattttttttttcatatatgatcttatttacctgcaaatttagaggtgccaagtggtccaataggcttgcaggaaacctgccagctttagattagtagatttattgcagatgaaccttatgtgcaagaatcgtttgtcgactagactgaaaagatatcagagtaaaatgtattccttccatttcaaaatatagaaagttggataattttagaacgaaggtagtaattgtgattctcacaaaatgggtagaaattcttctgcaatcaaaactattttttttaaagaaaaaaaaatcatttttactccctcaaactaattcgatggatcacttaactccctgaacattttatcccccaaattattaaaaatggtttgttttactagaactactattagagcgcacttcgttcctagtattccgttcacattattatcggagtaaacgatttactttaataataaaaacaacttccctgcttcctattacaccccatgtctcgtcatcttgcttctagtattatcggagtaaatgatttacttcgataaaaacaagttacctccttattgtattttttcccgtacccaacttaacactcgcccccactttattttttccttttttttatctgaatcgatccaccatcccagcgcacagatcggtgatgcaccatggagtaggacgacgacaccgtggcggttgatggcagtggctagcggcggttgaggcgaaggcgctgcttcgggcctcgcagtcggacgccggtcagcaccttaactagcaaggaggtgctaagagcaacaaccgacgactgctccacgtcggcgacattgacaaaacaagcaagtgaggaaatgacactctgatttgcatctgcatactatccttcaccttcacgcatgaagctccaattttttttttacaaatcaaattaatgtgcaatctccaatattacttgatttgaattgatgagctactcaggtcctacatttgcacatcgtgcttcatgtggctgggtgcagaggatagggtggagtccgccgtgatggaggttgtttgctacttttcctttgctcgtcgtctctatgacatgaacaagaatgctttttgcatttttttttgcttgctagatgaaggatggctgctactgcgcaacgtcgagcccatctctataccacgctgctacatacttccatgattccatcattgactacagctcaccacccggttgccctctctactaccaatcacaagagacagatcaacctctttatccttattgcaaggtctagcaaagccaccaggatccctgtttcacgatggatttttggctgaatcatttttttcctttttggtttgattcacttgagagtaattttatcacttgtgcgtgattgtgcctgtaattttttttcatttgtacggccattttgtgatacagattaacaatattctcagtattagtttttactcctatactgtgacatcagtaaacatattactacacagtgactacgagatcatgggctatatcgagaggaacatggtaattgttttattcgtagaccacaaaatctaaataatatttataacattggtaaaataatttactactctctctgtccctaaatataggggattttggttggaagtgacgtattctactactataaatctggacagtgcacatgtccagattcatagtactaggatacgtcccatccgtccaaaaatcatttatattttggaacggagggagtagcgttctaagctggtagtaattttttacgaccatctaggaatggtgccgtatgatgtgggagtattcatgcaagtaaatttgttacttttgaatgagtagatgatggaggctgggagtaatggaaaactccacagagtaaattcgttacttttttgaaacgtgggagacactagaaaaatagaaaacttggaaagaaaaactagacggtaaatattttactaaaatgcgaaaacagaaaaattggagagaagaaaccgaaaaggaaaaggtggggtggtaaaaaagaggaaaaccggaaggagggagcgttgtgtggcgctcgaactaatatactgtgcgcagcacgtggatgagcgctaccgtcattttactccttaataacaattctctctttttgttactctttgtataagttttattttaagctgaaatttattagaccatggatggcacaattaccaaagttcaaaaatattttgaaatttttcatggcgtttgctcgaactataaaattttgatgtttaaatcagtttgaagtgctttcaacatatgtaaatagtgagaagaaaaaaaaatcaaagaagaatgttgatacgtaagttgtggatgcatctatattctaccaaaatttcaatgcaaaatatgacttatacagtgagaactgaagaagatgaatagagttaatggggttaagtgaaccgttttcagtagttcgggtgtaaaatgaaaaaaaatgaataatttaggggggggggggttaagtgctccagtgaaatagttcgggggagtaaaatggtgaggccataatcatggccactttatatattatcaacctaagttgcaagctatgtaaaaattgcatgttatatatttgaacaaatattgttgcatcgactttttatgttctcgtttgtaaaagtttttgtttggtaaagggaaagagaccgagcgtgggaaatgcacggatgatcaaagcaattgattgagaaccaaacctatacttttcccaagtctactcctatatcattacgtcacttttgatcaatagaaaacaaaagatgaaattctgcacgttttggattcggatttggaccccctgacagcatcatcttcaaacggactagtcactatctagaagggttttcgggggccatgagtacttgttaga

SEQ ID NO: 4803 - DNA, 1371 bp, Oryza sativa
caatggatttacttcaaacgaacatacaaagttacattcgttttgttctaagttacttctataatatatgtaaagtacttttaggctttactgaatttaattttgtatgtctaataagtaatttagtgaaatctaaaagtaatttaggcatatcataaaagtaatttgtgatttttcatcaaaatataatcatgtgagatcttgttgtaaagatttaattgttacgaacataacggtgtaatcgaattatagatcggataagtaatttaagagaaaatttcataacaagaaaaaaaatatgcataacctaatagaaaaactacttgcatgcatgtatgtaacgctactagtacttctcacataattatccgcgtcgctcgttaaatctaaattgagatgcctctcgaaatagattttgcgttactaaatactctcttcgaattttaatacaggacattcttgacttctaggtatataagtttaaccattcatcgtattcaaaataataatttattttgttaatttaagcatgacttaatttgcatctttacagaaagaactgaataatattaagaaacttaggaaacgtatatatattctttaaaacgtgaaacaaataaattgtttcgataattcgatcaataaagtgaaaataacaagggccggagtagacgcttggcttctctgggcttcaaccatgtttggttgaagggactaaattttagtttatgttacatcggatgtttaaacactaattagaaatattaaacatagactaatggcaaaatccatttcataaccctgtactaattcgcaagacgaatctattgagcctaactaatctatgatagcctatgtgatgctacagtaaacatatgctaattatggattaattaggcttaaaaaatttatctcgcgaattagctctcatttatgcaattagttttattattaatatatgtttaatacttctaattagtgtctaaacatccgatgtaataaagactaacatttagtctctgatccaaacaccgccttatccaaacaccgccttagctttcatggcctatcacttaaccctttggtggaggacggtgagttttccgaatgctctcgtctgatagtgtctagtgacaaccgagtttcaatggattaagttataggtaaaatttaaattttaaacttaattttaaattaatctatgcgctttttcattcttttctattacattgcaaaaagcaaaagtataatagctttatctaaaattatttttcctcatttatttttctttacagcttatcacgtggaggcgtgtagctaatcaatatgcttgggtcatcctcaatatctggcgcgaggggcttaccaacg

SEQ ID NO: 4804 - DNA, 1943 bp, Oryza sativa
agcatcacaaagtagataaagaaacctagagtctaaacaatcaagtaacaatcacttttcaggatggtagatgccttaaccaatctaatgtagtaggaagatttagctgatactggcaagaaccctaaaacgagaaccagccgatagaggtaaatctagatactaagactagattagctaagacatatgatagcagatgaccatgataaaaggattaaaatatctaaagcgacataatagccccgatagcacaagccatcgagacatgttacctcttgtgaagcgaactcgtcagaaagtaaaaatgaaaagggtggcaatgcgctgaaattgtattggattgtctctcatattacaatgctagggggttcatatttataccccgagtacagacatagtctattataggcacgactcaaacctttctaaagatgaaatacaaacaagaccatctacgacggtctcttacgaaatctctaacaaaccgacataacctaattaatagatacaattgtcttgcataagctctatttctgattggcaatgacggttatcttgatctaggcccatgtcgagcccaagttataccgtatcggctgcctgccatatcggccaagtcaagcttctgtccggttatcaaccgatacaatatttaaccgatgcgcagtccaactccagattcaactcgattcaacaccaaattcgtttcgatcttcttccttcttctccgaatctgacgcaaaattccattgttaacaaccaggtactgaaacctcattcttttccttttccaatcaatccacattgggctgaatctctctaactagtccattcccagaatcgtgtcatagcttcccaaactcagcaccttcaggtcacttgagaaactctgcccttgacaccaccattcagcatttggaaccatccttgtacaagacaactgcctcctatcagctattgtcactttagtggaagcaatatcctagatagccaatttcaactcctcaaccagatgctcagctaggaaactgctagaactccctgagtcaactagaatgagtaactcctgattctatatgagcccgtgtagtctaatagttcttttacccattgcaccagtgggagcacattcagataagaccaactcttcttcactgctttcatcttcttccaccattgtagactcttcttcttgattttaaaatacttccaaaagttcctccagcacctaaagttgcacagattttggacacttgtgccttgggccaaatttctctccacatttaaagcattcacctctggctcttctagctgccttgagtgaatcaaacctctcttcccacttgggcttttcttcaatcttcttattctcttcagggcttgctcccagtatacccttgccttgaaatggagccttgttgaaacttttgtatccttctctgaatgattgctttgagaatgccttcaagaagcccagttctccaagaagctcttcctgtgttttagccagagaaaacgcggcatcaattgaacgaggcttgtgcagcttgatagttgctttaatttcagtcttaagccctcccacaaacttagttacaaaaaaatgttttatcatacccttgttgtaaaccaacactttatgcatgagctcttcaaacttactatgatactcctccacacctcccatttggttatgattttctaattcctctagatgttgctggtacctatccttcccaaacttgctatggactgccacagagagttcagaccagttctctacacaatgcaattcctcatatgtctgcaaccatagggctgcattaccaatgaaatgcagggtagcaaacgaggaccaagtttcatagggcacttgatacatgctaaagtattctcactattagttttccacagttttgggttatctccatcaaattttgcga

SEQ ID NO: 4805 - DNA, 3212 bp, Oryza sativa
agaaatacaatttttgaattttaaacgcaacaaaaaacctcaaaaaaatattttgaattttactagccatcctatacatggttacacatcactacctataaattcacaatttttcacacaatataacttgtatgctacaagtgagattcgaactcaagacctcaacctccatatagagctcccttaccaactcacctactcaacacatattgactactaacccaatgttattattttgtctatgcttgtctgaatcatttaacatatatttaacaccctaaatgacttcaaatgaaaatattatcaactaaatagttatagatctcatcgtgttttataacttttacatagaaaatatcttcatccgatgttgtttgaagaattcaaaatttcatttttcaaaatatatctcactttataacatgtaaattttgtgaaatgaaaatattttcaattataatgtgtgtagatctgattgagttgtatgactttgatacggggcatgtatccatccatgtcatttgaaaaaaaaactcaaaattttgtttttaaaagtagatctgatcacttgtaatgcatgttcggggatgtaaacgatctctaatagaaatgttgttagttataaagttgtggatatcattgagagctacaacttttatataggacatgtttcaatccgaggttttttgcaaaatttaaaaatttgaattttcactcatcactgacgggtcataactaccacccgtcagagataacgttatctgtgacgtgtgttagttaaagacccgtcagagatgagtggtctcttttgtgatggttcataatactacacccgtcacagatgacttcacatctgtgacgggtcctccctggtagccatatattgaagaggatattttttcggcccgtcagagatgactcatctttgacgagttgcgttggcccgtcacagatgacccgtcactgaagcccggatctgtagtagtgcttaatcgtagattattttgtggtgtttacactttttaatcagtaaagataaggacatgcatataaaaggtttacctatatttttttattaagaaaaaaaatgtaaaaatttaaaaccataaataaaacgaaggcaacaatactgctctcactcccttcatctcaacaccataaacactagagattaaaaaccctagcattttccagtttcaccaaagatcatgaattgagaaaattctagttctttaccataagacaaacccatgtataatgtacgaagaaaaaaagacttaatgtgatagacacatataagagatttcaaaaaacacccattcaagaactcatcttttacaccggttagaaatccccattaatcccggttataacaaccctgacatctttagtaccggttgaaagtatactaagttaaaaaaatgtggaatgcaagattcaaaaaaaatgtggaatgcaggattcaaactcaagatctcctcagccctcatacgtgtcaccatcccaagtgcatccgacttgaatagagatgttgtcttttttaactaaccctagagacgtctttagtaccggttggtaataccaacggtaactaaaaatgtttctagggacttgaacttttagaaccagtaataaagatgtatttttagtactggttgttaacactaaccgggactaaaaatgtttttagtgacttagacttttagaaccagtactaaaacatctttagtaccggttcttaatctagccaaaatatttatgattttgggtaccacgacgaaacatttgcttatgagaagacattggcagagaactcatcttttataccggttggaaatcaccattaatcccgggtataacaaccatgacatctatataataccggctgaaagcataccaagtcaaaaaaaaaatatgtgaaatgtgggattcgaactcaagatctcttacctcatccctcaagcgcattatcatcccaccttctacatacgtttgacttgaacagagatactttctttttgaactagcccgggagacatctttagtactggttggtaataccaaccaggatttaaaaatatttctagggacttggaccggtactaaagatgtatttttaggactggttagtgttactaaaagtgtttctagggacttggatagtgtttctagggacttggattttcagaaccggtactaaagcatctttagtaccggttcttaatctagctaagatatttgtgattttaggtaccacgatgaaagatcggttctccagtagtgagagactgtcagaatctctactaatagaaagataatgcacgcattagatcttaaccaagaatgcacatactatgtcaagaaataaaatgatcaccagagaaccagaattgatagtactatagagttatataaaacataagcttgcattaaagttcctttgatttaattatcatataaaacttgtataagactgtaggaaattattttaatcgcattaaacatgcaaaaatgaaagcatgaagtctctgttccaaatagtgtctggtccactttctaaatagtgtctggtacacttccaacttcattcattaatttctagtgaaatccaattggaagtggaccagatactatttggaacagagacttcctgcagcggtaaatctaattggagaggcctctccaattagtcttaaccagagacacccacgtgctagtactttaggagttttggttgctattaatccattgagcaagtagaggaaatattcctatcatctatgcttcaaataaaattctcttaaattactcatccgatttataatccgattacaccgttgtgttcgtaataattaaatctttacaacaagatctcacatgattatattttgatgaaaaaccacaaattaattttatgatatgtctaacttacttttagatttcactaagttacttattagacatataaaagtaaattcagtaaagcctaaaagtaatttacatatattatagaagtaacttataacaaaaataaagtaactttaattaatgtcttttttcattgaacagattatcatatatactcccaggagtatgtactccatcttctctattggataatccattagcgtagttcaaaatgatttgtgctgaaaaataagtttttttttatttgtagcgtgcatgcccagtttttcggtgggttcaaattt

SEQ ID NO: 4806 - DNA, 12827 bp, Oryza sativa
  unsure (1)..(12827): unsure at all n locations
tattgcaaactctgggacatatactcttaaggaacatctgctcgttatttgtactagatgctggggcacgccaatggcgcgccgcctgcatatagattgcttgattagtgtagactaatcatttgttttcaggctgaatcaatgattatgtaagaaaaaaaaacctatgaatacatttgcagtgaatgccgttgatgagtaattttccatacattgttttacagattctgctgagaacaaaactcttacactttacaatctaaagatgaagcaccaatgcatataaaaaataaaatcaaagttttacataatgatcagagtaatgtccatggtgatgatacaactatatttgatcatacaaatctaccagtcaaaagaagacatattgtggcaataacattctccgctgaaaggttcacatccggagtattaattgcaatggacctgtccaagcacaatccatcggtattagtgagtttttttaaaaaaatgtttcagaggatatcttcaaatcagtatcagtgaacatattggaagctcagaagacacttattaattggatttaggaagtgtggcaacataattttcattttacctctcaatacagatagttatatcaagtgatacaacacgagactacatttgtatttattacatgaaaatgcagtgagagcaaaagaactctagaatttagattgatatgaaattaaacatgaagggtaagaaatttacaggataatcaactaataattatccttaactttttcctacactaaggcaaaagaaaatgtgtgtaaattaaattgactgtcactgtgaagatgatattctgtcagtcgaaaacgctaaaaaaaaatgcaatagcaatgcaaaagtaaacacctttcatcgcttgagttgtctcaagttgaaagccattcaagatccagaaagtttgaatcaccagaatgaaggcaactttctttcaacggctggaacatgatgtatctgaggtaccatgggtgtacctgtagcaaattttgagagaggaattaaggtttcaaaaacaaaaatggtagtagtccactatttaagacaccatgctttttcatgatttcctagtaaaatacttgtatgagaaggataaaggtcaaccctgaacgaatagaaaccaaccttaattttgatacctcactttcacagctcaatgaaatttcattgccatgtactgaattagattccaatactggaaattgtgacccacttttaacatgaaggcaaccactacatccagatatggatgtatttttttcacaaagaatgctgccatctgatctcactctttttattgtatgtggaattaaagaaaacagtataagaaccccttactgtttacagagtgcatatttcaataaggactatttttgttttattagaatgtaaccagcagggaagctacaaaaggtaataaatggctaaaagctctcgtttaaataggaacaaacatcctgctacagttcaaaaacgttttggaatagcaaaacagcataatatgcaactcctaaccatgttttcgctactgcgtaccattgactcctgtaccatgattttttcgctacttactgttttttaaccatgctttagatgatctctctgcggagaatatcttcagaaaatgatcatggtacagataaattagacaaatgttcagctaaaatgagaaatagaacaccatatggaacagagaaaataaaaaatgtgatgtcaagcaaatgggcaaatatattatctactgaagttaagtaatagaacagcagtgcagaatccaccaatgtcctccttcaatgagaaagagccttaccgcagcttatcattgtccaactgaagctaagcaggtttgtcaatataaatattgatttcataataaaaaaatcatgcaagggaagttcttttatgcgtgttaaataattcatagtggaagtctgaaagataagaaaaaggaagcactttagtgagcccaaatgctacttaagctattaaatcttaaaatcaaatgatgtaattccctttcaggcagccatgacaaccaacggatatcacttctccctagaataacccaattaaaccattgttcctaatttaatccatgatcaccacagagatgcacggtcacagttcaagtcagaaccaaaaatagagggaatgccatccagagcaaatattcaagattaccagaaccacttttaagcctagaacattcagaaattactccctaattaccaatttgcttttaaaggcagacgaattagtaatgaacatgtgcggaggcttgatgtggacggatcgaaaccaccgacttttaagcaactaaattaaatatacatggaacaccgacaaattccacgccattacatcaacataaaaatgcctagaatattggagtcccaactcccaaactaagctcaagtagtagggaaaattgtaaaattaatatatggtgcctacataatgttggcccaaacactgccaggaacaacacaacgtttaagtactatgttccaggtaaccacaggggtgaagaagagaactctgcaaatgttattaaactcaataagctatatagtactgaaaactgcgtccaaaccacaaatatagtcaagttgacattggcacttctcatatagattaagcttcaaaattagagttcgaaggacaataaacatgcccacgaaccaaccaaattgtccaacttggtagtataatttgaaacatgccaaaactctccatcccaagtttagatttgcaaggtgttatgtaacaccagtaacataacaaactgaactgagtgcagtcctgctcgatgaacaattattacaaaacacatcgagagataatccagaaagtattttctaatccaagataaatcatgcaatagcagtcctgtgaaatgcgaatttttttgacactgttcctagtggcaatgcaaaatgttgtatgcatggaaacacctctgccaccacccatgttcacactgtcaagaatggcaatctatacaacaaaaggaaatgtgcaattttatagccaaaaataaaaactaaatgaaaggtttaaaaaaagttcaagaccatgctgttagagcggcttcaagtaggtgtctagaacatagataaaactatacaaagggtaaagaaaatccttacactcgttcaacttacctagtagtttgataaataaaacaaggttaatacggaaggaagcctttggaaatgaaaagaaaaaaaatagttgcctgtgtatataaaagtttcaagcggcaaaataaatttaatttatgcactacatctagccaaaactttgctccaaacagctcaattaaaatgactggtactcaggtttcagcatcaagtagcaccatttgcatctctttgcaatgttgctatttccttcagcaaattattaaacagtagcataaccacattttcttggaatattttttagagtatagctaccacgcagtgaatatgctgataactaaatggcttgtatcaagacttgtaccaagatttttctggtctgaaatgtgtagaattcatccggacaaaaagcgagatttgtgcatcaggagagatctagctaagttttgcacttctgactggaaactaatcccacatatcatttgaatgtgcaggcaatcattcacagcaaactatcgagaaacagtaatggataaagaatttaatatagagtcaaaaggaccaaaatttgaaaataataccagcaattatattgttttatttgtgtagcaacaacatccatggtagatgcagattcctactgctcaagcacttcacgtatgcagtgacctttaagccctgagagagtggaaataaccattagatgttattatgatacaagtaatcatctgccaattagtgatcaaaataaactttaaaagattatttgggcgacatattgcattaagatcaaatngactgtcactaagtagccatgcgaaaatttcagtgagttggcatttatgatgatagatcaagagttcccccattgtgccaaagacataaataaacaccggtaatcgaactttgttagttgaaattatcatattcatcgactgctgatctaatacaggaaagtggcaagtctgctcgcacttgaagctcccaacgtctagtggagatggatgaggacttaccgatcatgcaccttgacaaatatcttcagctggagaaacctattgatagagatcctgtgcttggtggagtactcatcaagcacacactccttcatggccgcagcggtcaccgacggcggtgaagatgctaacaacaactctagtgtgtcttcgcgagcggcctacagaacaagcgaaacacttatgacagcaacaaaaaaatggatcacatagctaaggtccgcagattagggacctgagcgcaggcaccatcaacgcgacgtgcacgccgttgccgagccctgaagccgtttgtattcccctttaatccgtcttaacatttttgtgaacattgcagctagatttctgctctagaaaccaaaaactactcatttttgtaaataaaacagggaggatacaatataaacttctaaactaccctaaaatttagatgcaaagaaactcaattttcagatgctatattacttgcaaaaaaaaacttgagatgtaaacctgagtgaatgaagtgcataccgggagcaggcacagcggtcacggtactgcaaaccgcgcagcaaaccgacgttgctctggctggacggcacccaaagcagacgagctggctttgggcccctgaaattgcacaattatggctcttcagagttcggagactgactgaatgtcacatttcagcagctaacattttcattttcagacaacaaaagaatctaccatgcattaatttcttttaagacaacaaaactcagcagtaaaaaaacttccattttctcaacagggagttctctaaactttcaggatttctatgagcagaataaactgcaacctctgaaccaggaacaataacactatggcgaacactatggcatgtacatcttgggaaagattcaattttttgaatggtcgtgagaaatatcaaataacacttaggccaacatttctaggtgaccaaccaacatcagggaaaaaaaactcaaaaaagtagctgtgttcttgcagtgccaagttgtaatccataccatcgggaggtgtaaatggaacaagaggagttggatatggaggcaaggggaaccggcattgccgtgccagctgcctgaaccgatggcatcgcttgtagatgcttcgcagattgcggcagcagtcaggtaactaaaatcacatttcctttccctacatgaaagaaaccttgcagaaagatgcaagagaagctgatgagaaaacaagatttcagttctgaagaaaccagtgaaagctccaatggaaaattgttaaacatcacttcagtttgcaacaagaagtttcaggactctttatgcaacagaaaactggtttagcaatgcacatcagttgtaaaaaatttcagcttcttggttgaatctctcattaaatctgatgttcaggttctgtttacatataccaaaaaaataagaaccaccccataattcaagaaagacatatgcaaaaaaaagttaattattaaaacagaaatgaacgcgctgatgaagcctagagggggggggggggtgaataggctgtccctgaaaacttaaaaacaaatcgcatcggtaaaattcaaacagacccagaacttcctggtaaggaactccggaacttccggcctcccaggcccggaacttccggtgttctaagacatgaacttccgggtaacagaacagagatgaaattcaaatttaaaaacaggagactaagccaatcttcacaagatggtgcacaggtattctaagaagaggatatatcacagaatcatccacagaaatatcacagaaagagacaagagcgattttttcccaaagttcggatcttgcgatcctactctccgttgaggagctccaaagagctgggtctcgattaaccccttgcctcacttgtgcaaaaaccccagaggaaatccacagccttcaaccccaaacacccctaggcaagtttctagaattgagtgaccaccaagatccaactcaacctacttctagaaatccaccacaagtgtgggttgctctacttggaaagcctctagaatctcagcacaagaacttcactaacttacctcgttccctttcggaggagaggaaatcattcacaaacttacccgggacatccacaatatgcaacggattctcgcgggcgacacctaaccgtctaggagatcatctccaagagtaataagcaccgagatgacagcccacgagatattccaagtgctcacacaagttcctagtcttcacacctccccaaatcttcttctctacctctcaatctctctttctcacaagaattaggctctagattgagtggagaaggcaagaaacacttgggagaggctagcaacagctctaggtttgaaaagtgaaagtggaatggccaaggaacgagctggaaacgagctgtatatgtataacggctaggtgacgacatctagccgttactcataattttgaactggaaactagacaggaagttccggacctggaagacaggaacttccggactacacttaggaaaatctttttcacaagaccggaacttttggacctggaagacaggaagttccggacttgcacttttggacagatggagtatatgcaaaaaagactcctagggaaacttgacacttggttcacactaagagcacttgacatatctcagatcatcacctggaacccctcttaatagtacggtttttcctaaaaactcgatttcaaaagataaactatcctatgcacttctcgagttccggtccgctttgattttgtacttttggggggtctccaagcatccatcttccacacctttggactaatgcacctgaaagttactcaatgaactcattaatcccttaaccacatttgtcatgaatcaccaaaacccactagggggattaatgcactttcaatctccccctttttggtgattgatgacaacatggttaaagcttacaaaagattgaaataaattttgttttgaatagttagaggtgaatgaaactcccccttagtgtatgcatatggaagatatgagtgaagctcatatgcatatttataagggagcaaccgaggagagtttccttcatctctactcattcgtgggatgcaaataaacagtaagaatagatatgatatgcaaaagatacgacatggtgagcattcaaaaggataaaatcaacatcacatcacaatcaacaaataagacactaatagcataaatgaagtgcaatatatataaagagcagctaagagcatctaacagacattacatccacacaaatagagaattattacatgtccataagttcttaagagaagaggccaaaggactgccaggtccggaacttccggataaaaaacccggaacttccggacatgttgacaggaataaatagcgagggagctgccaggttcggaacttccagataagaggatccggaacttccggataaacagacggagtaggcagcaagcagcaaaaacaatattttgacccccttcgattgcaattttctccccctttggcatcaaggcaccaaaagagacaaaatcacaagggaagaagaggatcaagcctcatcatcatcgccatcagagggaataatctcggtgtcgccggagtgaggagagtcgatgtcttgcccggcggcgtccactgcctcatctggatctgtaggtacattctcagtaggtgcatcggactcctgatcatcactgctctcctcggagtgggaggactcctcattgaagaaacgagaagtgccagagggaccctcactactagcaatgtctcgagcagtctcataagcagcaaaaggatcaacaaactccttatcatcagaaatgtcagagacatccttgcctgctgcaatccaatcttccttctgacgcctctctatcttctttaccttcttagctgtcttggcacacatacaaaagatagccctgagagccttctttatgggagaagaagactcagaacgctgtggtgcagcagaggaagaaggagcagctgaggtagaagcacgagttgccctggtagaaggagtagctgaagtagagggagcatgaggtcaaaaaggcttgtgttgattgtccttgaaataacaaatcccagtcttggcctcaaccatcttcatgatataaggagcataaatgcagcccctccttggctcacacactgtctcatagatctcactccagataagcttcataatgctgaaatctggcttgttgtagcgcatgcgactgaggaggagcgcatgcctacctggaagggctgtagcatctcccactttggggagcaaagaccaccttaagatggagtaaagcactctatagtaaggacgcaacccacgagtagtccccaaacaatccttgggagcatccttctcatacaagaaagtagtgctggtcggtgacaaagcatcctcgacaaagatatgtggacgactcaggtcatcatcatctaaccccaaactacagcaaactgtgccatagagaccctatattgctgcccctgaatggtccacttcacaaaatcaagccccttcttggtggtgccaaagaaagcagtggagtagaactgtccaatcacttcctcattccaggaataatgcaaggctaacaaatctgccacgtgcttgcgctcacacaccttgcgtacctcattgaagactatgttgttctttgaggacatgtactgccagtctagccacttcatttctaccactggatgagatcttcccataatcacagagttataccaatcaacctgcaccaaggtcttgaatatgtcatcctgagagtcagcaggcagagtatcaggactcaccattctgtcctttccacacttgagcagattcttcagatagttcactcttggccgtctaggatcaggatcaacagcccttgtcttgtacagcctcaaaggattgctttcagaaccaggctcatcctcattgccaccatcatctgactctgatgcagctggagagggagagcggggagcatcatgaatgacaatgctaccagccctcctggaatagatcggaatctgactctcactgtaaaaatctccaactttttctttgcccaatctccccctaggaccacgaaccggggggctcaagtcagcaggaacatcttgtgaaagcttctgtctcttctcacgaggcatactgaccactgcaacaagagtcaacaaggttggagtgcaatgattaaaagaaacagtagaggaatcaaggttactggctgtctggacagagaccggaagttccgggccaagaacaccggaacttccggcctgcaaaactgaagaacagagggttcaatcaggccagtgcatgtgataaaatcctatagttcggcaaactacaaggtagcaggaagaattctatccaaaatgttttctccctaggttcacatatttagagatcggggcaaaaacatgatgaaccaaaagagaagatcaaaagtgctaccttgagagaggaagtcgcaaatcgatcgtgggatgatcctcctagccaccaatgtggttgattccatggagaggtatcaaatttccatggttgaaagtgaaaatcgccaagatgagtactgtagcggaggctagggtttgggaatcggggaggagaagaagtgaggagagagatggcaggctcgggctccctctgggtatttatacccccgacccccggaagttctggactgggatgactggaacttccggcctgacagaacagaaggcagtcaggcccaagttcaaaggaatagatgagaattcaaaggaatagattagaaatagaaacctatggacatatagagacttatgatgcatatgaccagccaacaatcaacattacataacaatggtcaatatacatcataagaagaggataaaaaccaaattttcgcaataaaaacacacaaaaatttttgcaaattttcacaaaagggtttttggataagagagggaatgtttgagctttattcttggtatcaagaccatcttctacacaagaagtgatctcaagacacaaaagctcaattttttttatatatttttttaaatttacattttagtgatacatgtttggctatgaattagccaaccacccatcacctaatgttacaagagtctaagatattgagctcactcccaaacttcttgagtatgtctttcacgtagttggtttgagagatgaaggtgccctcttgtgcttgcttcacttgtagcccgaggaagaaggtcaactcgcccatcaaagacatctcgaaccttttagtcatgatactactaaattcttcacaaaaagaggcattagtagaaccaaatattatgtcatcgacataaatttggcatatgaataaatcactcttaaattttttagtgaagagagtagtatctgcctttccaatttcaaaaccattcttcaaaagaaaatctcggagacattcataccaagctctaggggcttgcttgagcccgtagagcgccttgtggagctcgtacacatggtttggcaactttagatcctcgaaccccggtggttgctccacatagaccaactctgagataggtccattgagaaaggcactcttgacatccatttggaataacctgaaatcatggtgagcggcataggctaaaagaattctaattgactcaaagcgagcaacaggtgcgaaggtttcaccaaaatcgagaccctcgacttgggtgaacccttgcgcaactaaccgggctttgttccttacaaccaccccatattcatcttgcttgttgcgaaagatccacttggtgccgatgacattttgcttgggtctctccaccaaagtccatacttggttgcgagtgaagttatttaactcctcttgcatggccatcacccaatccggataaacaagcgcatcttccaccgtagttggttccaaagaagagacaaatgagaagtgttgacaaaaacttgcgacatgagagcgagtagttaccccttttcttatgtcaccaagtatgttgtcggcgggatgatctctttggacagtgtgatgtatccttggatggtgcactggggggacttgagcctgatcaatatgctctaaagtgcccgcagcatcgatcccatccacttgtgccgttggcacgtcttcactgccactggtccggaggttccagactatagaacccggaacttccgggcctggagatgtccggatgttccggtcaataggacccggaacttccggctcagcagacacagcacttgtagggctattggatgtcgatgacggaggttgatccctatcttcttggtcatcctgcgtttcgactggtcgtatgtctccaatagccttagtgcctatagcttgacttggatccacatcacctacaacatgtacaacaacttgctctccttgggagccattagattcatcaaatgtcacatccctagtgacttcaacaataccggaggttctgttgaagacacaataggcatgtgcatttgattcatagccaagtaagaatccctcatccaccttagatgagaacttcgatgagcgaggcctcttacttaaaataaaatatttgctcccaaagacacaaaaatatgaaacattaggcttcttaccactcaagagctcatatgaagttttctttaggattttgtggaggtacaagcggttgatagcatgacatgcggtactcacggcctccgcccaaaagacatccgaagtcttgtactcatcaagcattgcccttgcggcttcaatgagggttcggttcttcctctcaacaatgccgttttggggaggaccatagggggcggagaactcgtgcttgattccttcttcatcaagaaattcctccacttgagtgttcttgaattctcctccattgtcgcttcacaccctcttgatagtgagatcatagaggttttgggcttgctttgcgaagcgcttgaagacatcttgagcttcgcttttgtcatggagaaagtacacctaagtgaagcgtgaaaaatcatcaacaatgacgaaaccatacttgttacctccaatgcttatgtaggccacatgcccaaataaatccatatgaagaagctcgagtggtcttgttgtagtcatgatattttttataggatgtggactcccaacttgcttcccggcttggcaagcactacacacacgatctttctcaaaagaaacattagatagaccaagaatgtgttccccttttagaagagatgccaaattcctcattccaacgtgggctagcctacggtgccatagccaacccatagaggatttagcaatcaagcatgcctccggattcactctatccacgttgaaatcaatgagatagagatcaccctttaacacacccttgaatgctatgtaagagtcatatcacctaaaaacggtcacatccacattggtaaacaagcaattaaatcctaacttacacaattgagacacggataataaattgtagcttaatgaattgacaaggaggacattagatagagattgattcttggaaatggcaatcttaccgagacccattacctttcctttaccatcatctccaaagacaatatcttcacgacttccaccctcctcatcaagacttg

SEQ ID NO: 4807 - DNA, 4002 bp, Oryza sativa
tagggcggtcaggagagggaatattccacgaatatgttggatgagtgcatgtgcttctggtcaaattgggtagatgaggatatccacccttactagtcttgactgttagtaattaatcagtgataattactatattctgttgttaattagtaattaacttgtcaaaaatagtgttgataagatataattagtctattttatggccaattagtatagtttggggtaaggttaacgataactaacatatgtcattgttacttaatagtttattgttttcattctattcaccctcattcatctaaccatacaaaaactagatggttgtatccactcaactaaacaaaatatggatcaccatatccctcaaatatggatcgccattattgtatccaaccttgaccatcaactaaaagcaccctcagctcatgagctactcgcaagccagctcaagatggctcgagcaaacaaaccatgagtttttcatccagccctagggccgaggtgaaataacttctaagttaggggtccttgaacttgtttaggctttgctggcaagtggtctaggtcattttgtttgctagcaagttcattgtctttctatccttttgtttatttttgagttttgtacttttttttcctattctttgatgaaataatatgcagttctcctatgtattcgagaaaaaaggtatagaaggaaaaaatcacttggttttgtttttgtgttttaaccaccaatctggataaaacccatctctcaactttctcaaattagttgatactcatcccttatacttccattattcttgttgacaatggttttcttaccactgttgaactaatctaaataaatttgggcaatctacatttctagcccttaaattttgctcaatatctacttcttattctaacctaaaaagcaggttattttttgtccccaattttctgaactagacaaaataacccctcagagtatttttaagtagttgtgtataaaatggaggtggttatacttgttcataattttattttgttgacatatgtgtgacttaattaattcacaagcattaaacttacctaattaaagttcgccttagcataaaattcactattgtaccaatcaaaattaccataaatgtgtttagggtgtcatggccccaactttttaaactgacacatatcttgctaaacttttcgtgtaaagcaggatgtgatgttgagtagaacagaaccatggaagaagtagtactatatgtgggactagctggatgatgatgtgactccatggaatcctttcttactataaagttgtaacgcactaattcctaaaacttaacatgcaaagatgccacatcataaccctttaacaattattatatttaagcatcatgcaagcatctacgttacctggatactcctctcaggcctcgtatccgtatcggatacgaggccggatacggatacgtatcggatacgccccgatacgtatcccgtacatatcctctcttttcttgattttcaaataaataaaaaaattcccgatacatctctgatatgttcaaaacctaaatccatcgatcaaatccccagcctgcatcgagcgaaccaaattccacagtccacaccaccagcgccgcctccccaagccctgattctgctcgctctctcctgcgtggctgcgtcgtcgccggctcgccgcgtcagcgccaccgtcgtccaccgtcgccgggccgcgcctccgtcgtccgcggccgccacgccgcgcttccgccgtcgccggcttgccgcgtcggcgccaccgccgtccactgtcgccgggccacgcctccgccatccgcggccacagcgccgcgcttccgccgtcgccggctcgtcgcgtcggcaccggcgccgccgccgtccaccgtagccgggctgcgcctccgccgtctgcagccgtagcgccgggcctctgccgtccgctgtcggctctgccaggcgcagctctatcgtgaagggaaagaactcgatgagcattcttcctttttctttcatgtgaatgagatcttacactctcgatgggcaaaaaatagtactcccctgcattgcttggcacactcactaaaccccaataaagttctaattcattttgttttttttccatatcttgtaatagttgctagcagcttgattttttttttacaatgtgtaggtattattgtgaaacttggtcggaggatgttccaactagccaaggctctcatatggatgcagagattttagaaatgagaaataaatgttttagaaggtatttctctgaggatgacttaagaaggatcaaacaacagtttgcagatttttcattgtctgagagtgggtttaattcctttgactcaattgaagatagagcccataatggaatctgatggttggtcgcttggtgttggcatgctctgctctgctaattgtctagtttactcttcaattttttttgtattttttaatatatatatatatatatattaatatatatatacgcgtatccccgtatcgccgtatctgggttactgggtaacataggcaagcatatgctatattatctataattttataaaagcttaacatgcaaagatgccacatcattatccactaacaattattacatttaaacatcatgcaagcatgctgtattatctataactctataaaagcctaacatgcaaagatgccatatcatcattcactaacaattattacatttaagtattatgcaagcactctatattatctataactttatagtttattaaattttagagatataaaatgtaagcatgttaaatcattccacataatttacataatatttcaatatatctctccatcatttttttaatattctatatatctatatagtttatcctcacttggttaaatattatttctcttttctctcattaagccataccacatcaattgttttagcccttggatatatgcataaattatcttccttctcttgttctctcataaagccacatcatcttacttttaaatttgaatcatcattctatatactatttaaatttaaatcatatcaacttatgtaaacttatgttgtttacgttatcttacacattgttttttacttattgttatcatagtaaactcccgctgcaatgcacagggtttcacctaggtagtgatatgatcgctacaccacaaaatcattctcaataccaattaggaactttttttaaaaaaaaaccaattaggaacatattttgtctagttttgtaagtttattgttgccgtcatctagtttcgaagttgagggacaaaaattagacaacacaagtttaagagagatattggagaattggcttgtaggaattgatgaaaaaactaacaaatttatggggcatttgctatatgttggactctataactttgtagaaataatatggtgttggacaaatccttatctaaataaaaaatgcagatccttttcatagcaatgttctgattttggttttaggcacaactacaaatatgtgatgatgacagtgatcttatacatcatatcgtaatttagaatgaacagttatacttttttttttgtcaactatggatggagatttataaataggtttcaacaatgttggatttctatttcatattaaaggtcattagtttgtgcatcgtatcctattcttccgtgctatttgttgagaggatagtatgtgctcttctttaagagaatggtttgtgctctttattgagtgaattttagaataattagctatagttaatttgaagcaaatgctaggatttatatccttatctttaaaaaaagtttaagagaaagataaactttttactcataggaaaacatatacttgccgtatgggccgcacgaacaatatgcacgagacgttcgtagtctaccattttataccgaaaataaaaacgaaacgagacgtattcgcccacagtaactgcctgccgatgggcctcttacgt

SEQ ID NO: 4808 - DNA, 10469 bp, Oryza sativa
aaaaaaatgtggattgctgagggatttgtcccaaatataagaggatatacacaagaagaagttgcctacagatatgtagaagagctggcacagagatgtatgatccaaattgaagaaagaagtaaaaacattgggtggataaagaaaataaaagttcatgatgtgttgcgtgagtggggaattggacaagccaggaaggaaggtttcttgaaagtttgctcaagcggcacagatgtggagacttattatgcagatgaacagaggtgttaccgtgtagcatttcatggttactttgataatgaagtgggaaaatcagttctgaatctccgttctgtgctggccttcaaccctgatggcaaacgtctgttttctttcaatgggttgcatttgttgagggtgcttcatttttgcagttccttaaagacatgtaccttgcctgaagaaataaacaaattggtacatctgagatacctgggtttggaaggtagtactgttttcatgttcccttcttatatgaaaggtcttagaaacttgcaaattcttgaagcaagtacagctactgtcaaggcacttccaagttccctctggagcatcgcagcactaaagcatgttcatgtctaccaagtactgcattggaaagcccaggagattagaacgaaacgaagcttgcagactctttatgtattttccataatgcagtgtgatgctctgacgtggaaaagaacaatcaggtctctgcaaaaaatgagccaacatgtttcctggtgcttagggatagcctctactaaacgcgtgaaggaaaaagagacccaagaacatgaagaatacaatttagatataagggtagatgccttagaatccaaagttgatggtttagaattgtctggatgttttaaagagcgtcacgttctgaatgatgtgcttccacatcataatctattcccaaactttctattgcagctcaagatatcttgtcccaatatactaaatgatgatccaatgccaattctggagagacttccacgtcttgaagtgcttgaaattgttaactcatcatacacaggaaagagaataacatgttcttccgagggattccttgcattacgcagtttggtacttatggatattggtttggaggagtggaatttgcagcagggatccatggcgtttctcgctgttttgactctcaagtgtaccatgctgaggagcatctcaaatgtacttcaccagctggatgatttggtagagcttcgcttgatttgcatgcctcagctctctgttgatgatcatgagccagctagggggaggggatgccgtgtcatgatttcagttgacgaggaacaaacttctgatacttgaatttgtaagtgaccccatgcttgaactaacttcattgccatgcctctctagtttcagctacaagaaagcttatattctttccccattttggataaattgcaattttgttattcctgaggatgcatagcaactgacaacatatctgatctatcttcttatatgttaaaccagagggtttcccagcaaaataatctacgacgtcatcttaaacacaaagacttcccgatctttcattctggccatataggctgtttgatcattcatatacgcaaaatatattcagcggccttcatagaacttccatcacttgcatttgcaaccaggtctatctctttctctcctgatgtactatctcccactccttcctttccacacttgggatgccgcctcctgttccccacaaagcatcataccattcccaccccttttggtgaggtccaagatatcgaggcagaactgcagcagaatttccatccacaatcaccttctaaccagacaggacgagttttatttcttcctcaagtaagcagaggaattccattttctgtaagtttgtgataggttgtttttttcttgaccagagaccaaagaggctagctttttgtagaaagcagtatagtgtacataataggatgtgtttaactcaattgtatatagtgttttagttctgtatcgaaagagttcttatgcatagaagatgccccttaaaaaatacatgcaagatatgccatcctgacccacatgtcattgactcatgtgggtcctacatatcattgagataccgatggcatatctcaaactttacaaaattataatggcatggttccaaattacccatactagggaaaattggaactatgctatatcggggtggggctttctatcaaaaaagcaatttctcaacagtcaggtttgtgtgatccaaattatgggtatttttaaagtttctaaatgtaaaaggagcagtttatggattatggttagcaatattatggattatgcttctgccatttgttaagaatattgaagacgctgtgtatatagccaaatatatttatatattacaaagcagtgtgtcacctagtttagtttgtgcttctactgttcaatgtctgctgctcaactggcttgaatggacgcctagttggccagggttcagaatttcataatgaaatttatgaaatcaggtcttccgatctcccttaggatatcttttccccccaaaatagaaaaagttgtttaaattcagtcaatgttagttcaattttaattgtattttttaaatattccagatatttctgttctatttgtaccccaaaatgtttttatttccgcaacttgggatgaattttgcagaaagaattaaataagccatatttcgttcagatttcaatttttttgcccgttttataaattattttagaaagtttcatctatatggtcgcaaagtattgctaaccattacttagtagtaatatgcccgtactaacgctacggcgatatttagtaatgtgaattaaacaatcatatgctaaaagatacatattttagcaaaataagttcaaatgtctcaaaacctgaaaaaccaaacaatggtatatatattgttgtaatatatttggtctaaaaataatttcatattcctgtaaattatcgtacatgttgtagtaacatggtaaatttgaatttaccaaacctaagggactgtgatgccaggatctacaggaactctagcataatgttcatatcaagcagaacatggtgaaattcttcaactacttgcatacacaaagtgctcaaatctgttgattacttcaggtgatggaatataatcacggaaaccacaaatctaactgtagatgcctaccaacaagtaaataattgattgtttaaagaatctcaagaacgtgtgttagcttgctattcctctatagcacatgaaatttactatgatggtgggaacaaaaatcatgaaatttatttgtcgcagctctaatttcctaatgaacatgtacatccatcaggtattttagttgatgcagacacacatggaacatatattactcccatagatatgcacctacatagtgaaagtagtagaaagaactatccatgtgacaatcattaaaaccttgagaacaatctaatcctaactgataatatttctggtcatgcaatgcagtttgaaaatcattatctaggcagactttagtattatgggtagcagcagcacaggtatatcaagatagtgactaaattagtacaaaatccctatctctgaaggacacaaaagacaacaataacctgaaaaatatcttcaagatattttctttggcttcattagaattgaatcctaaaaacccacacagctccttgttcaaatggtattcacatagacactacttagaattgattatccgacacaaattacttgtgcctgaataaagtaattcagcaagattcacttagcataatgccatagtagcatgaaatgcaaattgcggttcatgcacaatccaatcatcagacttgcagggtacaccaactctgactctatattctttctgtttctgctctctaattagtgatagtgaaagcctctgttttgaatattatacaattgctaaatctagcaaagtaatcctgcaaatcaaacggcacaaaagttaatcaaaacaaaacgccattcctccatcagaattaataaaaatccaacagggagattgatcaatttgtcatagtaattaaaaaaaaagctagctagcaatagaacagagctattcacctattcttggcccctcgtctgcatcggcatgccggcaccccgtctccactttcacctctccacagtgcctttcctccaaccctaggattacatgcagattacgaaaaaaatgggactgcatcctgatctagtagcaaggaaccggatcaacagcgtgtgacagcgtctctcccgcaacctcctccatcgtgctggcctccgatcgagaaagcgtggtgccccagcggttgtgctcatctccggtgaccgcatcgctcactccgggtgacgagcagcagcgatgagcgcgcgacctcgagcggcggggagagaggagaggttagggtttagcgttctacgggaagctggggtcagcggcgacgtcaatcgtggcgaggcggtgtgatggtgaagatagctggcggcgcgtgacggcgtgagagggagaagagagagattagggctggggaggagcgatcacggtttgggcgcggttggggtgggaagggggcactcgtttgtggggagggtgaatctggagcattggatttcacagggataatctagaccgttgagcgatgaatgaaagaatgaaagaatgagtgaaagtatttgttgaactatagggtagattgccaagttgccattatcaagtcatggaaggatttcaattagaaggataattcagtcatattttttgcatgcatatacagagtcacatacgcatacatatacagatttagctagcacggcacacattcaaacaccacatatatgtaaattcatatgctatgacccatcaccaaattgttcaatcaatcaaattccaattaaaaataaagctgttaaatatgaccacacactaataattgaaaatgatagtctaacagtttcttgaaccactataaacattgggttaacgattgggatggctaatctctaattgttcttaaactactatggaatcaatgatctcaaaaactatgaactattgcattattacattacatattgtgataattcaaaaaaatgcaagaaaaaatacgcctttataagattttgcgattttgcttgttgtttgccatggccaactagttgatctcgtcatatcaccttgttggagcgtagggcaagggcattgagatagaacttcttgagccatgcactatcgatattatttcgccttgccttgccagatcaatgacccaagagcttggagtggccagattcagcaggcactaagcttcgagtggccaaattcagtaggcactgagcttggagtgaccagatctaaaaggcttcatcttcctgtcgccatcatagtggcccatccaaagatgttaccatgcatcggcatactgtgttggattcgataacctaagctcgaagcacttgatccgcttggcattttaaagcgcgccaaccatgtggaagcaaccagagggtgccggtggactctgcgtctcacagtgcctaactggcttggacttactcacaacaacaaaggagggagcgaaggggatggcaatggatgagtggccgctgtgagcctagatctgacaggtggaaaaggggggggggcagatgagaggcaaatagggcaagagatggcatagctagctaggacctcatgtgagaagaaaaaagtcacataggaagcccgtggggtgggagaatagaggcagagtggttgatcctgcctaatctgtaaattgttctctcttcttttttctttgagaaacatagtacaaacgcaggcactcataaaacacgtatactcacctctatgaacgtacacatgcacatcctaccttatgagcacctccagaaaacttggtcggcataccttgagattgacgaagtcaccaatatggacgcctcgctaccgacggctacatcgcctaccactgaaagaataattaaccataaatgcgagtaggcgtgtctagacttgaaccagggtaggttagttctaccacaaggaacctaaactacaaataataaataatgttttttttatcaggaagtattaaacatcggattcacatttttaaccgttctcaaatatgaccattcgagtttgatctctaatggttcaatgataatattaagaaccgttaaagattagcatatgttgctttgtgcttagccaccatggaaggagagtaatattgacgtagtgaataaaatttagttgtatgtactaaatctcgttatatgaattaatgtgtaaaatttgaaaatataccttgtttttgaagtttttgcgattatatacatttttttgaaagaatggtgaaaatatatgagtaccgcgatatgaagacgcacgactggttgtttcgtgctgcgtggaggcacgagactagttgttacgaactctgggttcctgacgaatcgcacagggatttgagggatttgaatcaacgagattttagagttgcaagaggaagaaacagagcaagcagaggaggaagaggagataggtagttggtttgatagcttcttgtttcagctgtcgtaggttctcccatgtcgccagagtagcaggaagaccagtccatattgcaccactcataatgtacaactgccttgccacgcttgatcaactgtcggcgaaggatggcttcgggctgcacaactgtagaatcatcaaagcagttaaggggaagatctgcgctttctggtgtgttaggcttcagagcttttttcaacagggatgcatgcacgactaggtggatcaaactcccttctggcagttctagatgatatgccactgctccaacatgagctaacgccttatagggaccaaagaagcgaaagctcaacttctgacaggatcgtcgagccattgtcatctgaacatagggttggagtttaagatacatcatgtcacccacttcaatttccactcagatcaatgtttatcagcttgtgccttcatttgttgctgacctctaagaagttgttggtggagtatctcattgaggtgtgctctattctgtaaccaaatctgaacatctggcacagtacctcatatcaaccaagccaaactgatttggttgcctggcaaacagtgcctcatatggggatttgccaagagcacagtggaaagatgtattgtaccaatgctgggcttgtgccaaccaatcagcccatttgtgaggacaagcatgaactgtacacctcaaatatgcttctagacattgattcagcctctcagtttacccatcagtttgtggatgatatgaggagctcatattcaacttaacatctgccaaacgaaacaactcttgccaaagtgcactggtgaagaccctgtccctgttagatatgataacttgaggcatcccaaagacatcatagatattatgaatgaaagcctttgctactaacaaggctgtgaaggggtgagtcaggggaatgaacttagcaaatttggtaaatttatctaccaccgctagcactgtatcatagccatctgacttgggcaatccctccacaaagtccatactgattgtatgccaagcatgcagaggcactgggagaggttggagcagcctaggagttttgcaatgttctgctttggcctgctaacaaacagggcatgtctgaacaaaagtaatgacatcctatttctgacctggccaagcaaaaagattcttaactcttttgtaagttgcatgtataccagagtgacctccaacaccactgctatgtaaagacagtagaacaacttgtttagcttcttgatggtttccaagccaaaatttccctttaaacctgattactccatcaacaagagtaaaattgtacaatcctgcaggctgaagggtaagtttctgccgtaactgttgagtgttagcatcctcatgataactttctatcaccacttccaaccacctaggctggcttactaagatggcctgaagcacttcttttttgcgatagggatggcctgaagtacttcagtctcttcttttctagataaagcatctgctacactattgtcttcccctttcttatacctgatttcgtactgcaatcccatcaatttataatgaatgctttatgctgcatgttggtggtcaatctctactcatctaggtgaatgagacttttgtggtctgtatagataacaaatggggcatgttgcaaatattgtttccatttctcaacagccagtaacatagccatacattccttctgataaattgacatggcttgtgatcttgggctaagagccttgcacatgaaagctagaggatgtcccccttgcatcaggactgtctcaattccttctctacttgcatcagtttccacaatgaatcccttagagaaatcaagcatagacaggataggagcttgcactaatctttgcttgatcagatcaaaagcttgttgttctatgcctgaccacttgaaggccacatccttcttaagtagatgtatcagtgtctttgctaacactccatactgttgtatgaatcttctgtaatcgccggccagttccagaaatcctctcagttgtttcagggtctttaccactgaccactcctgtactgctttaatttttgctggatctgtggcaacactgtccactccaataatgtgtccctggtactccaaatgttgcaaggcaaaagaatacttaatgattttaatcaaaagctgatgctgctgcaacctagacaacactgccttacaaacttcttaatcatatcagcaaaaaatctgttcatcagctgttgaaaggtggctgaggcattagttagcccaaatggcataaccttgaattcatacaacccttggtgagttctgaatgcagttttatactcatcattctctatcagtcgaatttgatgatacccagacctcaaatccaactttgtaaaccactttgatcctgacagctcatccaacaactcattcacaactggcattggatacttgttcttgacattgatgttgttgagagctctgtaatgaacacaaaaccttcaagttccatctttttccttcactagcaacacagtagaggcaaaggggctgaaacttggttgtataattccctattgcagcattgttttcacctgtttttctatctcatccttttgagcatgtgcatacctgtaaggtttggtagtgacaggtcttgcattaggaaccagtggtatcccatgatcaaaatctctatgtggaggtaatttttttggctcttggaagattgactgaaattcttgtatcagctcctaaactaggagtggcactttttcacaatcatctgaacttccagaaattgcacacaactgcactagctgagagattgatcctgctttggctaaaccagttaattgcttccctgatatcaacctacactggctagttagatccttgactccagtcagagtaatgttgcttcccagtgttcatgtaaaaacacggtagcctgggagatctgcttaactccagtgcaggtccaaggctagccttgagtgtataaaggacgtgccagctaatttaatcctgcaatcagcaagcaagacaaaatagtcagccgatcggccgataggctgatagcgtatcgttggtggtctcagctgatgtagttagactaaatcggctatggactggatatatcaaagaatattaaaccctaaatacgccttattggctgtaacactgtctatcaagattgataaagaagcttaagacaatattatcaaaatagccgatgtaatagtatctagagcaagaaagaaaatgtactagctaataccctagtacggacttatataggcaaatcaatctatataaatatatcaaactgtgatcagtttgtagtttagataactcagccaataccgatctagcctgatatagctatatggaatgatatgtctatatatgtggcaaatatatataaaacttactaaagaagcatgaatattaggtaagatcagctgaaactccgatgatatccttaattataattgtttccaggttagtttctagggttcaataaaagactagagatgatgcatcacaaagtagataaagaaacctagagtctaaacaatcaagtaacaatcacttttcaggatggtagatgccttaaccaatctaatgtagtaggaagatttagctgatactggcaagaaccctaaaacgagaaccagccgatagaggtaaatctagatactaagactagattagctaagacatatgatagcagatgaccatgataaaaggattaaaatatctaaagcgacataatagccccgatagcacaagccatcgagacatgttacctcttgtgaagcgaactcgtcagaaagtaaaaatg

SEQ ID NO: 4809 - DNA, 21162 bp, Oryza sativa
agctccatgtcatcatggggtacatcaacacctatacaaacaactttccaaatacttggatgcaaagagattagatgcaacttcatcttgtgcttccaagcggcgtaatgtgtcccatcaaattgaggagcacgcccggaaggcatggagacaaagttgtgaggggaatggtaagtttgctgtaatcaaaaggtatagtagctcccttgggtgatggagttcccttgctgctcgctccatcttcatttccattttctccgttctttccacctaagtccgacatcgtggatcactcaaagcggtgaagcttgaatcaagagcaccttgctctgatactaattgaacacgcagatgaagtctagagggcgggtgaataggctggccctgaaaacttaaaaacaaatcgcggcggtaaaattcaaacagacccggaacttcctggtaaggaactccggaacttccggcctcccaggcccggaactaggaggattaatgcactttcaagatagactaaaatttgcattttgcggtgaacaaagatgtactaattattaattattagacagggcaataccatctatccatttgctcgccatacggccaatcggggatatgctctgcaccatcgtgacactctcgctccttctgtccagtacacacagaaaaacaaaaaaaaaaatcagaaaaatgaggattgcagtcaagagagatgaggaaagaccaaaaagctagattagtaaacaggtcacaaccgatggaaatatgcacaccacagcagtagttgaagcacaaacatgggtgtggaggtggtgccgttgccgatgcccaccatcaacgaggccatggcttcctgatccacggcagcaatggatccgctcgcgcgaggatagagccagacaaccggcgacgcgtgaggataatggtggcagcaccgagatgcacccctaaaaagggtattaggagagccagaaactcttttctatactcttttctatcaaacaaaatatagaagttcatttaccccaacaattgtagtagcaaacaagcgttcaatttaaaacaacactaagtctgtcaatcattgtaagcgatgtgtacttcgggaatttcctaatgattttacattacagcagcatggaaaagcctaaagcatttctggtctgctatagcagcaagtaaattgcatatgggataaaatcaatatggacataccagtattcttttttcataaagatacatagacagcattctatgtataacgagcttaaaatcaccgaactcttgactcccgttgtcagataatagctttcccatgattactgtaggggtatatatatgtccagccattgcctcaattatttctccaacaaaatgtgaaaatacactccgcggtgcattcaagctcctctggtaagctgaaatccttgttttcatgagaatcctttgtcctttggctgtctactcgatgattcactcccattgggcctgaaaccttttccatttacatccttgtttttcttttcttttctgtattggtttttgccggtttcccgtttaattaaccgtgcttgtttggttttcgggcccgatttcccttattaactgggccaattctgttcttctataaattccggcaggagattctcctgccgttggttcctaaaaaaaaaaattacatccttgcttccatttaaggggctctgagaagctgaattgataacataacaatattgatgtcaatacatctaccagaacacaagacggatatctttgtatgaccacagcaagcaacaaacgtgacaaatcacacgactgtaaagaaagccttacgcaattccaatactataggttgatttatatccttttgaaagtcctaattaatctaatgaaaatttatcataaaaattaaggccttgtttgaattttttttgtctgaactcacaatggacaaaaaatgaaaaaagagaaagatgatattagacaatataacagtgagaaagagcccaccccatccacgaataacaacaatatgattacttgaaggagttaatgtacgcagcggctgacggcgtgtgaagaggcggagcccctcgtccaagtgtccaacacagcgacaaggtgcggatggcggcggaaagggtgattccggctggtggcaggacaatggttgctccaaccacctaaccatcgacagccacgagctcaccgccatcagatcaggcggccttgagttcgtgccatcagatctggccactgcgatggcggcgagcggctaggccggccagttgacgacgacggcggcaggttgacaacgatgacgatggcggcgaggcacagctcctcgcaggcaaaggagagacgagagtggaagaggagaggagcgttctcctcgtcgctttctccgcgtccgcctcgaagtccgcactccgcgacgacggtgacgcgaggggggagaaggaggtggaggcgctcaaagacggcgacggcgacgtcgacggcggcggaggtggaggcggcggcgctaggggaagacggaggcgaaggcggaggtggcagaggcgaaggcggcggcggcggaggcgcgaggcgatgcagacgacgatggcgacggcgcgaagcggaggtggtggcgcgaggggaaagcggaggcggaggcggcggcggctgctagggctttgggtagtgggtgccgttttgcgaaaaaacccctcagcttacacattttagagcgcaggcctaattcgcggttttcctctccttctcatagaatatccggattttagaaggggctaaacgtaaaatgccagctcagagggactgttagcgagggacgccggacgaattacgaaaaaacggagggcttttttgcaaaaataccaccccgcgcgctgtacatatactgtagaaaaatccttacgtggcacacctcctcgcccgcccaacctgcgcccctttatggccctctttaggcttataagccaacttataagtcgaaaagtctaggcctaaacttttccgtttggcttttttgaagccataagccactctaacactattaagccaaaagctaggttggagaagcttttttggcttatgtaaggtagatgtatgactcaactactaaacttaggacattaaatccaccggcttataaatcatataggccaataaactgactagtccaataaagagggcctatgtactccgatgacactcagattatgaaaaatgaaaaaaattcaacaaaatcctatgagaaatacagtgtggtcatgatgcacctgcacatgttttgatatatggaacttgtatatcattcgaatggttaaaaaaatattaaaaaatctattatatacttaaaaatccattaaactttctataaacgtttctaagccgccacttagcactctaataaattagagaaatcaaagaaattctaaaaaatctatccattgattttcatttaaattggtagacccaatattttagatcattatattaaatctattaaaatatttccaactaataaggatccgatgcatacatatggatggtacgtatgtacgtactactcgtaaaaaaaagaatcattccttctaatatggatccgatgcatatctatgcagaggaaggtatgtatgtactactctacttttaccgtatgtactactctacttttacaaacgtaacgtaaaatacgattggaaattaaaagaggataaagcggataaaaccataaaaaccataaatacttttcttccctctttttcattcttttctccctgcgtatacaggtgagataacaattaatattagtgataataaattttaaataattataattcttacaaacatagagtatatatatcatcatatgactctttcaaaaacatcattcctccgtttcgtaaagtaagtctttctagcattgctcacattcatataaatgttatatgtctagattcattaatatctttatgaatatgagcaatgctataaagtcttgcattataaaacggagagggtacataactaaatttgctctataatgttcagtgataaagtttactccctccggttccataattcttgacgttttgaacatttaaacttttataaattgaactattaataactttaaaaatattaaagatttaatggcatgcatacgaggattttatgtggtattgatgatttgattcttttaccacaacttttaattgtacatccaatttataatcggtttcaaccactgtatttctattaattgaatgacaattaaagacctgtattgctgaattgagtcccaaattaacataagctgaattgttttcaaatatgaacataaggatatcacatacatgacactaaccacatttatcattagtttaattattaatcaacatttttggacaacgcttatttctaaatctataaataaatattcttaatatgctacttctattggttaatgggagatcaccgttaaaaattagtcatgaatgtcccctcttaagaggtggaaatacatgtctttatggttccgtatcaacatacatgtgcctttcaaggacagcgtttagtgcaattttaacgcctaattcactatcagcacctttacagatgattgcatcagtaagtagaaatttgaacactattgtcaacggtggtttccaaaagggctacctcaactaaaccatatatatgcccctactatacttgtaaaagcttctcaattccctttagagaaagcaagaaaatatggatgtaatgaaaataattcttcccataaaaacatagttgtttttttcattttgtgtagacataatttgtttgtagtattaatcagtactacccgtttatggtatagatacaacattctcttttgttaagtgaggttaatcattaaaaaaaaggagagaatctattctacaccactgagtttgttcgagttcaacgatttaccatcaacattgtctttttttataatataccggcgactttatcaattgttctacgatacgccattggactggacaatcttttcaaaaatacccaaaatacccttagagacatacaagattaacaattgatttatctcatctgaatattcaaaaaaatatgaaaatttctatgtggcctccttacacaatatggaagtttgtatacaagtttcaagttttttctgatatatttagttttttgaagaaaatatttttatgtggaatatgagagagagtttgctaataaaagagataatagcacaaaaatatcttatgtagtatgaaagatgatttatattaaaaacaacaatatacaagtattttatgtagcatataacagataagttatattttttataaaaaaatagaaatgtaacaaacttgaaacttctatacaaatttccatgttgtgtaagaaggccacataaaattttcatattttttttgaaacttctaatgagaaaaatcaattgttaactttgtatgtccataagggtattttgggtattttagaaaagaaggctcaacccaatagcatattgtagaataatggataaagttgccagtatattaaagaatgcgacaatgtcgttggcaaatcattgaaatcgaacaaactcagtggtataaaatagattctctcttaaagatgtatcgctaaatagatatatgaccgtaaccatgttcagattatcatatcactaaatcacatttatattttgataaagatctatattttagcgtctggtttgttttcatcacctcttgttgataattgcatgaggcacctttactaattttaaaatgtatttattttccaaaatatgtacaataactaatttgttggagcgcacttatagcatacattcatcaactatcaactatcaattatgccatattagaattcctcgactataaaaaaatatatcatgagtagtttaatgcacatgttatttgttggtttgttaccaaaccaatttggcaaagagaaaaatgtttggattaaggggccgtatagcaagatcaatgcctaaaaataccaatgaaatagttctgaaaagtctaaaaaaacatttgagaatattagtctccatagattaaaattaaatcatatataactgataaaacataatgttgttttgttttcacacatgtagatttcagttagtgttatatatttgtcaaatggtatttgacaccataaaatatgatgtgaaattatttcaaagatatgacgaaattaattattataagttgcctaaattatttgaaaattattataatattaattatgatacgtcagctccatgtgttgtaatgtatttagcatcataatataactatgataagtcatcaacatttgaatacaacggattatagtttgagcttatgatttaaaaataatttaaaatgagtgtataaatacctttgatttgatatttatattgatctagtttaacttgcatatttggagtaataaattttgttttatagcatagaaaatcctcaactgtctatattattttccgatggctgtaccaacgtacatatgtattttttgaactttatggcttttttaaatggtatgtacatatatttctttgttttttaatcaaatatccggtaaacagtttctcttgtatacgcaagagattaagaggaagcgggctaaggtaatggtgtaaaataataggttcattaatttatgtaaaaatcgatggtgaaattacgtagtatcacgtggtggtctacgagcgcttgtagaagcaccaaatgatcatatttgtagagtaataattttatttttatagtatagaagatcctatttaaaaaggctttgatggttataacattgtacatatattttgctttaggctttaatcttgcgtacattggtacctatcctttgttttttcacgggtgaacagtatattattttttgtcattatttttttagcgtattttcatgcaacgtaacgaatgtaactatttgcatgtaggtacgtaaatatttccagtaaacggattatcttggatatagaaagcataaaatttttaaatagatctaatccgacggtatagaataatggatccaccaatttaaatgaaaatcaatagtaggattgtagaatgccacacggcggcctaggagcgcttgtagaaaagccacgtggcggcttaggagcgtttataatatgtttaatggacttatagtatataatagatagatagctatttttagggcatgtttggtttggagccaaattttgccctaccaaaattaattttgatagtacctatttatcaagcttgaagcatttagatttacatttcctcaaaaccccaccacctgtttatcaattgctttcaactgaattgttaaattcgaaaccctatattggaaaaccgtttaaacgaaattaaaaattgaatgcttgaaacttgtggtacgaggagttcacctagggctttctctacacaagaaatagcttgatgttgccgttgacccataatgcagcttgtgcttggtggctagggtgggagagagaactaggggtctgtgggatcctttgcagggaagaaaaggagacttgagagcaagatagactcaatgcaatatattgatctcagtgtgcagagtacatatataagcacgtcctttcctaaccactcaaccaacttatttatgtagaaacagaatcgggagagatattggctagatagcaagagatgaagcatgccaaaatacaaaagatactaaccctctcaccccagtcattctattaaagagaagttccagtggtggattagagatggtagttcggtgcgattgttgtaagacccttggctcggtgggactgcaccggatagaaggcccggcgggtgtccgaacattgagactggaacggaactctaagaagatggtactagacaaacccttggtgaagatatccgtataatgtgacatcgtcgggacatgaacacacaaacagatccgacagcaacatgatcatgtacaaagtgtagatcaatctccacatgtttggttcgctgatgctggactgggttggtatgaatccttagctagtttgcatatacaagaacgaagtatgcttgtgagataaaagaaactgatcgagttattctctgtgtatggacaaatccttccattgataaaataatgcaaatacatggaatatgttagactaactacagatgtaatttggtgcaaaactcttgttggaccttgtgtacaatagaagatgggtgaagtgttgaggttggcacagggaacattgaaaggaaacatatccttggaaactaaacctgctagctagccttgattggtaagtgatcaatgatggatggatgggttaattctggttctgggtggcagccggccttgggacatacttgcggagccagatctggcgatggcggatggagatcttgacgagacgctctccgttgagcaccagctgcacaaatgcctcgctccggaagatgattcgcccgtacattggctgtgagcctcccgctgtcttctccatcaggacacgcaccacgcagtcgccccacttcctgcacgtatatataagtcgttgtcaatgccaatgcatcaatccatcctgcattctgcattctttgctatgggacctagctgcgctatggggaggattgcagactcactgcctgaagtagtcgaagatctcttcacggtcgattggcgctcccctggagaaggtgatgaacatggagcggcagtcctccggcacggcgacggagaggcagctataggccgccatcagctccggcgggttgccgactaggccggtctggtagcggcggagcatcttgttgaggtggttattgaagatgagcgagccgacaccgtctaggatgtctgcgacaccacgcaccaccaggtcctggtggaatgtgaaaaagcgcgggtccacatcgccgtccttgcagagcgcggagatgagcgggatggccggcactacgggctccggcccgcggaggcagtccaacaccgagttggcctccgcggcgacgaggctgacgacggtggggctcagccctgggaggtgctggatggctcggacgttgcactggtccagccacaccagcagcgccaccgcgttgcgcgcctgctccgggttgctgccgatgccgacgaagcggtcgtaggcggtgcgggcgtcgctgtacatgtacagcacgtcgcggacggtgaacatctgttcggccatgatcagcgtcgtcgtcgccttccggaagctccgagaactagatagcttagattcttgtgctgtgtgtggtaggctgctaggtagcaatagctcaggatgatggagtgctgaatggggctagctgaggcctgtatttgtagccggtggtcgccggcgagtggttgcaaggaggagttgagcaaacggatgtgttctcgctacctgcctcgcatggcaacctttggcctagcttagccaaaataaggaggaaacgaaacaggtatgatggtttgaaacggttgcagcgtcggtctcctctgctttacgattcgtgcttctctggcctgaagcccattttgtttcctatttttttccctgtcctttttagatgagcttcctcttttattccctagttgcgctcaaactagcagctatatatgaatggatcaacgggatagtgctatcgtatgtatattttggcggttaattataccttgatcatgcattgttgctaagtatacctttatatatcgtcctatctttgtttcagttcatatgtatctttggctacaatcgacttaatcattattacttgcctttatcaagtcatggcaggacatcaattttgaagggcaattcgatcatattgtttgcatgcatatacacattgccacgtacacgtacatatatagatccaaccagcaagacaaacgttcaaacttcattactccctccgtttcaggttataaaatattttgactttggtcaaagtcaaactgtttcaagtttgactaaagtttatagacaaatatagtaatatttgtaatactaagttagtttcgtcaaatcaataattgaatatattttcataataaatttgtcttgggttgaaaagttactatttttttctacaaacttgaccaaagttaaaacgtcttataacctgaaacggagggagtacatatgtaaatccatatatgctatgacctattaccaaataaacaaatcaaattccaatttaaaataaatttgttaaatgctccacacactgctctagaaagccacattactaacagttgaaaatggcaatctctaacaatttgttgaaccgctatatagacatttggttacgcttgagttggcgtgaataatctctaaatgttcttgaactactactgaaccaatgatatctaactgttcacaagctataaagtattacatttcatattgggacaattaaaaagaatgcaaaagttacgaaccggtaagatttgcttgtcgtcgtttgtcatgctcagctggttgatcttgacatcaccatgccagaggggagaaacaagagcaccgagcgaggacatcttgacccatgcaatgtcatagtcatctcaccataccttcctagatctagaatcatagagcttggagtgcatctaagattaccatctcaccatacctttccagatctaggatcctaaagcttcgagcttggaacgggtagatatagcatgcaccgagcttggagcggctagagccattgttttcttgatcacacaagagcaatgaggagaggaggcctcaagccatgctctgttgttgccatcatagtggccctccaaagatgtcaccatcatcgtacgtaccatgttcgatccggtagcccaagctagaagctctagatcgacatggcattttaagctcgccaaccgcatcgaagcaaggaaagggtaatggtggactctgtgtatctcgctgaacaaggggagaagaggcaatagtgcatgactagcttggattagttttttttttttcggggaagagctgggaattactattgctcaaccgacagactagcttggattagttgacatcaccaaaggaggtagcagctaggatggcaaaggattgaaggccagcgtgaacttgggtctggcaactagacaaggagtggcggatgaggggcaaatgatgcaaaatatggcaaagctaggagtggaagatagatgtgcctcgatccggagcccaaggaacgggtctatgggaggatagaggcgaaatgtggtaatataggtggagtggttggagtgggagcacgttgatcttacctaatatgttgttcttgatatgaatccatgacaaatatgatagggttaattggatccatgctattataacgttgccacttttgagaaatgtcactactattcgttaaattagaaacatgtcattatgaatcagctgattttggaaccatgcttctctctgcaccccaagcctcttttgttgacttgaatagacatagttgcccctggttgaatcataggtcgatggcgatggcaaggtggggaagacgacggtgaccacgatgaggagatctggcgaaagcaaggtggggaaggcggtagtggcgaggtcgacggagacggcaaggtggggaagtcgacggcgatggcagcgagatctggtgaaggcaagttggggaaggcggcggcagtgaggtcgacggcgacgacaaggtgggaaagatgatgacgaccacggagaggacggtagctcaggaagacgacgacaacgtgactacggtgagggctggagcttgggaaggtgacgatgacttctcggggccctagattcgccggcgagcaggctggatctagccagcggcgcggtgccgatatgggagaaaagctacggagctacaccggagaagcccgctgccaagctcgcgcttgccgctgccgtcgccgtctccaccttgccaccgccattcctgaccttaccgttgcgccgagctcacgcctgctgcagacgttcctgacctcaccatcgccggatctgctggcgagcttgcgctgctgcttcacgccccgtcgccaacgacctcgtcaccggcgttgctcgtagctccgccatcgtcaccatcgccgcactctctggtagggatagggatataatatgatgcaggggcattttagtcaatacgaatatacggaacaacaaatacggtcaacaaaggggcttggggtgtagagtgtggcatggttccaataatcatcatataggtttatgcaccaagaccaagaataatttaaatcgcatcaatcaaaacaccatgcaaatattctcccacaatgcatgcatcaattaaagcaccatgcctagcatgcacacattctcccatgctacatgaattgtattccgataaaattcgtgttcatgcagttatacgatgatcaatttgagaaattttgaatttcattataagatgatcaatttgggaaggagggagtaggctctacttgaaatggtgttcttgtgcgctatgtggaaattacttagttcgattgtcattatcatgaatagattattttgctatagaaatatggaaaaatcatagtgcaacattataatttccatatgctacctcttcattagagaaatataattgagatttgaaggtagaagggggaaaatgccataaaatccttaggttcatgaatagttctggtcgttctcaaatttgtcatctggtcatgcaaacaaacattatacctaggttatgacaaaaaaagttcaggcatgaacatactcttgttatggaacaaaaaatagtcactcacattggcatatacacaagctctggctcttggactacgtatttacatgctcaggccgtggccaaataaccagttgcagtagatatgccagattttgagtaaaaaaaaagaagcaaagatacattcaccgatcaaggcttgtgtacattatatggatacacaaaatatgagctgcttctgaaacaggatctgacaagttccacggttatttccttacgcatagcctcccgaacattttctgaaacaaacgcacaactgaactctgatcattatacaacatcatgttagatcgtaaagggcctttccaactctaaaataggtccatccctttctacaatcaacatgaaactattcatcaatctccatcttcacatatttatttctcaaccgttcaccaccccttcaccatactccaacggtgccttgggtgtatggctccgcaggccgcagacacctatagtccattaggatttgacactagtatctatcaggttaaagatattgaactagctaggctcttataccaattataaaattgtaaagagcatatcctacacattagtattaattcttataacgagatttagtacatattcactaaatcaatattattctcccttgcagatgatgaccgaccttagtacatacatggtgagtgagaactaagcaaatatatgctaatctttaacggttctttgtgttaaaccattatagatcaaactagcaagatcaacgtgctctagctccaaccgctcctatattacgacaccccacctcttttctcccaccccacaggtttctgaggtgacttttctcttcctcagttgaggtcctagctagatctaccatatctcccactatttacctctgccccttttcccctttcccctttctagatctaggctcacacaggacgctcatccatcaccatccccttcgctccctcctttggtatcctgaataacttcaaaccagttaggcattgagagacagagagtccactggcaccccctccatggtacggtgatgcatggtaaatccttggatgggccaatatgatggcgacatcagagatcggattgaggcctcatcctctgcttcttgctctggtgtagactggaaaacaaagactttcagatctgaccactccatgctcggtgcttgctggatctagccactacaagctctagggtcctagatctagcaaggtatggcaggacgacaatatcagtgcacgaatcaagaagtccttgctcaacgcccttagtcgtggctccaacatggtgatatgacgagatgaactagctaggcatcacaaacaacaataagcaaatcataccggtgcgtattttcttttttgcatttttttaattatcccaatatataatataatcattcatagtctgtgaaaagagaaaattgattcagtagtagttaaaaacaattagagattatacatcccaatcgttaaccaaatatttataatggttcaagaaattgttagaggctatcattttcaaatattagtaatgtggttttccctttatgcgtggcaacattaaaatgtttatttttaattggaatttgatttttatttttgatagcatatgaatttacatacatgtggtgtttgaacgtgataggtaaatctatatatgtatgtgtatgtgactgtgtatatgcatgcaaagaatatgaccgaattacccttctaaaaattgtagtaatgacttgataaaggcaagtagtaattattatcgattgtagccaaacatatgtaggaaccagatagacaaagatggggtaaagataaatttagcaacaatgaaagaaatataattaacagccaaaatatacatatctcatagcactatctcattgatccattattcatcgctgctagtttgagcacaactaggaaatcaagaggaaactcagaaaggaaaaaagaggaaagaaatgagcaccaggccagaggagaggctgacgcggcaaccatttcaaaccatcatacctgctttgtttccctcctaattttggctaggtcagaggttgccatttgaggcaggtagtgagaacgcgtccgtttgctctcaactccttgtaacggctcgccggcgaccagccgaccaccggctacaaatacaggcctcagctagcccaaatttggcactccaccctcctgagctattgcaacctagaagcctaccacacagcgcaagaagctaagctagctaagaagacgacgtcgatcatggccgggcagatgttcaccgtccgcgacgtgctgtacatgtacaccgatgcccgcaccgcctacgaccgcttcgtcggcatcggcagcaacccggagcaggcgcggaacgcggtggcgctgctggtgtggctggaccagtgcaacgtcccggccatccagcacctgcccgggctgagccccaccgccgtcagcctcgtcgccgcggaggccaactcggtgctggactgcctccgcaggccggagcccgtggtgccggccatcccgctcatctccgcgctctgccaggacggcgacgtggacccgcgcttcttcgcgttccaccaggacctggtggtgcgcggcgtcgccgacatcctcgacggcgtcggctcgctcatcttcgatgaccacctcaacaagatgctgcgccgctaccagaccggcctggtcggcaacccaccggagctgatggcgacctacagctgcctccccgtggccgtgccggaggactgccgctccatgttcatcaccttctccaggggggcgcccattgaccgtgaggagatcttcgactacttcaggcagtgagtcttcaatccctatagctcatccagctcccatagcaaagcaagcaccatggatgcatgcattgacattggcaactacatatgtacacatgcaggaagtggggtgactgtgtggtgcgcgtcctgatggagaagactgcaggaggctcacagccgatgtacgggcggatcatcttccggagcgaagcgtttgtgcagctggtgctcaatggcgagcgccttgtcaaggtcaccatccgtcaccgccagatctggctccgcaagtacgttccaaggccggctgccaccgagaaccagaattaaaacatcgatcccgtccatcatcggtcattgccgtccatccatcaatcaagggcatgaataagctagctagtagcttccgtggtgccaacctcaatatttggccaatcttgcattttacacaaggctaatccttcactaaattacatctcagtcaagtctgacatacaccatgtattagcatacttttatcaatgcatggatttttgcatacataggggaacattctgacccatctcttttgtcatacacaagcatactttgttcacatatgtgttttatgctacattaggaaatccatctcaagatacatattgctaaatatgtgatccagattcgtatatatgtgtcatatcccgtactagtttgttttttataggacggagggagtaaatgatatgtctctagactggcgtagcgtatccatttgttttgctgcaagagcaatacagttgtttaggtattgggttctaagccgcacataggctggctcttgaactcctgttagaactttattggcaaatttcaggaggagagcagtgcgctgttggttctaaatctgaaatacccagacctccctgttgatcttgtgaaatggcagtatggtaagctacaattcaatgtcctccctaaatcttgatttcgccattccatagaaaggatcgtctaaggttgttgattgcctctatagactttttggccatttgcagcaagtcataaagtatgtcagaatggctgagagtgctgagtttagttaccattatcaatatatctccttctgaaaatagactcggtatccaacccaactaatctctaatcgatcaatccttgaaatgattggcatcaacatcatgtgtgttatcttggttgttgatggtggtaatcccaggtagttgcagggtaaagagctgagaagacattgtagaacttgagatataccaaggaagctagcctcttcctaggtcatataaattggaacaactgtactcttgtggtaatttacttttaatcccgagaagctggtgaaagactcaagtatctgttgtagaattaatcatggcttgctttgcatctctatcagtgtgttatcggcatattgtagagtgggtggagctccttctattcgtagtgggtggggaagtacgtcttctattctcataaggttattgaatcattttttttttaaaaaaacaactgccataagaatgaaaagtatagatggtgataacgagttaccttgacgactgaatgtgttgacccgttgtccccattcattaaaattattgtctttccagtacatatacatacaggcgctttcatgcattcacatccgtatgcgtatccatatccgtcggatttctaaagactcataccataacgtcgtttcgaatggattcgaagcggatattatctgatccgttttcacagttagattcagtagttgttcaagaacaattaggattagtcatccgaatcaaaaccaaatgttagaaattgttagtatcattattttcatctgttagtaatgtggttttctctagtctagtagtgtgtggagcatttaatggctttattttttaattttcatatgtatttacatacatgtaatgcagttttaacggctgccctgctagctagatctatatatagatatgtatgtgactgtgtatctatggatggaaaaaaatatgaacgaattaaccttctaaatttaagtcctgccatgacttgataaaggcaagtagtaattattaaatcaatagtagctagccaaatatacaaatgaattaactgatcacaggcaaagatagaataaagatatatttagcaacgatattgaatgaaatataatattaaccaccaaaatatacatatgataatatctcactgattcatttctacatcgctgcttgtttgggcacaactaataaagaggaaactcatcttaaagagaaagagaagggagaaaggcaaaaaacggaaagaaacgggatcaggccagaggagcaagaatcacacactagatgccgacgcatggcaaccatttgaaaccatcgatcaaacctgttcctccttattttggctaggccagagggttccatgcgaggcgggtagtgagaacacgtctgtttgctcaacgtactactccttgcaaccgctcgccggcgaccaccggctacaaatacaggcctcagctagccccattcagcactccttcatcctgaactatagctacttagcagcctaccacacagcacaagaagctagctatatatatctagctcttggagcttccggaaggcgacgctgatcatggccggccagatgttcaccgtccgcgacgtgctgtacatataccacgacggctacaactgcctcctggtggccgtgctggaggttccagaggggcgcctgacggaacggagggggggaggggtaaaaagaaatttttttattacccccatatatggtgcccaggtccagcaggccaccgtatgctcccaattcagttcggctggcccatctatatcccgtgtatgtacacaaacaattggagacgcaaccgcaggagccgcagctgctcggcgacgtttcagcttcgcatcgcagaagtccatccgtgactccgccgcactggtggcaccgcggcattgccatgtgccgactacaggtgctgcatgctggcatcatcggccggcggccgcggacttgatggaggacaacatcaacaccgacaacatggctgactgctctcatgttcctgttcctcctccaaatcaaaccaatgtaagcaggccctatttccctaatccatatcaaaccaatggaagatggatttttaagagattgtttggtactttatattgagagagagattgcaacgaaggtgacgacagatttgattatggacgatttcaatacagtgaagactcgtgccgtgaagtttaaatgaacatgtaagtatattgcctacttttgcaaactattcgcttttatgtattgctaatgcatgaaaaaaaaagagaaattgccaattttttgaactgtcaaaagccggctggcccccctttgattttctgtccagctccgccactggtgcctatccaccacgaggagatctttgactacttcagacagtgaatcttcaattctatagttcagctagcactattagaaaaaacattttcgcagatgttgggggattttttttttccaggtggatatgatcctcggagctaaatggccacctcggaaaatgtaaaccggggtagagctaacctttcgcctacgaagatcaatttttccagactgaccacttaagaggtctgcctgaaaaaaatataatttttgcaggcagaaccttatgtggtccgcctaaaaaatcatgccaccaaaaaatatctaagtttcatccttatcctctcctccaccactcatttcccttccactcctctctctctctctctctaatttgttcaccaccagcagcagaaatctgccgccggctcagctcctcgccgcctcagccattggctgcgatggctcccctcctcgccgcctccaccgctggacaacttgtaattaaaaaaagaatcacgcatgacatgagaaaattaatactctctccgggctgataatacttgtcgtttcagacaagggtgagatcaaactttagaatcttttattatgaaacatttttaaaatattcgtctttcaaatatggtgattacatgcatagattagtcttaaaatgtactttaaaaaatcatatatttgtacttttatacatattataatgaaaaataatggtcaaacttgttttttgaagaccgtgctcttgtccaaaatgaaaagtgttatcaacccggagggagtaactaaataggctttgctggaaatgctgttcttatgtgctctgtggaaattacttaatttgattgcccttatcatggatagattattctacaatagaaatatggaaaaaatcatagtgccacattaaaattttcgtatgctaccttcttattagagatagataactgagatttgaaggtagaagggaaaatgccattaaatccatatataggttcatgaatagtactggtcatgcaaacatacattatacccaggttatggcaaaaaacttcaggcatgaacatgttcatgttatggtccaaaatatagtaaaacacctgtcatacataagctctttcttggactatattcgttcatgtatttacatgctcaggccgtggccaaataaccagttgcagtagacatgccagattttgattaagagaaaaaagaagcagcaaggatacattcactgatcaaggcatatgtacattatttgaatacacacaacatgagctgcttctgaaacaggatgtgtgataagttccacagttaattatttccttacgcatagccacccgagtattttctgaaaccacataccactgaactctattcattacattaacattatgtatgatcataaagagcctttcccattctacaaccaacgtgaaactattcagcaatctcccctttcacatatgacatccctcagtcattcttcacaccttcaccgtacaccgacgatccctcgaatgcatggccctataggcacccatggttcatcataccttcatactttaatgtccattgggccaactatgttaaactagtcagactctcataccaatttagaattataaagggcttaccctagaaaaaaaaattgaaaatatacattgtttttgaagtttttgtgactatatacatgtttttagaagaattgtaaaaatatgcgcgtcccgcgcaatggaaacggtggactgactatttagcgcaacatcaaaacgcgggaccgatgactgacactatcccatagtacccatcgatcctgcaggccagttgcgcggcactgcgcgctcccatagagaggttgtgcgccactggccaaatacatgctgccatgcatgcatacgtcatgcaactgtccagcgtgagctgctgctggtcacgcgatgccggctgcgagatcgacgtgatctcgcacacccctagcgcggggtttatccggccaccagtgttagacttctcagtccttaatactattggatttagctatcattgtattgttgggcttgattgtgtggtcttggcctagccagcccaaac

SEQ ID NO: 4810 - DNA, 23788 bp, Oryza sativa
cctcgctttcacgcaaaaaatctggattggagttaatagccctaaggcatcttcaccttataacagctgctcctcagatattattctcgacgccacagtgtttttaggctactacagtgccacgagctgctacaactgctggtgggattgcttgctgctgtggactaggcctaagtcacaaaagttcttggatcgatggatccaggaactgaaacgtggaacgggggacgccattttccaaaatcatggaatgagaggggtatacctcttccaattttatggaactataggtgggacatgttcctaggttttttggaaggataatccaaaactctacggaactatagatggaacatgtttctaggttgttcggaatgataatccagaacggtataccctactagaggaatatgttcctatatttgttggaacaatagcatggaacgtggaaccctagtcaagaatattgttccaatcattttttttaacaagtaacttaactcaagtttatagcaaagtgtaatagaagttctcagaataaattattacaatgaaaaagtatataaaccaatatgctctagcagtggatgaaaggagaaagatcacaaattgagcttcatatatataaaattatagatgtgggtggttgctggcggcaagcatcatgatccacaacatcaccatgaaggtcttttctgcggtagcactcatatgatctttccatgttcatgtaaacacataacaatatatatgaacattattaccaaggtatgaaaaacaaataaataaacaatcagttaacttatgatttctgtgcatttccaaccacttagattgtggagtcttcgggatctatatccaacttggcgttaggccctcctttatagctttgagtatatcttgatagaagaggtaagtttgagtggattgacacaagcttatccgcgtttgtggcatttagattgtttctctttgcactatggatgtactgataagtggcccaaatcctctcagcggatgaaccactaataggttgcaagagaaccattttggcaacctctgtcaattctgatgtctcggatccatagctgctctaccactcaactagttccatcgtttctgcatccacctacacagattctagtgcaaaaaatcccttcttcataataaagtcattgagttgctcgcgaaggactttttcctcatctttattatctactattctctcaaatgcttttagcacacctgtcatggcctcaacatcttgattcggtgctctccttattgtgccaccgggagcaggtttttgaagataatcttgatcataaaaccttgggcaaacagcataagccaaacagtgaagttgaacactcatctttttccaacgttcaatgactatgttctctacctctggaagaaacttttgtatggattgtcatctttcattatgatatcctttatctctccaaccatacaatccattctctatagatctcacccatttttggacgttccccatcattgaaccttaatacttcatatatgtgctctgtgatagtaaaaatattctcaactttaacccaaaagtcctcaccactgatttcttgaacaatggcccttgcttggtgccgcagatcattggtgcaacctttccatcgattggtaactacggtggtggcaagtgcctctttacatttagtgagcctcagaagcaaaaggtagtgagaagcaaaatgagttttcaatcttccgctgggctgctagctaactttgctctttttttttctttttccctcttttctttctcttttctcttttaactctaattatttgtggggcgttacatacatccatactcaaagattcgacgtccccgccaaactcattctatacctaggcttcaaatttaaccaggaacttcccctattagtagcacgtatatacatacaattttcggtgcacatacgtcatgtcatacgaccacttagggatcatcctgtatgcctgcgtacatgttcaaatatacgtatagctgcaagggtcggctctaataccatctgtgacacccagggcgcgaaaacggtattgagtccatctcatccagttggaccacacctacaatatcaactctcttgcgttttcgtccccgctttcacgcaaaaaatctggattggagttaatagccctcaggcatctccaccttataagctgctgctccttagctattatactcggcgctatagtgttttcaggctgctacaatgtcacgagctgctactactgctgggctgcttgctgctgtgggctggactactagctagctttgctctcttttctttttatctctttcctttttgttttctctttttcccctaattatttgtggggtgttagcccctcacctcattggctaattttttgggtgggagaaaccctttgaaatccaaaaaaaaaacatcaagccacaacccaggacaaacatcaaggctgtggcataggtcgccaccaacctggcccaactagttcatagtatgtctatttcccttatctacccgggttgttgcttgtgcatagaaagaaatacaacattcagacaaaaaagaaagaaaaaaagaaacacctcgctaatatctcctatcactggcatgccacttgctaagttcaccatcaagcttgtggtcgccggatcgagtggcatcacctaatgaacaaatgaagaatggcagtcatgaggggaattcgtcagcaacgagtagggaggtgacggttggcagagatgcagccaatggtgtggcaggagggaagcgttggcccagtgcatcgatccatgttcccttgtccctccccagcgttgccgccatctcttggtgttggcgccaatgcggtcgtgggtttgtgccgctagcactagcggcctagcccgcttctaggttccaaccgtcccacttcaacaaatcgtggccgccctttgctaggactcttcctcgcttcctcatcgtcggcccatcgccctaggctccagcaccactcgtagaagcaccacggtagcaccagctgccggagtccatcgctactcatccacatccccacatgaccaactccaacatcatcatgacgctagcttcctggttgcttcgccaagcgtcatggtcgccatctcaccatctgcatcacttggctcgcgggctaaatgagttggctcgagacaggagatgagccatgccaggtttttagctcattaagaaaatgagctgagctgaaccagctcgttatcctaatgagctagctcaaaccgagctagctcaatatccagccctacccggcccacagtgcaccacaaggcaccattctctttaactgcccacaatacttgatttgaatcaggaaagacagaaatgaagacaacataattgcggtgcgtccacaacacccaagaaacaagtttgacaacattttaagagattgaacaccaccaaccagagaaactcccaacatcgagaggtggagcaagaaaaccgagttgaaggtattgaaggatgccatatgccttagaaatttgatgccttatattatgttcacctaagtttctcactagcatataagtggctttgaggatatgctatcaccaaatactatgagagtccatctgtctaaccaaccatgtggccaatgactaatatccataattgatgagaaaaaaatactttctttctaggaaaaaatccaaatactcccttaaactttggatggaagtccgtctagcaccctaaactttaaaaccggatatatctaaccccctaaactttgtaaaatcattcatttttttcttgacataaattactgccaggtattagcccaacaatatagcttttataaaaattggaaaatatttacatcttacaaggagaagcaggaacccacaaaataattacatagtttgtaaccaatcaaaaactaattgcttgagaggctccttcattctacacatatgtagaagaagttctttcctgaactgaactttccatccatgaaaagtcagaggaacattctgaaaaatcatgccatttctttgtttccaaatgtaccaggcagctataaagaagatctccagaaagcccttcataccaaagcgatttcttgctagaacaaccatctggaagaaatttaaattgagaaaccaatggaaacccaaaagctgccaacatcggaggctataaggacaagcaaagaagatgtgcagttttgtttctcttaaatccccatagcaaagaacacatgtgagatcatcattctccttagcacagtgcctgcgatccaacatgtcccttgtattaaatctatctaaagagaggagccaagcaaacactttgattttgatcacacactttgtcttccagatccaaacaagcagccttgagggttgtaggcatgagtaattcattttgtataatctttgagctgaatacttatcaatattccaaatataactccaatgatcaccaaacccctcatttaaatgaacactgtcaagatcagatttcaacactaaaaattccccataagcttcagtattaaaaggaagcatgaaagcatcttctaaaggccttgagcaagccatgccaacatattcctctttgttataagctgccaaaaaaagattaggaaacttatatcatttaagttccccattccacaggtccctccaaaagagcacataggttcctgtttgcactgtgcactgaacaatccctctgaaaacatcagcaagatagacaatatctttccaccaaaatgaacctttgttggcaattgagtggggaggctttgaggtgtaataagatttccatatgagatccacccaaggaagatcaacatttctgtagaacttgtctaagtgtttcaacaaaagagcaatgttctgtgttcttagatttatcacccctaggccacccttgtcctttggcctacacactagctcccaggaagctagagattttctggtggaagttgggtcatttcctctccacaaacaatcctttcttgttgtatcaatggccttaatgatagttaaaggcaatttaagagaacacatatagcatgtggggactgcaaaaagaacatagttgataggtgtcagcctaccaccctggggtaagaatgctgagctagctgttagccttctctccactctgtccactaaaggagcaaagtcaatcttcatgacaacaagggggcctctcaagggtagtaagatcaacacgtggaactctaagattaccacccaagtgaacaatgtggccttgtcggaggaaacggtgagggttggggttgacattagccatctccggcggtgaagaagagctctgtagattggaaacttgaggaagaacagctttggtaggtgaagagataatgggagaaactcttgcagtagtattaggaacctttttagctctccaaacaaaattactccgattatacagattattcggaatagataaatcttctttcttttgggcctttaaagggcatggcagaaacgagccaagtgactaagaagacagcaagcctgatagcacaaaggcccaggacagttagctttcaaatggcccacccccaaacaccggccacaattcaaatcagaatttaaacccagcgcggaattaccccctaaggtggttttggatggtggtttttcatattttaaaaccttaaacgaacaactttaaataactaatataacatatttgcatatcatcagttgtaagtcatcaatctatacatatcaccgtactattattatgttggtacttgtttgtaagtgagagctaacaactggtaaaaagaaagatttaagtggagattttaatatatatgtccaatgtgtatgtcaagtgatcaaactcatccaatttgtatacgaatgagataaaaaccactatagagggtaatatgaacggttttgcaaagtttatgggggttggatgtccggttttaaagtttagggtgctaggcggacatctatctaaagtttagggggatatttagactttttccttctttctatatgtagagtatgttttcttcttgtggggatcttgcattgctaaaatagaaacatctttttcactcttttcttgtttttctaaagagtaaattgcacattaggtaacctattttttacatcttctgcagattaagctaggattcaacctagacttttatcttacttagctttgccaatggtttcactttggtctatgtccctctcctcatggctatgctgctcctcttcattctatcttctccatagaaccaattggccaaacacgatggccacggaagattttttctttgtagaggccgaatctcgaatgcacgagacactgccacactagtgatcaatcctcgacccagccatcgccgtcagcctgcccacacgacacaagggtcgtagcattgctcgtcaccacatggatatcatgtttggactcgaagccactcgttttgctagattgcacttcatacgagacgccgtcatgctcgagcagctctaggatgcagataaaggtgagattgggcttcctatcgaagatcctatatcatttctagcctttcctccccttcagattgactgatcgagccactcaagttggggatgatcattgtcatctgctgttcatcccctatgagcataatactttcttcttttactagctccttccaaatctagccgaaggtgaacagtgtttgaacgtaagtgccattccgagtggcacggccacacgagccgtgcttgagctgggcggcaatggctcatctcaacaatgaagaaaaatgggagaggagagatgaagaagaaatctggtttaatgtgagatcaaagagaaaagattgatacacgctaatacaaatatggaaaacttgtaaaaaggagtggtccatagtgcatttcactctttttctaaatttgcagatgactctaaccaaagaagatgagaacttgaagagttattgctgcgggctaaattattattttctttatgtaccctcctgtgtcaaatggtcgatgggggatgctgattacatgctactatgtgttgccaaatttattttcttgcaatgacagcttgtcatcatattattagtattatctgcatcacctgttagtttacttgcttggtcaaaagctggaagtgcttcagcattatcaaatttagaccgcatgcctttccatgtgagctaagcgactatataatattttgaaaagtaaattgcggtaatggaaatagtttgacaaattggagcgatctagagcctcctactgcaacaacttgactcaaggcgtactttgttcaaataggtcggtcgtaacacattttttttgtttttacattagcaagccacactactatgttatcgatttttgtggactaggccccctataggttgtagacagaccataaatgtcccgcatgcaaaaattgctccccattgtattggttcaaggctacctgcgaaaatgcattattgcaggcagccacttaaagaggcctgcctgcaaaaatagatttattttcacaggcagacctctttagcgactacatgcaataatgcaatttcgcaggcgagtctcttaaatacccgattcaagtctaatttccccctccctatcaacatcttcaatttttttcaagccaccttctctgtctcaccttctcgcatcctcatccttatcttctcacctccggctggcggtgatgggctttttcaggaatggcgccggcggcgactacggcaagagtgacgacgacacactcacaatggtggagggaggcggtggcggtcaatccgtcaccgctgtcctcaggagggacggatccgacgccctagggaaaggaattagtgacgacaactgcaggcggcgagggtggtgccgtccttggccccatgaggggcgcgatgacggacagcggatccagcgccgccgccctcgggaggggcggatccgcctccccggccccagtcctcgttgactactacggcgacaacgtcgacagtagcggactatggtgagcaccacgatggcggtggtgccggccacggcaacgttagggtttcaatcggcggcatgctagggtttcggcggatttggtgttttggaatttttatttttttcgctgaaatttttttcgcgtgcggtcggtattggtgaccgcatgcaaaaatgcggttgtgctgaccacacgggtagactccaggatgcggaccgtctagccgcttgtgaaaatcgattctgactgcctgcgaaaatcgattttgtagtagtgccatatgtcttaagatcatgtcactaggctgctaagagcccatatgactttgaaaaaagaaaaatttttgtttgcctcgcatcaataatcaaaagggagctaagaaagtaagaaaatatgaacctcaatttgaaaaagaattcaattgcaaaatgatcgaaagaattcttgatagaaagttgctagacaaaatatcagacatgagaaaagcagttttagcataagaacacaaggtttgtactaattaacaaacaaatcaacagaaccaaggaaataccttagataatagaaaccatgcaacttctgaaacttaagtttatatgaagatgcaaatggcgctggcagcgatagtccgagctaacatacatatacacatacaggggcggatccaggccttggacagctatggctcaaaccctaggcctgagatccattcatataaatttcagaaaagtgtatgaatttgtagagaatttgggtaagaaaatagagttgaaccctataggtgtggctccattcatataaacttctagcaggctccaccactgtatacatagttacatacatacaagagaatttctcgaaacaaacttgaattggtttaatcaaaactttcctggtttcatgtccgaccttagaaaaggaatgccaagaataaccagtaggatcctgacatgtgtgacgaactcgccaccagtgctgagatgcttggcatggaactgagccccacagtttggtccaaggtagcacagcatctcaatccacaccatggagatgagctcccaacgctgagctccgttgcttatcttgagaaggtgatcggtgatcacacggccacgactaaagcatggctcagtcaccccgggtgactgccgcacataccgcaagagtgtcttctcatcatggacggtggaagctcgaatgatgcgcttcagcaggcggcgtgccttaccaagccgaaaatgcccattggtgccactcatcacgtcacgcttcacgacgaggtacattacatatctcgacagctccatgctcggaaccctgcacggggagcgatcatccttgtcggcgaaccagcacatctccgtcgcgatgtgccaaacaatgacggtcattggaaaatacaagacggtatcgatgatgccatcggttagtatcccttgagcaatgtcatcttggattctcccctcctgcagccaccactgcaaccacatgccactgtacttgctggaatcccagtcccagtagtcacttacactacgggtggtggcaacctcagtcaatttgtccaatacgagctttttcagttcaggagagaccgtcttactcatgtcgatgtcaggcatgatacccgtcttcctcactacccatccgcatattatgctgccacgttcttcttggatgcatgcgtcgatcaggttatactgcggtatcttctccgaccagaggggtttgctccatggattaacaaatctgacaaggctgaaaacacagccaaacaagccacctgtttggtgtaactgcaaccaatatgatgagatgagcttgaagatggaggatatgtccagggtgacagcaccaactagcagtacataggacaccattgcatcttctcttctgtagttgaatggcccctttagatcggtccctacaaacaaccttagggctaccgaggttgagcaaaacgtaatcagccgggcgattacgctgtagacaaggccaaggcggaactgaagcgccccatacttagtgtacatgtagtcatagatcagtgagagttggatctcaaccagcttataagccatctccacctgtgtgtcgggatctgaactacgaagcttctcgacggttctctcaatgatagtgtcttctttagacgaccataccaggaaaggggtcatgtcagtcagaaaacctaggcatatccgaaggccctcgccggcagccatcaccaggccctggtaagcttcatcagcttctcttattcttccatcacggacatctagatcctgcacttccttccccgggaaaatattatgcagctctcggaaataggacttggcatcgatgataacatcatcttgtacatccatcacatgatctgccacagaatcacctcctggctccatcgccctgctagctgccatgagaaccaatattctctcgacatacttgattgttccagagatgaacatcagcaccaatggcgccaagagctgcttgtccgggtgccatgacttgaccatgatgtagatcgctagggccacttgggtgacgagaccgaggaggtgacgcttccacagcattgcatcctcaatggagaaggcagagatcgtctcctggctaccaaggtgcagcagcaggagaggcgtccagaggagcacgagctgatgatggtgtggatcgccaacgtagagcgccagacgccctagtgtgaaggtcgcaatgtagtcggctgacaagtaggccagccagagaagaaagcttagaacacgggaggtgttagccttgcgagtgcttgagaacaagtggaggaagacttgcaagctgaagctcgctagtaccaggcactggatctcccactcgttccagagttgcagggcacgtgccagtgagctgatcaaagggccaaagatctacattagtttctttgtttagaaactgtacaactgcattaatagaaattccaaatattttcgtgcaattttttttgtctctctaagtatctttatgtccattgaagtatggatcagtctttttatgttccaatctattcaagcagttgttgacaactccaaaaatattctagggcataaggtgtgacacctacccatcatactccctccgtctcaaattatagagcgccttttttttaagaaaaatcaaactcggtagcttttgactaataatcatactagctatatgtatacttagtattatgcatgttatatcactagattcatattttgaagtactttcatatgatgctataatttcatatttgttgggatcatagaatgaaataaaatactagtcaaagtatgttattgaagaccgtgtaaaaaaatatagtccttataatttgggacagagggagtaacacttgtttagtttagttagattttgatcttaaagacttatgcccgttcaaatcttctgaatatgaagattaaaagcgggcacgcaaaagagaaagtcattaacgtgtgattaattgagttttatttattagaaacgtgaaaaatggatatatttgatactttaaaggaactttcatataaaacgttttcattttgtggtttgaaaagcatactaacgaaaaccgaggtaaaatctttatctttacgagaaaaaaagtgctcctcactagtatattttctaatttctaattttacgttcacaataatatatgtctttatagatggagggagtaacaatgtactagtactaagaaagatggaatatcacctcatgccgctcatgactgcaaccagagcgctgctacaacttgtcagccgctattgcggtctctgcgagaggaacgaccaggaggagctagccggtaggaccagtagaatgttgctgtctttgcttctcagctgtagttatcaggacgtacatttaattcacaattcacctgcgaatttttttttaaaaaaaaatcgactaacctccaacgtcgtccatggtcgaaattatgcaaagactccgaggcagattacagcaagaatggaggattagggaattggagaatgcgagattatacccagaggaatgggattagctaggatgaaagattagtgccaattgatggatcttccgattacatataccagtgctactgcgtagtagcatcttccttccctcctgctcacgccttaacaacctccgatccttttgtccggctcacgccatactacaaagctaatcaaaaaggtcattctggatcagagaactctattactgccaccaaagtacgccataagtacactcaagcttgattctctggaaaatcagttccttctgacagactgtcaccaggtactgtgcttatactcttgggctgcaggaccgtgatcgatcaatatcttgtcaacgaatgcctggtactctctccatcccaaaataaaccaacatcctaatcctaatataaaccaacatcgtacggcatgtgacacatcctagtatggtgaatctggtactaggatgtgtcacatccagtacgaccgtacgagaggttggtttattttgagacggagagagtagatatgcaacattcgtcctgataagggcatgttcaacggttgagcttgatttgagctcttaattagtacgcatcatcaaacagctatccacaaatatgttaacaactcaaaacacacacttatctattccctaattaactttttttactactatgcaggactatatggccatcatcttttcgcttatgtttatacttatcgactaaaatttgaattttcaaccttaaatgtagagctgattttaaggttttttcatcgaagtttatttttcagcctttgcttttagatcattaaggacacgtatataaaagttttattcacaaattacttttcgtttgtaaatatgtcgtttcgcttattccacgaataagccaaacgatggctctgtgtatgttttctctcgcatttcgtgccaagagtcaatgttttggcatacgatcgactcttgtctcttccctccctctatttggagaagtagagggattagttaaatataaaaaggcgaagaacagtgagccatgctccattcagtcatatttctttgttaatctacagaatcaggaaaatcgaatacagtttgcaggtatgaggtttgcatatctgtttcaacatcctccaaactctaaatagatcaaccatgagaagttaaacatagcactacacagagagagagagagagagactcctagatgatacagaatacaaattaatttccataactcgaaaaattatctatagatataactaaaattttgcagtgaaaattttctactgccagagtaatcattcgtaccttctaagacgtatcagacaggaggaaagcagctttagcataaggaacacaagatttgaacttacaacaaacaacaaatcaacagaaccaagtaaatactttagataatagaaaatcaggcattttctgaaacttaggtttatgcaaagatacatacgactggaacaaacagcccaagctaacataaatacatagtgacacacatacaaaggggttttctcgaaacaaagctgcaggcgcaatcattagtttctttctcagaatttccctggtttcatgtcagacctgagaaaaggaatgccaagaacaaccagtaggatcctgacatgcgtgacaaactcaccaccagtgctcaaatgcttggcatggaactgagccccgcaattgggtccaagatagcacaacatctcgatccacagcatggagattagctcccagcgcagagctctgttgcttattttgagaaggtgctcagagattgcccggccacgaccgaagcatggttcggtcacctggccggttgcctgtcgtgcatacttcaggagccccctctcatcactgataccccgtccttcaaggatgcgcttcacctggcggcgtgccttgccaagctcaaagtgtccattgctgccactcatcacatcccgttttgcaacgaggtacatgacataccttgacagctccatgctcggggccctgcatggggaatagtcatcctcgtcggcgaaccagcacatctccgtcgcgatgtgccaaacaatgactgtcattggaaaatacaagtcagtgtcggttatgccatcagttagtattccttgagctatgtcagcttggattctcccctcctgcagccaccactgcaaccacatgccacggtacttgctgaaatcccagtcccagtaatcacttacactccgggtgcttgctacctcgaacagtttgtccagtaccaatttcttcagttcaggagagactgtattactcatattgatgtcagacacaatgcctgtcctcctcatcacccaaccgcatattatgccaccacgttcttcttggatgcatgcatcaatcaagttatactgcgctatcttctctgaccacagtggtttgctccctgcatgaacacacttggcaagactgaaagaacagccaaacaagccacctctccggtgtaactgcagccaatatgacgagataagcatgaagatggaggatatgtccagtgtgattgcaccggctagcagaacgtaggacaccatgacatcttctctgctgtagttgaatggccccttgagattggcacccacaaacaagcctagggctgccaaagttgagaaaaatgtaatgagccgctcgattccgctgctgacaaggccaaggcggaactgaagtgccccatacttggtgtataagtaatcatagataagtgagagctggatctccaccagtttataagccatctgcacttgtgtttcaggatttgaagtacggagcttcttaatggcactatcaattatagtgtctgtgttagaccataccaggaaaggggtcatgtctgtcagaaaatcaaggcataaccggaagcccttgccagcagccatcaccagaccctcatagccatcgtcatctgttcttcttcctccattgtgaccttcaatgtccagcacattcttcccagggaaaatactatgcaactcatcaaaataggatttagcgtctaagataacatcgtcttgtacccccagcacatgatctgccatggaatcgctccctggcgacattgagctgctggcagtcataagtgcccatgttctctccgcatacttgattgttccagaaatgaacataagcaccaagggccccaaaagttgcttgtccggacgccatgactttgctacgatataaattgccagggccacctgggagacgaggccaaggaggtgacgcttccacagcattgcatcctcaatggagaaggccgaaattgtctcttggctaccaagatgcagcagcaggagcggtgtccagaagagcacaagctgatggcgtggatcatcaacgtggagcgtcaggcgacccagcgtgaatgttgcaacgtagtcggctaacaagtatgccagccaaagcagcgagcttaataaccgggaggtgttacccttgcgaatgctagagaagaagtgaaggaacacttgcaagctaaagctcgcaagcacaaggcactggatctcccactcattccagaactgctgggcattcgccactaaactggatcaaaggaccaaaaatcccatgttagttgtcaatcaaactactccctcatttcctaaatgtttgatgccgttgacttttttaaacatgtttgatcgtttgtcttattcaaaaaaatttgtgaaatgtgtaaaactatatgtataaataaaaatatttaacaataaatcaaatgataggaaaaaaattaataattacttaaattttttgaataagatgaatggtcaaatattttttaaaaagtcaacggtgtcaaacattttgggatggagggagtagttatcaagccatgcaactacctggagaataattccaaaaacgttttatgaaaaatttgaatgcatttttacagtttgaacttcatatcagtttttagatgttcctgttgagattcccccctccccccaccccccaaaaaaaaaaaatccctgctaagattgaaccataaaatcttccctcttagagattactgagtttcctcacacaaactgtttcaacaaacacaccaaaacataagcttttaacacccacatattcgtgtgtgatatttatgcgatacaatgccttctacacaagagtccatacaagtctattgatagcaggggtaacgggttaacacttattaacactatcggtatcgtaaaaaatttcggcggtcacccgaaatttcaaaattctacagaagtttcgaacaaaatttacaaacgcattttggaatcggaagaaatttctgcagcagtcctgcgacttcattgagcagcaaagggggaaggtacctggaatcctacagccggatcgggaagagccgcagccgcgagaggggttggcgagtcgcgagcgccgccgcggccatacgccgggaggagtgggctgccgctgccgccgtgcagtgcagggaagctcgggcgaaccatcgaggggatttttttttttttagaactcctttcgaggggattgaccgattgaaatgggatgttaggaagaacagagtttttctccttttttttattaagaccaatttgaccgaaattttcacctggatgtgactgactaccaggcccactgatatatgcaaagataaaaattctctgattaactttatattctaattatccctcgatggctcgaaggctatttaaaatatatgattggaacaaatgtagaaatttggcaaatcatatgagaggaacaaatgtagaattttgacataaatgtgacaaaatttagggttaggaatttgatgagagataaaggcttgtatgagttttttttaatcaggttgaacgtcatatttggttcccttcaaaactcatatggattaaggtattcctttgtattccacctttattaaaaaaaacatttaaaaaagaaatctggtaggactaaaatctaaaaattctgaccccaaagtatgaaacaggtgatgattttgtaggtggttttggtcacttggactacagtgagaataataacacgacaatgaatttggcttgtcctttggttggaggaattgtgtcctattatagggaaaaaaatatagtcatttaaaacaaaagattgattcttacaaattccattgtctataggttttttggaagagaataaacatgaggttactacgtttttccttgtatatcattcatatgataatttataacttacctattttttaagttcttaatagaaatctattaacttattaaaggaatagaaaaatgagcctccacgttcgttctcacggcttagaaattcccacattaatcggagaaaaagaaaaacatagtccatatagaaatacaatttaaaaatagtggaaattcggaagtaaaaaaataagaaatattggaagaggagactagagtccatatagaaatacaatttagaaatagttgaaattcggaattaaaaataagcaatattggaagaggagactggagtccatatagaaatacaatttataaataactgaaattcggaattaaaaaataaagaatattaaaagaagatcatagagtccatatagaaatacaattaataaataatagaaattcagaattaaaaataaggaatattagaagtagagtatagagtccatataaaaatacaattaagaaataatagaaatttggattaaaaataaggaatattaaaagtagagtatagagtccatataggaatttaaaactaactaaaatttgaattaaacataataaaattaaaagtagagtttagagtccgtataaaaatataatttacaaataactaaaattcagaatttaaacaaaacgtgagaagaacagtctaaagtcaatataggaatacaatttagaagtaactgaaatttgaaattaaaacttaaaaatattaaaagatgagtttagagtccacatagaaatacaattagaagtaatacaaatttcaaaattagaaataaataatattagaagaagagactagagtctatatggaaatacaatttacagataacgaaaattcagaattaaaaatatattgaaagatgactctagagttcatataagaatataatttacaaataactaaaagttgatattaaaaataattaataactaacacaaatataaaatacaatatgaatattacacattagtagttcgtaaaattagtacaaaatttaaaattatattatcattttaatataattgaataatacattaaggaaacatatatgctattgtacgagagaaaatataatgatgctagccgcgcaatctgcgcggaccaccgtgctagtttaatgaacatgatattccactcatacgttttttatttgtttcagtattttcacattttctaaaaagaacaagtaagatgctctcggaaccaaagcacatcaatgtcaacatgtaattccgggttcattgattagagagaaacaaagatgctagattggtttcagtaaaatacatcaacgagttgctcccgcaagcaataccactctatgtgttatttgaaccaatttctgcaaattaggaggtagaatacttgattatgattaaggggattaagtagaacaatctgatattggtggtgtttaaatcccctgaagatgaagatgaagataaacataaatattaagtgtttcacgtaaaacgaggtggtaataacgggtgattaattgattttaaattattacaaacttgaaaaatggattaatcttataatttagaataattttcatatagaaagtttccgcacgaaacgcaccgtttagcagttcgaaaagcgtgccacttctatccaaaagtttatccagttttggttggagaaaagaacaaggcaaacccagattagaaaacatttttttttcaaggaacatctcattttagctggtccctaataaaacacatgttaaagagttaaagtaatagagattttcctatccaaaattaatctcgatatgtaatatgagggggagctatccgatctttttcaaaatatcatatggtaaaatgttttagctgaccgcaagtgcaatattaagttatatatagtgaaacaaaacaatcagcctctgagacattcaaaaattttgtgaaacacggtaattcacatgttgaaacatattgctttcacgtatgaaaaattaagttatcactgtttgaaacatatgttttctttatcagaatataatcatgtgatatcttgttgtaaagatttgattattaggaattcaacggtgtaatcgaatcattgatcggataagtagtttaggagaaaatttattttaaagatcactaaatacataaatacatacatgtatgcatccatggaatacagagagagccactagaatggcatgagagagtagatgcatgaacatctgatactttgtcggatggcatgagagagtagatgcatgaacatctgatactttgtcggttactagtgaaacattaaacaaaaaattcagttattaaaatattttttaaaacacacataaaacatatcgctaccatgtctaaaacgttgcattttaacggtttgaaacatatgttttttctttctttggaatataataacttgatatcttgttgcaaagatttaattataataaatataatgatgtgatcggagcatagattgaaaaattagtttagaagaaaaatattttgaaaattattatatgcatgcatggatgggtatccacatgcataggtggagtggataggaagctacaaaggctgttaatccggagttttggcccgtgcgtggacggcagatgcaaagtattttctgtaatatgagtcaattaggaatggtgagataactaattcttcttgaccaagagctgttcgatgaaattaattagctaataatttgctgggtcaatatattcttcttcatccaaaaggaaataattttaggcatatgacagattatgaccgtgagagctagcaattgcaatttatgtaagaaaacatattttccatatcccattttgtatggatataatatatcagtaatatggataaatcatatatgtggcaggcatctagtacactacgaaagctgcaaaagatctgtttgaagagcttttagcccgctagtggcctgcagattccgctagaatctcaaactctctcaaacagatccatctattgtccataaaaaggtaacgatggtcacagcaatgcatcatctacttccattgtaaattttgcgagctactctttgaacttcttaatattaaaaaagatcaaaactaaatgaatagcaataaaaaatagatttaaatacattttcgtttatccgtagcaaagcacagccatttagcaactatgctaagaatatatagtcatgtaatcaagaaaataaactaaaagacaaaagctaagaaatatagctttttctgtttctcaaattttggctaatagtcagctgcttctccaaatcttgcttcataaatagaactaaaaccacattaaaaataagaaataatgctacaagaccaaaccaaacccaaccaaagcaacattaaggcagggtgctagatacaacctaccaacgaaagctacattgcagggtgctacatacaagctgcagaaggatggttacttaccccatggctgatggctcaatggccgcaaactacagaatctttccgtttctctggtaggggagagaggttagaggaggagctccatggccgccagccgggggatctgggatcgctgtgtgtaagggtaagtcgtcgtgcaagtcgcgatgcctgtcttcatgtgcatttaattaacctcaaaccccacgggccagggggaaaaaacaaagacgtcaaggcctcatcagtcatcagtcgcgattaatatgttttcaaggacaaaagcatttttgcaagtggccaaaagcaatttttgtaagcggaggagaggaccgccaacaaaccaacgaccgtgaaaatcatccatttttgcaggcggggcaatggcccgcctgcgaaaatccaataaaaaaaatcgccttgctgccactgccctcccgcggcctccctccggccggatctgggaggggagtggaggggaggggagccgcccacgtcgttgccgccgccgacgccctcccctgtccaccctccgaccggatctgggagaggaggtacttgtcacgcccagaaattcccgaatggaatcccaagcagaatgtgcattaaaatccccgtccaggaccagccggggtacacaaacgacaatgttgacatacagatccacgtcttacaaacatcataaagtcttacataaatgcagcggaaaacaaagaaactgaagctaagccttgactaagctgcagcgggaacaccaccccacaggcatcctcgacggcacggacgaagcctactcctcagagaaaccttcatctgacccgaactcgaactctggaggttgggaaaagtagagcaaggctgagtactacccactgtactcagcaagtcatactggaatggagggtatgatgcatggattcaacaagggatagctaaacaggttcatttgcataaatactggcatttataaacaagaatttgaatgcgaaaacagttgtaataatttagcagtattaatcatccactgttcaacgctacaccacgttgcaacaggcccaaccatccacctatgctatacaaattaaaggattatactaaggtgagactaatcacggtgaatctggttgaccgcccataaccgcgagcacggctattcgaatagttttactctgaccagaggtgtacaactgtacccacaagacacagccccacgacacgtttccgtgcgccgacatgccaccacgacataccggaaagaggccgtgacaggacccttcgcataaccccctctagccaagcacaccacacctcaggtttcacccccgtccccagcgggcgacgggcagtcccctctcgtgcctaggtgaatccggaagcgacagaggccgtcgcagggcccgccccgctccatcacgcccacccttgcctggatgcgtcgactagaggaaagctacactacaagcccagccgttgcccacgctggcttgtggtaagtacgataaattcttccagggcatcccgcgaaccggtccttaactgccatgggtgcgaccagcaaaaccatgcacccacagcccaccatgtgattcattttatttaaccaacaccggagcggtggtattaaaccaacattatcacctatagtctaggttttaaatgagattccccaatgtgtgctagttgaactaagcatggctaagcaaaccctagtcctaactctaatcaggttataacccaagctaacaaaggagcatgatatccaaaagcatggctataacaataggtaaccatcccatagtaatattataaaacaatgcaatatttgaaaggaaacaatagagcatttgcaatataggatcaacatgttcaagtgacaagcatgacttgccttgctctgctgctggagggacctcggcgactatctcgaagtacaccggagcgtcggcgggatcggaatctagcgacatacaaagcaaacattgcaaacaggctataagactactgaaacagagaacaaaaccatttttaatggattctacacatttttcttgatttactgagacttgaatgggattaaacggagctcggatgaattagttatgaattttagaagattcactgtgtttattactataaaagaaatccttaaatgaattattgcgcaatatcaaccagggctgacgtcagcgcggggcggcgcggcgccgacatgcggggcccaccggtcagcgacacgggggagagagaggaggggcggccacgccacgtggcggccgatccgacggcccggatcgccctcgggccgatcggacggacggcggcggcggcagccctcgggctcgggtcggcgtcaaaaccgaccggccgacccggggctagcgacggcggcgcgcgcgcgtcgcggcgccggcgacggcatccggcggtggaggcgacgcggaggcggcggcagcggacggcggcaacgacccaaagcgacggcgagcgcgggcggcggccacgcacgggaaacggggaaggagaggagaggagatgcctcaccgagggtggccggcgcgcgggaagacgatggcggacggcgacggcgaaccacgggagaacggcggcggctagcggacgagctccggcgtgccctaaggacgaaaaagagagggattagagagagggagatagaccacggcgaccggaatccatggccgaggcggcggcaaaggcggcgctcacccgtgcgcgtggggagagggctccggcgacgaacctcgacggaggaggggcggacgaggtggatctcggccgcgcgaagctaacggcggcgacggcgcgggacggcggcgagcctagcggcggctagcggcggccggagtagcaaaagcggcggcggcgggtggttgcacggcgcggaggcgatggagagctcgggagagtgcggcgaaatggggaaaaagagagagaggagaacggcgatgcttaaaaagggggagagggagccggacgtggccgggagcggcgggattcgccggccgacgtgggggagtggggaggagagagaggc

SEQ ID NO: 4811 - DNA, 51923 bp, Oryza sativa
  unsure (1)..(51923): unsure at all n locations
agattcagaactgattttcccacttcattatcaaagtaaccatgaaatgctacacggtaacacctctgttcatctgcataataagtctccacatctgtgccgcttgagcaaactttcaagaaaccttccttcctggcttgtccaattccccactcacgcaacacatcatgaacttttattttctttatccacccaatgtttttacttctttcttcaatttggatcatacatctctgtgccagctcttctacatatctgtaggcaacttcttcttgtgtatatcctcttatatttgggacaaatccctcagcaatccacatctttttaagaacatgaactgtgatagggtagtcctcgggaaaggatgcagtataaaggaagcaagctttaaggttatttgacatattgtgataacttagagctaatatacgtccaacatcgccctcctttttcatgatttcccagtctacactagcaaccattttctcccatgtatgaatattgtggtttcgtgaaaggaagcaacctaaaaccactagagcaagtggcaagccattgcatttcttggagagttttttccccaccacctcaagttctgtgaattgcacatcatgtggaaatgccttcttctggaaaagttcccagctcttgtcttcgtctaataggtcaggggtatgaatttgcactttagttttaggatgttgtccaacttccatatcacgggtagtcagaattattctacttccatttcctttgtcaggaaatactgatttgatcttgtcccaggtatctgttgtccagatgtcatccaaaacaataaggtagcgctcttccttcagaaaatcaaaaataagttttgaaacctctgtctcaccatagaaatttaaatgcatgctctttcgctcgcttatcttcccagtgccccttatctgtcgcacgagatctcttaatacttcaagggcagaatattttggagaaatggatacccaaccatatttgtgaaaataaccttcagttatgactgaactataagctagttttgcaagtgtggacttcccagcccctgcctgaccaacaatcgatataacagttagattcatgttattttggtcaagcaagtaactcttaatttgtgcaatttcatgatcgaatccaactatatccattccttgatccaaacccggcggcacaagcctttgtgcatagaaatcctcatcctccctaaaaatgggctgtgcttccgttgaagtgctagaattaactgcgttgtatctgttgtaccgctcaaaaatctcactaatttcctttcttataacttgtatgtttttgccaacctcacggaggtcaatggaatcaccaaagatgtgagtatattttgatacagaagtctttctcctcctaaaaatgaaatgagcattgtcaataacctcttccacccggtatgccacgtcttgaatattactggccagatttttcatcatgctgtttccttccaaacatttggcatccacaacatttaagaagcattgcatctggctcagttctgctttcatggatgatacttgtcgaggaacatcacttaaaaaggtagcttcttggatgacaaggtcaccaagcctctgcaaaactgaggaaactactgatgctgtcatgcttagttagctgaatgaatccaccatgaatttagatggagaaagttgcatagccagtaaatatcatcctgttctgtccttattgtttaatagtacttgatgagatccccttatgttattgacatccattaatgagagggcaatagatatcttccctagggcaaagtcaaataacaatctcagttaaatctatggagagaattttagaaagaagttgctgctctgctcaatggagataaataactttccagcagaattttttttttcttcgaatgtgggcatggaaaatcatgaaggagacaaacagcgtggcgaagagtggtggtacaaagtaagagaaaaagcttacggaatacagatatggtcaagcagaaaaggaacacagaaaatatccccttcagtattattgacgaaattatactatacacccttcatcaatagttgaatcttgctggattacttcttttctcgttcagaccaggtcgttaacaaccattattaccctctagattcaagaaaatttagagcataatcctaccaagaaaatagttgctgaaacttaaacatcgaaacagcacatcattggtagagtgaagaaactgaatctttaaaatagagagcagaaattaccatatccatggttgagcgagaggggattgcggctgggggaagagacattggaccgatttggagagaggaactgaaaagccccaaattgacttcgttctggagctgggctacagtcgtcgactttcaagcatcagtacaggaaggataaaaagtgccgaacatggagacagataagcagtagtggtggggctacgaacatattccttttccttctggacgctaccactcatatgttccaaaattacaaatttgtcctttgtatttgttgcaattttcatgtaagaaatccaacgaggctctgtttttttttattggccttgtttggatcctcagagctattaaatagccctgtagaatcttactatttaggagtattaaacgtagattaccgacaaaaccgattccataaccctaggctattttgcaagacaaatctaatgatgtatattaatccatgattagcgactgattactgtagcatcactgtagcaaatcatggattaatatacctcgttagattcgtctcgtaaaatagcctatgggttttgtcattaatctacgtttaatacttctaaatagcaagattccggagggctatttaatagccctccggatccaaacagagccattgatcatgtcgacggaactctaacttctcaatttaacttactttacactttctatcactttctattttcttggtgtcctaagaaaaccctacatctttctgggtatatcataatacaagtggattttctttttccttttttggcaacgctacccctgtaaactcagcatagccatgctgcatttgtgcatgttggtatatacaccatcatccatgtcagagtactgtattgcaaaacacatctattatctatctattataatactacaagtccattaaatttcctacaaacacttctaagctgccacttggcgctctaataaattagagaaatcaaagaaattctaaggaaaaagcatatattctaacactttgcatgctaccaacaatcgtgaaatattatagaacaatttaatatgttgattatgctaccatacatttattccatcctaaaatataaacatatttagaaaagtgctaagtcaaacattttaactttaattatttatagtgaaaataaataaaagatcaatcatataaaaatgatattaaatacaatgtcactcttctatctagaacaatttattttttataaatataaatattattagtcaaagtagtatcctaaagaccgttccaaaataaaacaaacgtatatttttaggacagaatgtggagtgatctataaacatacgtatctaacaaatagatttaaaaataagcaaagacgctaaagaataattttgaaaaagtgtaatacattcggtttttaatggatggcgtcgttgaattttgtacgcacatttgaccatttagttatatttaaaaggtaataataattatttattttgtttttttagaataattatttattttgtcgtggcttagtttatcattaaaaaacatgcctgcacgaatgcgcaggctactttcttgattataatggggaaacaagttaactaatccaacccaccgactaggatccaccaagcactacagacaacttacgttaagtatggattgatgatttggcaaggcccctttttttttttgctctggttcataaaagctgagagtttgaatttgaaccttagaaaattgtgacttagcaaatttatctttctgtcattggctccctacttaatcatctctcagttttgacttaaaattactgttgctgttgcaatttgttttcagtatgacgtaaatattatgattcattttgaaaatgatgagaatagcatgagtttgtttgtgctagaaaacttttcgtctatatcaaatttctcttgttttcgttgccttatactacgtatgccctggcaatctggtatcatgcattgatctaccaagccagcagcctgccagtgccaggttcgtatgaggaccctaagtaaagccctatgccccaatgggtgttttgaaaaagaacactattgttttgttcgttggtgcatttgatctatttcgtttcgctgatccaatgctttgccaaatattaccttgacattcttaacttgttatggaaacatttatgacaactcagaaacttcttacaatttcaaacattacgatcctttgtactcaactaatttaacttttgcatgctttcagtaggtcgtgttaagaactgtaagaagctcttgtaagaatctgatatcattttgttaatgaaatgggagaggaatccctctctttctcgaaaaaaaaataaatttttcactagcagattttcgcgataatagttatacattagttttgacggaattagcaacatgttggcgaagacgatctatgattctcgaatactgtgatgaagtccctagttaaacggataggtgtattattttgtcttgcaaagctgtaagaagttatcatcactttctacaaagtctatttgtattttcttgtgtgtcaggcgcaaaataaatttactagttctctcaacgattatcccagtattgcctctctagcatggtattgttgtagcattacctatgaaaaatgtagtacagcatcagtagggtcattgttcaccggcgttagaaagttaccaattcagcgcctattggattgaattctgggcttctaacttggctacaatggatcgattttctatgcaccaatagtgccaattcagaaccatgggttatgtttatacctggccaaaatgttgttggcgttcttctaaagtatgaaaggtataatccccaacagagcttatatatatatgtcatgacagatggtgctctgcaatgggtaatcattggatagaccatttgtcatccaatgatccaaacaccgatgttcggtgggggtgaggatcgtctaccataacgtcactaccatcatagtaactagtatgcgggttccaacttcctattgctccacacgtcagtgcctgtaatggtagtgctattatagcagaggatgtgaacccagtgcaaagatattattaaagtttaattttgttatctcgtccttctttagcatcgcaggaaatgtggctacttgaagaaatttgtcttcgaagaaataattgggctgtttggttctgaaattctgaaccactcatggtatgaagaatcaagaaaattcacatgatattcctggttttcttgtaggatgtgtagatagatgtagatactatctaccttcaacttgtgaatttattgttgttttcatcaaacacataggtgatttttgtttgctagagcacaaacaagactaatattttattgaacaaatagaactccctctagtcacaaatatgtccttttattttattttttttgaacttttgaaactttgactatgacaatgttataattttttttatttggattgaggtaaaaaaaacagacatcacaaagagaaaacaactaaacttttgttgaaaatttctatgttctttctcaaacacgaagcatcatttgtggcttataaaatccacttacaagatttatttgagagttctgtttgcagcactgttgcactttcctccccttccgctctcaaaccttatctgcaccaggtaaaaccgtagccaaaaccatctccattttcaccaggcgtccagtggatctctcaaaatccaccatgggtgaagcagccatggacaagatcccacataatggggtactcagtactcccaagtgcttgagtgtcgactggtagcttaagactgatccagctggtagcatgtggtcaatctgaccaggagcctcatggtcagacctgaggaggctgactctaaatctaactactcgctccatttgaggttataagatgttttaactactatttaagtttgactaagtttatatacaaatataataatatttatattatcaaattagtttcattaaatcaataattaaatatattttcataataaatttattttaggtcaaaaatattattattttttcttcaatttagtcaaacttgaagcagtttaactttgaccaaagtcaaaacatcttataacctgaaacagaggtagtatttatcaacctgcattgagtagcaaaagagaagaactaagtatagctgattagtttgtaattaactaactcctaacgaactaattatgtcatcatgccaccttttttatagcaggacaagccctccaattcattaacgaagtaatgcattcaaaaggtcctgagtaaaacaaaaactaaacagacaaattgttctgctagaaccatgcatcaacatcagttcagtacgctagctacatatacttcgataagagcatggaacaaatgcaattaacacacacttctatattgatccaactaaaatttgtgtgcttccaagaccttcaagaccgcctgtaaccattcctgcacacatgattaaccaccaccatccacgctgtcaagtgtcaaaagcttcttgttctcctttcttcaaaatagaccataaacctaaccagtaaggcaataacagacatttaatatcaccttgcagatggactgataacttaattatttcagaaacacaaacagatctataccgtccccgcaaaaaaaaaaaaaaaaaagatctataccgaatcttcaacagtgcagaaaattgctgaagaaccagttcaaactagatcattccaacaaggctgtgtttagttcagcgcaaagtttggattttgattgaaattggagatgatgtgactgaaaagttgtgtgtgtataacaggttgatgtgatggaaaatgactgaagtttggatccaaactttggatctaaacacagcccaagtgagatgctattccagggataatgggtaagttaaaaggccatgtcactatgttagagtgctacatagcgaacaattgcttcattactaccacaaaattgaacaataacagccttgtatgtgttgtccaaactgagaaactaccagtcatgcaagtatgcaactaccaaaaaaaattcatctcccaacagatttcctatccctactgaagatgaagtctgatgtctgagagttcaaactaacagtcatgcaacaattgttctccattctgataccaagaattttataaaattgtattaaataacaatcattcgaaaaataaaaaatatcaagttaaatgggcttaaattagtgatcagaaagcgttcaaacactttattcacaaaggatacacggcaatgtactaaacaagaaaaatgtagcccaatgtacagggaaaagagaactgatcatggtggcttcaccgtagtgctagtcactgcaaaaatcaactgttgaaaattgactttccctgaatatatatactagtaggtattctagtgtcacataatttacagtgcactaggcaatttgtgttcatgggtgcattacccttgaattaataaaatgtgtgtagtaaacacggtaagaaaaaagattgcaaagcaacattttaactttgtgcgtctatttaaagaacgtttaactttgtgtagaattctactagactactaatccgaatttgtacaactttgataccacgatacggaaagtagcaaagctcagcactagaaacaaacattgttaacacaaaaacatcaaaattaaagcaactagatcgagaattacagcaagattaaatgggagaacatgttctaccttggacattgacaattactgtcttgttgatcaatcagcaagagccggcaatggcggatgcagcgccatcctgtagggaagtgccggcccagagtagaacctcctgtgaggcagatcgatgaacatcatggtctcgaggcttagcgcgaacacccatccagagccgtagtgcttgaggaagacgaagccctcgccggcgtccatgatcctcgtcgggtagccatcggcgtccgcgaagaacagcggcgcgccgtgggcgcgcactattagtgtgaacacaaatgtgatctttcagctaaaccaaagtcagcaagaaagatttttttttagggcaatcgctacagcgatcgccccttcaagaacatccccgatcggggggattaccgccttaaccctagtgccggttccccctatgtgcagtggctataaatagagatcaatacctaagagttaaaccctaagaaaaatttctctagctacccgatcaagcaagccactgaaacacagggaagaaccgagacacaatcctctctgtgcttccaaacgagaggaaaagaaagaagaacaaacaacagagaaatgggaactccgggagatcaaggtatgattcaatcccattccaatttgtagttccattttgtgccaaaccgatccaaagaatatccaacaatggtatcagagcaccgggttggcctcaaattggaactcaataagtgttcatgttcaaattgttctttatgttcaagcccaaacccctctgtcaagttgagttaagcccaaatcatgcaatcccaaagcataagaagtagaattaggccttctagggtttcggcttgaagaaattagaagaaggggaagcaaaagttcatggaaatctcagacaaatccccaagaaccgaaaccctagctacagtaaagacctcaaaatttccccaaatcatgaaaccctaaccctaaaatcatggagaaaaggagtgcggcgggcttacctaagggcatggtggccggcggcgacctccgtgtcgccaccgacgcaataagaggcgagcgcgcgcccgaggacttggtccccgagcggcctcgcgacccgccgtgccggcccggctcctcctcctcgccgacgccgcctcgctgaggtagccgtcgccgccccgtctcgccgtcgccgccgcggatcttcctcgcgcgtgcgactggcgggtgcattagggcaccgtcgagcaacgctcgacagggatgcgcgccagctatggcggcacgcagccccgacgagcaaggctcggcggcgccatcactactcccgccgtgcgccgtttcgccgtcgtcgtcgtctcgctcacagtcgccgcgggtgtgagagaaagaggggaggagaaaatgggggctagggtttcgcggggggcagtcgcgcgccggttttgtcccgcgcgggagcgatctcggccgtccgatcagatggacggctcagatcggctcgctcccgacgcgggatgacgaggccacgcgggaggcggcaaacgccagcccaggcccaggtttttgggcctggagcccaggcgggaggcggctcggccgtaacaggccaggctgaatgcggcctgcctcagggaagaaggcccagataaaaaaaaattgttatgggctgcatagtaacgggctgcatagtaatgggcctaattaaaaagattgggctgagataatattacaattaaattttccttttttgatgaattatgattatgattatgatatttgtgtttaaacattgaagatatttattatgttttagttaatgataataagaataataagtgattttgttatgtgataaaattctctttcatttatttatttattttatgatcatattatatttattagttaaaattattattgttattgttgttttatgcattatgaagtttatttccgctacaaataaatattacaattaagtgtgacaaataattgtcattctggccaaagctgattgacttttatttgatcacaaaattttattaattcaattcaaatctggccaaagctgttttgattgaattaataaaaggagttttaaacaaattaataaagtgtggtttgtatttattattctggccaaagctgattaataaatacttattcacaaaattttattgttcatttccttctctggccaaagctgttttggatttgatcaataaaagaagatacttatttagctgttgattctctcttatgcagcatcttatgcctcacaaatttccggaataatgggaaatattgaacaacttaatggaagtaattatgcttcatggaaagaaaagctggaaattactctagctatgttggatattgattatgccctccataatgatcctccagttgaacctagaccggaaaatgagaattatgagaccctaaaaaggatatatgatgaagtaaaggcaaaatgggatatttcaaaccgtaaatgccttatgattatcaaaagctccattattgacgcaataagagtagcagttccagatactcagacagctagagaatatcttgctaaaattgaggagcagtttaaaggctcttctaaggtttatgccaccactcttattaaaagattggttaatgaaagatatgatttttctggaaatctgagggaacatattatgaaaaaatgtcatatggcttctaagcttaaatcaatggaaatggaaatctctgaaggttttcttgtccatttcattatgtcatctctgcctcaggagttttctccatttacaatcaattataatgcaatgaagatcaagtggggcattgatgaattaatagccatgtgtgtacaagaagaggaaaggcttaaggcagaaagagttgatcatgcaaatctatttaaacactctgagaagaaaaagtataagaaatttaagaaggagtatttgaagcctaagcctattcagtttaaagaaaaagggcaatcttcgagtcaatcccagcagaataaatctggaggaaatccctatacagaagaaaaggaaaaagaaaaggatgggtgctacttttgtggaaagagtggacaccgccaaaaagactgtattgggtttatgagatggctcagtaagaaaggtactgatgttatttcttttgttgatgaatccctgaatattgattatgccaccaattcttggtggattgactcaggagcgacaattcatgttgcaaattccttgcagggattcgctatgaggaggaccctaagaagaggggaaagaagaattagagttgctaatggagttgaaactgaagttgaggctattggagacttcactctcacacttcatactggcttcaaacttcagctacatgatgttctttatgtaccctctatgaaaagaaacttagtttcagtttcacgtttagataacggtggttactattgtacttttggaaacaatagatgtataattatgcatgataataaagaggttggtctcgccgttggacgggaacaactttatcaaatctctgtgtgcgatgccacctataatgtggactcctcctcaaatgcaaatatcagtaccaaacgaaaacataacgataataagactttttcgaaattatggcactatcgtttgggccatatttcgagggggagaattgagcgtctcattaaagaaaacatcctttatcctttggacttctcagatgcagatgttgttcactgcattgattgcatcaaaggaaaatattccaagcaaatcaagaaaggtgcaaatcgaagtatgggagttttggaaatcatccacacagacatctgtggtccatttaatgaaaagtcagtggatggattcgattcattcataacattcaccaacgattactctcgttatggatatatctatccaatcaaagaaagatctgaggcattagacaaatttaaaattttcaaagtagaagttgagaatcaacatgatcgaaagatcaaaattgtaaggtctgaccgtggtggtgaatactacggtagacatactacttatggtcaaattcctggaccttttgcgaggttcttacaggaaagtggcattaaggcctagtactcagcaccgggcgaaccccagcaaaatggagtagctgaaaggcgtaatcgcactcttatggatatggtacgaagtatgttaagtcactccactctgccggtaaagttatggatggaagctcttaaaacagctacacacattcttaacagggttcccagtaaatcagtccctaagacaccttttgaattatggactgggaagaaaccaaccctaaattattttcttgtgtggggttgtcctgctgaagcacgagttttcaatccaaatatgggaaaattagacctcaaaacaatcagttgtcattttatcggttatcctgataagtcaaaggcatatagattctactgcccaaattagtttacaaagttcattgagacaagacacgctgtgttcttggaaaatgacataatcaaggggagtatgacacccagagaagttgttctggaagagaagcggaattatgttccaatgcctataattgaagaacccgttttctcaacacatactcatgttgcaccttcaatagaaagaaataatgatgcaacacctgctgaagctcctgcaactacttctagtagtgtatcaaatggtgagaataatgaggatgctcagcagccccagattgtgatagatgagcaaaataacgagcccgtcagaagatcacaacgagttagaaagtcagcgattccaagtgactatgtcatttacatgaatgaagaggtgaatgaacctatgattgaagaggtgaatgagcctatactagataatgatcccatctcatttaaagaagcaatgaagagtgaacattcgtctgaatggctaaaagctatgaaagacgaaatgaaatccatgagtacaaataaggtctgggacttagtagaaattcccaaaggagccaaaacagttggctgcaaatgggtctataagactaaacgtgaccccaagggaaatatcgaaaggttcaaagcagggcttgtagcaaaaggatttacacaaagagaagggattgattataatgaaacattttctccagtgtctactaaggattcattcagaattattatggcactagttgctcattatgatttggaattacaccaaatggatgttaagacggcattcctgaacggtgatctgtatgaagatgtatacatggcacaaccagaaggttttgttatgaaaagaaaagaacatatgggatgtcatctaaagaaatcaatttatggactaaagcaagcatcaaggcagtggtatctaaagtttgaccaaatcataagacaatttggttttaaagcaaataaaaaggatgactgtgtatacgctaagtttaaagagagtaagttcatcttcctaatattatatgttgatgacatactcttagccagtaatgacagaaatatgctactggaaacaaagaaattctggcctctaagtttgaaatgaaagatctcggtgaagccacttatgtgttgggtatagagatttaccgagacagatcaaatggtgttttggggttatctcagaaagcatatatagaaaaggtactgaagaagtataatatgcataattgttcagcctcgcctgctcctataatgaagggtgataagtatggaaagttccaatgtcctaagaatgagtatgaagctgcgcagatgaagtcgataccatatgcttcagctatcagaagcataatgtatgcacaagtgtgcactcgccctgatttagcttttgttaccgggatgcttggcagatatcaatctaatccaggtctagaacactggaaattagctaagaagaccttgcgttatctacaaggcactaaagacctcatgctcacatatagaaagtctgaaaaccttgaagttgttggttattcggactctgatcttgcagggtgtgttgatgataagaaatccacatcaggttatatattcacccttgcaaagggagctgtatcgtggaaaagctccaaacaaagagttactgcatcgtcgacaatgcaggctgagtatgtggcatgttatgaagctactggacaggcaatatggctgaaaaactttatcccgggattaagagtggtcgacagcatatcaaaaccactcaaattatactgcgataacaaaccagcagtatactatacgagtagcaacaaatcaagtgcttctgccaagtacattgatatcaagtaccatgttgtgaaagaaatgatccaggatcagacaataagcgttgagtatatgaacactaagttgatgttagcggatccacttacaaaaggcctaccacccattgtatttaaagaacatgttgccggcatgggtttggtagaaaagcctttgatcctggaataaataggaacctatatggcactgactccccataaaactaaggcggactcattttgaaattaaataggaaccatagtcacttggttcagtggtgcttaattgactactgtaatctagtgtcttgatgtactgttttattgaaaagtgagtccataagtttgtataagcctaatgtaataagttcaaagagctcgtaagattaaagaagtttgttttaaagtataatagtatgctatagtcactggattctgtgatgttttatattggtcactgtaatcttttgtcttggtatactattttattgagaaataaacttataagtttagcctcacgatcaagggggagaatgttagtgtgaacacaaatgtgatctatcggctaaaccaaagtcggcaagaaagatttttttagggcaatcgctacagtgatcgccccttcaagaacatccccgatcggggggattaccgccttaaccctagtgccggttccccctatgtgcagtggctataaatagagatcaatacctaagagttaaaccctaagaaaaatttctctagctacccgatcaagcaagccactgaaacacagggaagaaccgagacacaatcctctctgtgcttccaaacgagaggaaaagaaagaagaacaaacaacagagaaatgggaactccgggagatcaaggtatgattcaatcccattccaatttgtagttccattttgtgccaaaccgatccaaagaatatccaacacgcaccagatccagccgcgactcctgcacctaccggcctctactgctcctgctcttgtcaagatgccagaagtcgagcgccgccgccgcgaacgccacgacgcggagctcgccgtcgtcggatctcatgacgcacatgttcccgcggtagcgcgtccacatggcgcgcggcagtttgatgttggagaactgcttggtgcgggcgtcgagcgccaggaggtatgggttgtcgtcgtcgtcgtcgtcgtcgtcgttgatcagccagtagacgctcccgttggtgtgcatgtcgtcgctgaatgcgccgagcatgggcatgatggcggtgccggcgtcggagtaggggtgcacggtccacgcgccggagcgcgacgagaagacgcagaggcgcggcccaggcatgaagtaggtgacgacgatgatctcgaagcagaggacgccgccggcaccgccgtcgttgtcgtcgtcgatgcgcagcgcggcgccgaggtacgcgctctccgcgtcgagctggtagaagcgggcgtcgcgcacgaggacggagcggccggacacggggttggcgacgacgaagttgcgcgggatgctcatgcggtcgttgaaggtggagcagaggaggaggaggccgtcgcgggtgtcggcgagcgcccagcggtcgacgtcggggagggaggcgagggagaagtggccgcagcggctgatggcgccttcgaattccctcggcacggggtggaaggtcgggaggaaggcggggtcgaccacctcgccgacgagctcgccaccgaccttcctcgagacggcgaagccgttgttgcagacgaagaagccgaggagcgggggcgcgtggcgatggagccggcggaacaagcggaggaaggtcggggacgacgcgacacggcgccagcggcggcagacggtggcggcgcgcgcgagggcggccgcggaggggaggcggagaaggatcacggcgaggaggcggtcgtcgagctccgccgtggcgtccatggcgggaggcgaccgcgctttcctcttcccgttcccggccattttctactcaaacgcaatgcgcggttgggttttgggatttgggatttgggaagatggcgatggtttcgggcggcgagatgggagggagagattgatcgtgggggatatgcacgatttcccgttacgaggatatgcacgatctccttttcacagggttggggttggtgccttttttttttttaaattacacagtacaacacaaatactcacaacgcacgcgcactcacccctatgaacacacatacgtaaaccctacccctatgagcatcttcgaagactgggccgataaattctggagagattgacgaagtcaccataggcgcctcgctgtcgacgggtacgtcgcctaccactgaaagcacaggggttggtgtcattttgaaaatgtactcaccctcaaaaattgggatttaaaatacagaaactaaaaataaaaacctttaaaaactttgcgaaaacatgctgaacctccaaacaatattcaactataaaactgggttatttggagttttacctaatgcttaattacagtttaattgagaggcattgattgtgaattgtatattatcgtttaaagaaatattttgcaattcaaaagcaaatctgtcttcacactctaaggctgtgtttagatccaaagtttggatccaaatttcagtccttttccatcacatcaacctgtcatatacacacaacttttcagtcacatcatctctaatttcaaccaaaatccaaactttgcgctgaactaaacacagcctaagagcagtacaataacacactataaaccagctataaacatattttaagaagataaaagaggaaagagaagagcagcgggctagagatttgtagctagctgtagcacaaactccaagacgcagtgtgtatgataggtgagaccacgtattaatagtgtagtatataactattatatgaattaactattaaattgactatatatgatttttggagctagtagttgactatgctattaaacttgctctaaccattttccttcctagcgtgactttttcctttcaggactaccaatatatcattcggaactttttttgttgatttttttttcaggcagagctgataatactctccctagacaatattattgatgttttagatttcatactaaatcaccaactaattttatagagaaaattctttgtatgcccttaaaattttagccgatcccttatatctcttgatgtttttgttttatcttgtaactaaaggaacaagtcatatttttttaaaaaaagaatatataaagaacaatccctattaattttgtcaaaagaaaggggcaccatctctcggactaattgagctgattaattaaatgtttcattatgcctattaattttaagatcaggacaagccctccattaattaaagaaaagaattcaagcatttaaaaggccctgagtaaaatctaaatatatgaaagcaacaagctttctgaaaggaggatgagccatatcatctacaatgtatggaccgttggatgaactggtaaatgaaaatacacagttggatcatcatgctcatctatgacagtggaaacacattggaccaatccggatgcttccagactaaagacctcaaaaagcagagaactcatgtggttagtctatttaacactaccgttaaaaaaagtctttttaacactatatatatgtttgcttaattaatgtcctgactaaataaaggaaaaaatatgatgtcttaccgtaaatttgtattgaatttatatgcaagtttatatctataatgtatactacttttgattgcttggtattggagcaacacacaacaactaagtagcatacactatgtaccattttattttaaaacagtccctacaaacgcacaccttacacttaggagcacttagtgttattattgtctccgttctaaaatataggtgttttaacattcaaaatttatcataaactatagctatttctacatctactctctcatcttaaccaacatagtcatatcctatttaatttcttcgtctactttgtaatgtcaatcaattacaacattcctccatttacatctcttgctactgcgtcattcccgaaataagtatttctacgacaaattttatatacaaatataaagcatttctaggacactaatatttcaatgcatatctaacatttttagccaatcaggtgttcggaaagagccaatcggagtagttcaaaatttgatagtaagtaaccgaaagagatcattcctccttaatcttactctttactaaacaaactagaaatacttatatataggaattaatggagtatatttgagaacaaagattagggtacttacgaaaccggtaccttcaattaatatcaggatcaatatctcaatgtctaattatataggtaggttatactaacgctcaaagtcacgcaaagcgcgactaagcatttttttttctgctagcaccattcatcaagagttcagtgcactaccagtctaccacactacttgacccaacgaaggattgtgtgcttcaagactgcttccagccatttccaatcacattcttagtcaacaccatccatgctgtcgagtatcaaaggcttcttgttctcctctcttctgaaaagtagacaataaacctacaaaataacagacaataaaaatcactggaaaacacaagagatcgaatcttgaagagtccagcaaattgctgaataaccaattaaaagctaaatcattccagcaggtgatgtgctatcgcagagatactcggtatgttaccatttcaacgaatcacaatgctccatatgtagtgaacaaatatttcattacaaccacaaaattgacactacgcgacagtgatgaaactgttaagtatagtagtatgtcaagggtattagagtactttcccctctcttgtgttccccctctcttgtgtacatatatgtcatttagggccaaatcaatacaagattgaaatcccctaatctctctcttaccttgagatggtatcagagccttactgctaatcctacccaccaagttcccatcggcggcacgccggcggcggtcgccgccggcgagccattgtctcgtactaccgtcgtcttcgtcaagttgttggtagcatcgttgttcgtcgtcccgtcctcaagcctgtcaagcagcagtcaggagcatcgtccttcctcatccacacgcatcagtgcacgccgccggcggcaaccccgtccaagctgtcagccatgtcgtccccgctgcggctcgtcgtcaatcgcgaagccgtcctcaccagccgtcgtcctcgctgcccgtcgcagcgctcgtcaacggcatctgtcactgccgctcgtcgcggcgtgcatctcctcaccagctccacacctcgctgcctgtcgtaaccccttgcgtggcgccggtcctctccgccaatcaggccctgtcacccgtttgtagcagagcaagcagctgccgctgccggcagatccttcagtcttggctattgcctgtaaactgcacaagtccatatgctgcacacaaggtgctcgacaaaatgcttcaaagagttgctcccagcttgtggtcatgcttttgcctttccaatttggtgctttactgaaagtattcgtggtctctcattaccatctcctgtccatcttcatcagctacttctctctgctaccaaattggatagaattaatcagttaatatgcaattccttggcagccacaattatgtcttttgctagcatatcaatgtcctctacaaattgatttcctttgtttcctatgatcctatctagtttatccattaaagccttgctgcatatctattagtatcattgtgtcatttactagttgccattcaatccatccaagtccattgcatattcttcaatccgtccaattgatctccagcttcatatcagctctccgtcggaattggtctatcacttcaccagctccacatcggagctggtctgtcatatcaccatctccccatcggagttgacatcatcatcactcaatgaaggactgaagaacaatttgtgaaggtcctttatcagatctatgaaggtccgaagaacagtttgtgaagggccttccatcatcgtcaacgtctctgaatcaatgaagagccgaagaacgagtcgtgaaggcttcaaggtaccgagggccgaagaacagtttgtgaaggctccgaggtccacttcattgaagaggagatggatctttttcttcttcatcgtcatcatccaagaattggcacactttgacgacatcatcaagactttggagataggctaatatttagtttgtgtcctagtgtttagtttacccttcaaatgcaatgttattgcatacacattgcatttgagtgggggtgttaagtgtagtagtatgtcaagggtattagagtactttcccctctcttgtgttcccctctcttgtgtacatatatgtcatttagggccaaatcaatacaagattgaaatcccctaattctctcttaccttgagagaaactttgtccaaacagaagggacgcacaaaagattcttgaatataataaaccctgattatcaatcatgacaaccttgtatttccaacaaaacctgtgatatatattattaacattatcataatccccagcataattttagacaatttctgaaagtaaatatttggtctcagccacttggctagtgaacaaataatctaatattcaaccatccctactgaagatgaagtctgagagttaaaagggaactgaaaaatgttttcaaggcggatagttcaaagtaccagacagccaagagtagttcaccaaaattatgataccaacagctcttgaaattatgctaaaaccagttatcaaaaactaaaaaagaaaagttgaataggcttaactagtgttcataaaacgttaaacacttaattattacaaaaggatactctgttactaaacaagcaaataggagcccgttgaacagataaaagagaactgatcatggcgtcaatgtaaaatcaagtgttgtgaattaacttttcctgcatatatatggtatctgcattaggcattttttgttcgtgggtgcatgactaaaaaattaactatgcagaaaatacagaaagaaaagaaattgaaatgcaacagatctttcccagtcccagatagaagagtaccaaccaaagaagcgaaagcatttacgatgtacaacgatccctgttaagcatccaaggttgaatggttaaagcgcccaactcataattggtaaatttgcgagcaaatgggattagagaactcagtagtcctagctgtaaacgatggatactaggtgttgtgcgactcaacccgtgcagtgctgtagctaacacattaagtatcccgctttcttcaagatttggcccgaactgttcggcagattcccatgcgttacgtgtgccaataagagtttcccgacactaaccataaaatagaaatacactactccaacaaatacaactacggaactagataatcctttctaaatgttctataaacttggatattagggagtggtaatttcatcgctcgaatttttctttttattttattaatagtcttagattttgcattttttatgagcctcgttttgagggagattgaaatgcaatatttcaacgttgtgtatctatttaacagaaacttttaactttgtgtaaaactttgtgggaaaataaatcagaatttgtataatcttactaccacagtacgaaatacagaaaaactaagcaatgtaagtaacagcgttaacacaaaaatacctacagaatttcagcaaggttaaattacatgaaaggttcttctaccttgacattggtgaatgatgattgctgtctagttgatcaacccgcaagaggccggcaatggcggcttcagcaccagcctgtagggaagagccggcccaaagtagtacctcctgtgaggcagcctgaacaacaccatggcctgaacgtcgagagcaaacacccattcagagccatagtgtttgaggaagacgaagccctcgccggcgtccatgatcctcgcgacgtcgtcatcggcgtccacacagagctccatcacaccgtcgacgtgcgccagctccacccgcgactcccgcacccaccgccccctgctgctcctgctcttgtcgaggtgccagaattcgagccgcgccgctgcggccgcgaacgccacgacgcggagctcgccgtcgtcagacctgatgacgcgcatgttcccgtcgtagcgcgtccgcatgctgcttagcagtttgatgatggagaactgtttggtgcgggcgtcgagcgccaggaggtacgcgccgccgtcgccgccgtcgtcgatcagccagtagacgctcccgttggcgtgcatgtcgccgctgaaggcgctgagcattggcaacatggggatgtaggcgtgcacggtccactggccggagcgcgacgagaagacgtacagacgcggctcccacatgttgtagcaggtcacgaggatgatctcgaactcgaagctgcagacgacgccgccgccgtcgctgtcgtcggtgcgcagagcggcgccgagatacgcgctgttggtgaccggggcgacgtgcaagaggacagagcggccggacacggggtcgcagatggcgaagttgtccgggatgtccatgcggtcggcgaacttggtgcagaggaggaggaggccatcgtgggtgtccgcaagcgcccagtgctcgtcgtaagggagggagtcgagggagaagtcgatgcagcggttaacggcgccgaggaatcccctcggcgtgagcctcgggaggaaggttgggtcgaccacctcgccgacgagctcgctgtcggcaatcgacctcgagacggcgaacccattgttgcagacgaagaagccgaggagagggggcgggtggtggagctggcggaagaggcggaggaatgtcggcgacgacgcgacacggcgccagcggcggcagacggtcgcggcgcgcgcgagggcggccggggacgggaggcggagcaggatgtgggcgaggaggcggtagtccagcgccgccgccgtggcgtccgcggcgggaggcgcccgcgctttcctcttcccgcccatctcttcgctgcgcgcggcgcggttcggtttggaaggtggcgatggtttcggcctttcgggggaaaggtgaagcgggcgacgtgaatacgtgatgggattggggagtggatgaggacgtgtggcgtactggcgtgacacgtatgaacgtggcgggagaaaaggggtagcgacggttgtttcgcgccacttctcttgtggagttggcgccattttcgaatcttttatatgagtttggtttaaaatcagttttaaggtaaaaaaaaacttttaagactaatataatataactacaaattagattgtactatgaattgcgtgtaactaataaaaacatttgtggcccaatggtaacatgcacctcctctagtcctttgaaacgaggtctatgttggaatacctactaaccagtacaagcttgcgtgtttttccacctgcatagcacaaatcttatggaaatgcttcggattagacgtttggcataacatgaaaaatcaaatagacaaactactatatatctccgtgtgcactttacacatccatacatgctataatgatcttcaaaataactttttctcttgaactacttatccaatctatgatatgatcacaccattatatttgttataattaaatctttactataagatatcacatcgatatattctgatgaaagaaaaatatatgatgaaagaaaaatatatgtttcaatccgttaaaatttaatgtttcagatgtggtagcaatatgtttcaacgcgtgttttcattatgtttcattaaaaaaattaaatattttaataactgaaatttttatttcaccatgtataactcaatgtttcaccaatgaccgaaaaaatatgggatgcttatgtccctactctcttctaacattctagtggctttcttcccacactatgcatgcatgcatgtatttagtgatcttaaaaatatcttctcttctaaactactcatccgatgaacgatttgatcacaccgttgaatttgttataattaaatctttacaaaaatatatcacatgattatattctgataaaagaaaaacatatgtttcaaacaatgaaaacttaatgtttcatacgtgatagcaataagtttcaccgtgtgttcttattgtgtttcacaaaatttctctatgtttcagaggttgatttttttttcaccatgtataacttaatgttgcaccaacggtcaactgaaacatttgaccgtccatttttttctgtaacatcggacgtccgatttgtagctctctcccaaagcttaaagcacaatggaaccataaaaggccccataagcccccaagcaaaccacgggaattgctaaggacattcacagtacggttcgctcattagagtagccctagccctagatgccacataagcactacacatttaggccatataccccaacacccatgttgtgtttgcaaccccatgttcccaacccttctccctcgttttacgcgcgtacacttttcaagctactaaatggtacgttttttacaaaaagtttctatacgaaagttgcttaaaaaaatcaaattaatctatttttttaaaaaaatagctaatacttaattaatcacgcgctaatggaccgttccgttttccgtgcgggagggattagttcctacccgttgaatctgaacaaagcctagtgaaggtcacacctagttaatttttttcggacccacatgttagcccctcccactctctctctcaacccccttccttttctcacctaaacgaataaatgggttgtgattatttatccatcaacacatatgtacaaattaacgcacgttcatcttttctattatcaagaaaaaacataaaaagcaatggttatacacggtcacggtcagtcggtcccgtagttaaactatgcctacacagaccgcatacgaacaaagtcgatcaatagctagcaagctacggaagataggtaataagatgcctgatccatctcatatccaacgaagttcgtccatgacctacagtcgatgtcatcagccaccttctcaagctccttggttgcaatgttgagcacataagcaccaggagtgctgctccctttggcgtcgattgtgaagaagagcaagccactcctctcgcaaaaccacctcaggttcatggcgtcagagcgatgcactctcaactcatgcaacctgacgcgccatgtacagacgctcacctgttcgcgcgtacaaccgccattgctgccgaaagcaaggtggtagcagcttgacactccggcggagccgtcgaaataccttgaggtgacgatgaagctcagcttgccgtccgggctgatgccgagcagatggtcgtgcggcggcgcctttggaacggccggcggcatcggcatctcttcgggctccggcgtgtcggcgcgcacggcgaatgccgtgtgcgccaggggccagtaggccacgccgccatggacgacgctctgcctgaggttgtggagcgtgtagctgctcatcttgggacctgatgatcgtctagcctccgcgctccagcggccggtgtccgacgagtaggagcggagcgcggtgtacgttcgccggttgtagacgacgacgacgcggaagaaggttggcgacgacggcggcgggtcgtcgaggtcgtcggcggtgagcaaggcgcacgcgtacgctcccggcttgtcgtcgccatggagaggcgggagcgtggcgacgtcccccgtcatggggttccagacacagagcttgagcccgtcggcgtgcccctcgcgccggagctcgaggacgacgcggccgttgcgggacgtgaccgggcgggagtactcgccgtcctccacgaacgggctcaaggatgggccgaggagacgagcgccggcagccgtcgggacaaagcggcaagtctgccctgccgccgcggagcgcttccgcttgccggcggccgcctcctggtagaagaagccgagggccaagcgtggtaaaaccggctgcggcagcggcagcgaacggcagaggaggacggccgcgtcggttatgacacggctccaccgccggcacgtggcggcgcagcggactaggtcggcggcgtcagggaagcgggtgaagacgttggcgagcacgctgtccggaacgtccgagaacgcgccgccgttgccgtctctgtcgtcgttcctggcgcgtctgttcgtccggcctcgccgtcgccgtcgcgacagccagcctttgtggtacggcgcgagacgggcggcggccgcgccgcgtggtgcgcctcggcgtcgcggcggcatccaggctgcgatgggttggtgcgcgattggatggacgcggtgatgctttggcgccgcgttatttatggccgcggaacgcgcgcctcccgttggcaactcggaagtcggagaagacctccgattccgacgatgtctcgtctgacggctatgccatatgttctcaataaataccaaccgtcagatcatcggagcgccgacgcatcgccatccatctgatcattaatccctaaatcctgtttgattgtgaaccttttcctccgacgttaaaaacgaagcagttattagcacatagtcccttcggttctattttaactgatttgttaaattttgttgtcgatttttttttagatttggggataattttgtgaataacttggatgattttgtgatgggcttgtgaattatggatgatttgttgcgcatgattttgtggatgatttgtacatgattagagagcatacctgcatgtaggatgtaactacacagctagtacaaaccagctaccactccatctataagacgcatcatccacctatagttcaaatacaattttctcttaaactactcatccgatatacgatccgattacactgttgtgttagtaacaattaaatatttacaacaagatatcacatgattatattttgatgaaaaatcacaaattacttttatgatatgtctaaattacttttagatttcactaagttacttcttagatatataaaagtaaattcagtaaaacctaaaagtaatttacatatattatagaagtaacttagaacaaaacgaaggtaactttagcatgtcatttgaagtaaatccgttgtaaagataaaaacatgactctatctagaaattaaattaatcagcacaaattatgaaattaactaaaaaaataataaaagtaatcatctcagagcattatgaatgtataggaagtattttaatcaaatctaaaaataacttatatatatatatatatatatatatatatatgggactccatggtgcccgggctccaaggtataaaacacacaaattctctcaaatttttaaaaattttcaaattgtgagtatatacctaggtataagaatttgattcatacaaatacctaacaacaaaacaactcaaactcaactttatttcacaattcattattgcatacctaacgaattatatgtttggatgttatatacctagaaccaaaatctaacaaaaaaaaagttcaaactcagttcaaacttgtttgaacttgttagtaaagaagttaatgttcatatctaaacatttaaaaaaatttcatactcattcaaattaggtatatactcaatttgaatcttggagcccatactctatgtagcaccaattaatttacatatatatatatatatatatatatatatatatatatatatatatatatatatatatatatatataaatgattctatgcacctgggtgtacgtactcctgctcccatccaccgttgatcaacaaccagccacgatcaacaacatgcttaccggatccacccactaaacccgtttttgttatagtcgtgaaaaaatatttttcataatacttaattatgccggactaataggacctaaacagaacatataaatccctggttccattccatccggtgacggcaacagctttactctctccaccgtattcggatcgagagctactattgtcgattgaccacggcagcggcattcatcgatcggcgatttgctgcggcacggcctttgtccacgcggcggcggcgaccgccacactcgccagccgaaggagcagcgaggcaactgcaccacggcgcaccgctagctatgactcctggccaccggtgttgatacgatgaagaacgacggttgatcgggcgggatgcaggatcagccatctgggtttctccgacgagcctggtgaatactaaaatccatacacggcaacagacttgcataaggtaaaccatgccgttcttaatccttattcatcctgtagttatctttccattttactattgattactattgcagatcgaggactaactttgtatatgtcgttagatccgtatgtgcatgtagccatttcccctccttcaattcgatgatcagtaggcctgatgcatgtttctattcaatttttattcctctggtaatcctaatgatatatatgaagcccctaactaactttgctccatacagatgcgtgacatataccaaggatcgatggtggccaacgcccgacagtatatgaattgccgatttgccagtattaattaaaattctgtccaaagcagcttgtgcagttcgagaattgggtatattgtagattcatttatttctttttcagaatggctaaatgtatcatgtgaatccatatactgcctggattgcaaattctattgtgaacataatatgattcaatttattctaaatcgggtattgtaaaacaactattttgttctttaaaatctcctcccagtcttagttctgatctgtatgcggaatataagtactactaaaacacatcatgctactgtgcaataagtatgtagtatcacagcatacaatttctgaaataattaaatcagtacatgcttctaaaatcacaccatacaatttctgaaagacatcagtacatgcttctaaaatcacagcatataatttgtgaaagatgccggatccaagcagagatctacgtatatacaggattcttaaagaaagcagtatatactactccaacctgggatgaagtatataccatatcctaaaaaaacagttcataccactgctacctaaaaataagtatatactactactaacaaaaaataagtatatactactactaaaaaaaagtatatactgctacaacaaaacaaaaggtatgtactgctgatcactgcaaagagtatatatactgcttcctaaaaaacagtatatactgttgccaactaaaaaacagtacatacttccacgtaaaagacagcatatgcatcccgctaagggaaaaacgtactgcgtgttgattggagtgtcgttgatgattctaaaatttgaaaccaccgaaaaactgggcatgcacgctacaaataaaaaaaaacttatttttcagcacaaatcattttgaactacgctaatggattatccaatagagaagatggagtacatactcctgggagtatatatgataatctgttcaatgaaaaaagacattaattaaagttactttatttttgttataagttacttctataatatatgtaaattacttttaggctttactgaatttacttttgtatgtctaagaagtaacttagtgaaatctaaaagtaatttagacatatcataaaagtaatttgtgatttttcatcaaaatataatcatgtgagattttgatgtaaagatttaattgttacgaatataacggtgtaatcggatcgtagattgaatgaatagtttaagagaaaattgtatttgaagtatatgtagatggtgtctcttatagatagagtggtagctagtttagaccactagctgtgtagtcacgtccatttagtaagtttatttttaaaatatttaatttattactataattaaataaataatctattactctgtatttaatactccctccatataccggccgggagcccgggagtgctgagtgctgggtcggggcggacacgagagttgcttcaagatccgtgcatctacacgtggcgtaatctcgttagccccagaaggaaggcgaaagctaagacccctcccttccattcttcccaaaccctagccgccacttctctctccccgcctccgccctctcccaattcctcctccggcggcggcggcggcgttgggacgcgcgagcccatcaccatggcgggcgggaagatccagaagaagcggcacggcggaggagcaggcggcggcggcggcggcgggggcgggggcgcgcggctgcagggagggatcccgttcgagaagtccaaggggcagcacatcctgcggaacccggcgctggtggactccatcgtcgagaaggccggcctcaagcccaccgacaccgtcctcgagatcggccccggcacgggtaacctcaccaagcgcctcctccaggccggcgtcaaggccgtcgtcgccgtcgagctcgacccccgcatggttcttgagctcaaccgccgcttccagggcgaccctctcgcctcacgcctcaaggtaaaattctcatggtctcctctcttcattttattttttctctccagttttgtgtgattgatggaacgattggattatgttaactttgcaaggactagtgctacttcctgttaataataatacggatgcttaggcatcttgaatttgcttgtagtctggttcggtgacagcgattcaggggattcggtggtgggttgcactgtaatttagagtaaattacaacattgggctacctacttttaccaatgttgcaacttggaccagggtggaaacaatattttcacattggactgcttgtcctatgcaaatggtttcactttggaccatgtccatcgatctgttccggttgatctgcccctcttcgttctttcttctccatagagccaaaggcaccagtcaccggtgattccttctacatagagccgaaggcatgagcggtcagcaaggtccaatttactcctcgctagcaggctctctagatgcaaatccatgctagagtcgcagcatttctcataaccacagctgtcgtatatatgtcaccttgctcttattcccatccaattcgtaatgctggagtcatggatgagcaccgttgcttcgtaggatagtactcttcctgtataagaataatgcttttttgtttctacatccttccagtttccagatcctttctcagggtgagagcagtgctcaaactcgacctctggccggtcgacacaggggctgaccaagcttgaatacaaatgaggatcaggatagaactcaagcaacctagagagatttcatggtgttgaacagaagcatcttcatctcaacatggaagaaagggagaggagagatggagaaaaaaactagtccaattcgaaacttttgtttagttacctgtccaaattgaaaagattgagccctagtccaagctgcaacatgggtaaaagtacgtggcccaatgcacaattcactcgtttgtattattcagattgaaaaagattgaatttctgaggatgctggggaattcagagtggtgtaatgtttgtgcttagagtgtagatctattagtgaagtttcctctgctgagtttctttacgcattgtaccttacagtatttggttcttgtttttggtaacgggttagagttttaggatttggattgttaaaatgctgcatggtatttgcttcagtgtgagaggatgccttttcaatgatctgaattggtaagtgctggaagagtaggtgtgtcccatgtgttgtggggctgcctgtattttgcatgcttcattgatgttctgtttatatggatacttttcaagattctaggaaatataatgtgccaagactgagtatacagtcgtctcaaaaagcaggcccccatagacattgttagcagctccccctcatgtacaacttggggccaaagttcccatagcctaggaaattttgacagaaaaaatgtaggctcttgtggtgtgtatctggttgaattgattgcagtgggaatcttgaagatctctagattggcaaagaatttggttaagaataaactgaatgtgctggcagtagggttagttttgagggtgtaaaagggatttcttttcatattttttttgggtgttgttttttcgtgtggttgggggaaggggatcataaaaatgtcagtcattaggcggtgggatgggaaattcacaatcagcaccaccactactttcttttaaaggagtaaaggaataacatgaatagaaaacaaagaaaccttggtcaagcatctactgtagaactgtacaactagacgatggaattgtctatgctccaacactgcaaagtggcagtactgttgttgtgtttgtacaatacatttaaagaactaagcaagtgtttggttcttttactgtttatataatggtattgtttggacagaccaacaatggtagtgccctttttcaatctgtattctgtcatggcattgggccaacaggtcagcccaagggtaacccaggaccggtcgagagaacgctatcctcacctcgtacacagtaccatagctcagccggttatcagttctagtctgttggatagttgtataggattaaactgggtccttccctccgtctatataaggatgtactgtattgtcatttagattaagaaatgaagaagaattaatctaatccctcccaatgttcttctccacaaagtctaaatgccatccttagcagcggatgcctcccagccatcctcctggctacattccctgtgtagacataccatttcttgttaagaggaaaggtaatagaactaaacaaaatacctaagaataatcagcaaacattgatacatttactcctttaaaagagagtagtgctggtggtggttgtgaatctgccaactcacatgttctacagtgcatttttatgaatgtccgttctattcttcaatatagaaacggtccctttcatatgatcttctcttatttcactatagaataattccaatttcataccaaaaggttcaagatgaccatattgccatgtatatatgtaagtgtatgagctgattttgttagtagagtctgcaaacactatcaaatgctccttgtaactgtgaaaaaaatgaaagacaagtttgatggaaaagtaacaaccattttgttttggacaatatcaaaatatgcatgatcgcatgatatctgtagttaagacttaagtcatgaccatttagctagtaataatcatcaaagtagtgatcttacttttttaggatggtttagttttggatgttttaataaataattatccatagtaagatgataaagcttgaaccttggaaatcaaatgtgaggctaacatgcacaatgtttctgttgatgcatctcctgtcatggtccaaatccatgatgggtaaacactgccggaggatagttgggcggccatggcagcttgcgaccaagaaggcacttaggttgggggtgaagaacattgagggagggattaaattaattctgattcactgcctaacgaaaatagataaactcccatccttttatagattgtacgacttgatccctgagtaagactaaatgtaatctttgtccctgactctaactgatgctacagtaatacgagggcactgttcacccctttcccaccaggtatttagttgcccatgggcgttggcttcttagcctgatactgatgacatctttgacctgtcagaaactcagcctaatgaaaaatagatacactcgcatccttgtatagattgtatgacttaatccctgagtaagactaaatgtaaaatcttgtccctaactcttaactgatgctacagtactgcgaggtttacccctttcccgctgcccatggacgtgggtttcttagcccgatactggtgacatctttgacctgtcagaaactcagcacgttagcctttgtatcacataccactgtttaatgactgatgctattttccaataaaaaaaatcatgttatcatcaccacaaataaaaattttcaacagtgatatgcgtatacgcacttcatccaacatgaatggacaaagaacaatcacagaaggggtgggatggaatttgccgaatgccgtattacggtggggtcattttattttacatgatatatggagcacaatactctctcttccagtgcaatggagtttgcatgtgccttagtacattgcggtatttatcttccagtgtaagtagtttgtatcataaatgagggagtgttggtgtgatatgaagactggactttgttgacacttgaggctatggtggctatacattaatgacagtatttgattgcagcaatgactataatcagttaggcttaacagttttggaaggcaaatgtagcaagaaaacaacagtggggcatatccagtccatttaactgtatttgtcactacatttttgtttcccctattctttgcaatttcactaatacaaaaaataatttcctaacaagatgtcatttcctggtcaatcattctgtaggttatccaaggagatgtccttaaatgtgatcttccatactttgatatctgtgtggcaaacatcccatatcaaatttcatctcccctcacattcaagcttctgtcacaccgcccaatctttaggtgtgcggtgattatgtttcaacgtgaatttgccatgagacttgtagcacagcctggagatagtctctactgccgtctctctgtgaatgtgcagctcttgtcacgtgtgtcacatctcctgaaggttggacggaacaacttcaggcctccacccaaggttgattcatcggttgttcgtatcgagcccagaaagcccctacctcctgtcagcttcaaagagtgggatggacttgtgaggctttgtttcaaccggaagaacaagacattgggtgccatctttaagcagaagcgtgtccttgaattgttagagaagaactacaagacaatgcagtctctacagctcacctcagatgcagaaaaaggtgaggagaagatgtcaccagatgatgttgcattgctatcaagtatggtcgatgacatgaacatggaaagcagctacgagaatgatgatgatgatgagatggaaatggatgatgccgatatggtagtagagagccgtgcatgtttcaaagaaaagattatggggatattacagcaaggagattttgcagagaagagagcatcgaagctcagccaggttgacttcttgtacctcctgtcgctcttcaacaaagctggtatacatttttcctgaagaaacccgttatggtctagctagaaaagagtattttctttctttcttagtacgtcttgaaaggtgtgaaggcactgcgagaattttgttctaactatatatatttttatttctagtatggaaagtaatttaattcaatgttgcctacctctatctctgtaatgttttgtttagcttttcatggttgattttgaaatgttgtggatgttaaaactgaatgattgtttgctttggccacacattgcaaaccccaaatctgcaaactgtgtagtatgattttccacgattttatttctgttgatccacaaacaaagaaattgccattctttgcggttagtatttttaactactgttatcatttctactgcttgcttccaagttggatgtttggctctccttgagaaccttttgcattggatgcgtcccagctgcaagtagtccctcttaacttatttcttttgaagaaagacctctttaacttatttctctttgaacttagtcttttacccagcgggctcacatattagtgactcaaagttagaaataaataagttagaggaccctctcttccttgtagcagaggtttgttgcagacgaggttgaatggaacaggagaacaacggagacgaagagatgcaacgcacgcaccagctactagactcgcttccggtgctttactagacttgcttgtagcattgtacattttgtgtgtgttatttttatctaaaaaaaaatctcacttatatatacaagtttaagtaccattttgaacatgggaatctgaaactgtttggaatgaaggaattttcaagaaatttacctgcagaatttatatcatttgtcagttaaattcctacaaaatttggaggaaattattggttcgagctcgtgaaaaaaaaatgtgacctttgcaagaatcagctcaattcctatgagtacaagaaactgccccgttccaagatggaataggcatacagattactaccgcttgtactgtcatcaaccacctgctgactacattagggcatatgcaatggtgtctaataacgggctctcttcgttgttatgcaagtaaatttggtgacatttcgttgttatgcaagtaaatttagtgacgtggaagaaagagagggaaggaatgagaaacatcgttgctacgcatgacaacggctcagattcaactctcatttattaacggaaagtttgttgcatgagggtatagaaaaggaaagaagtataataaaaaaatatttagtgtattaatggtttaaaaatcttattttctctactattataggaggatagtctctattgacattaattaatatagagagcccatattagactctagctttgtacatgccattacaatctaaaaattaaatccgttgttatttcggggtggcgccgtggatgccctgtgtcatttccgttatgtcgtcccaagctgcacacacctgctcacatgggcgaatcagttttctttcatatataggaagcacaaaaattgtagggcatataaatccgaagcggatttgaagaggataaagcggtttccaaaacggcacagcgcatcggctggagtctgtatcggccgatatggagtcggattcggattcggttagccaatacagacaggttttgagttcatgtcgaggttggattaaggattcaaaatagagtccgaagaagacaattgtatttattaattaagataagagtcaatttttcctttttatattttagaaatctatgttagagtccacaataggccggtgtgtttattttgtaaaatttgagtcatatcctatatagacaagttttgtaccatgggcataaatatatgatgggatcttgtaagaaaaaccacaacaattcaataactctcagcgtatcgccacctatttcgttttcaactttttcgatgagttcttgcttcgagttggggcattggctttgatcttctggcgagaggtatggcttgtcatagaggtttgcatcggcgatttaatatgttgttttagacgtcttaatctaacgtttgcaattgctagttatcatatatcttagttaatctaatttgatgacgatttactcctatcggccaggccttttctagggttttgccggtattgactaaatcgttttgtcagtttagattagccaaggtatccaccaccttgaaaatcagtcaaaagttttattgtttagaatttatgtttctttccatactgagtgttgcattaattgagtttgatcttctaagtcgtgtttaaagttattaaaactaacctgcttcttgattgccaatagatagaattggggtttcaaccgatcttacctgatataactattttgctttgtttaatatctttaatcctgcttttcatgttatatccgccccttatataagtatatcaccttatttaaatatatcaatgttgtatttaatcttggccaaatcatcatattgggggatgggtgcttgtttggtatatttacttagatcaatattcttgcataaggttgtatcggagcaatagccgatatgttagctttcttaacctaaatattgtatcattggttatgatataaacacatgtaatctttaattcatctgatctaagttatgagcaatccatactgtcttgattaggttcgacctatactgtttgtttatattttagagaaagattgaattatggattacatgattgattgcatctacaaccgatgtaacatgttttaggcttgcttactttatttatcctatacacaaccaattcgaccagattgcatcggctaggtcattgcgaaatgttattggccctccaaccgatcggttatcatattctaacgtgattttattgtttattcttgttggttgcaggatcaaaccaactgtcacaccctgaacccaagagcaagatttggacctgcactggaactaagcagaactctcaggtcgccgtgttttctcatcaacaactttgagacgacgacaatagttagtaatggataaatcgctttgatagaagttgtagaactcgacattgaggttgagggtgccagtttcgcggttgctgatgaactgatgttcgaggctacgccatatgagtcgagccgtggttatgtgcatcatgacgaactccagcaagtcggtggagatcgtgccgtacaaccaagagaggacaacacaatccatgcgcattcagccagagcgatctgaccagtagatgtcggtgaggacatggtcggcgagggcgtacttgctgagggtgacgaggagaagcctgcgccacttggtgtagttcccagagttgatgtccaggttgatgggcacaacggccttgatgttcaggacacggctgttggcggctataccaattttacgtcaccaatatctgcagaaatctgaaaatataaaacatccaacatagtggtagggtttaattttaacaattttcacgagtgttggtgtatatttgtatgcaggtggcaaactaccaaagttgatatgaaatacacataaaagaggaggagaatttcacctattgagtctttgttgatgtgaaaaacacacactggcctggaagatctgcttaacttcagtgcaggtccaaaatcttgcttttagattcatgagcgtgccagttaatttgatcctgcaatcaacaagaaagaaagacaaaagaaaccgtggttaaattcataaacgatagccaatcggccagccgccgatgacatatcatttattctcgagccgatgtcatatgtgaattgatcggcagttattgatattaatgctatataatccttctgtcgacgtatatttaaaccaagtgattgggtgtaacgtcccgcctctcacaggccgagcccgcttatatctggcagctttcataggtcatagactgcctcacagaccaacacaagtcttttctgcacactttgtcctcactcatgaggactcgggaagaatcggtcacccatccctaaattgcttcaggccaagcacgcttaaccttggagttctttagagatcggcttccggaaaagaagttgcaacttgttgatatgagtattctattaatcctattaagccctagtccgagatgtcacattgggatagatcggtcgccatgccgagacaatataaatcacttagattgaatatacattaacataaagattataaacgcttatagcatagccgatcagatagatctagcatgtatcggccagtactccgataccactctatgttaatatattaaaacagatagaatatatcaaacagaagcctaatatactttattgcgataagatcttaatataaagggcagacttagcatatcaattaagcatataaaacataaagctaaattaggtaagatcggctgagaccccgatactatctctctcgatgatcataaaacaagccagatatcacaattataaatattacttaatagatcgaacctaaccgatgcagcattaagcataaagataagtatgagatctaggcaggatgatgaaaacctacaagagatggtagatacacgatgcaatctagattaataacaaaatataactctaccgattgcttcctaacaataagaaccagccgataacaagttatatatagtataactaacagaaattgcaacatgtatatcataacttgacgaattacgtaaacagggtgaaagtatcataaagatggaagcattaaccccgagaacgcaagccgccataacaagttttacctctagttgaagatcgaatctatgcagctcaacccgaaagcaagaactcgtcgaaataaacgaaagtaaaagggtggcgatgtgctgagattgtattgaacgattgttaattgattacatgggttcgggtcatatttatacctgagatacaaaatatgtccttgccggaaaacctcatgaaatatcctaacaaactctaagataccataagtctttgcggcagacttttgcccaaacatatctataaggaaattacatgaaatatcctaattaatagatacagttgccttatccgagagctttatctccatcgtggaaatcctcatgaagcactttgaacgattttggaaacagctttgaaaccatcttcatcggaatcggctgcatcacctccatcggctgtatcggctgtcttttgtccgatccatctcagctgatgcatactccagctgatgccttcgcaggcgatgcatactctgctctttgaatcgatatttttatcgaatctgcctcgatcccaatgtcgaacctggttcacatcttaccaaatttggtcgtcaacagtcttaggcccacaaactctttgaaataccagaaaatgggcccaaccatcatgccactgggctgaggatccattaaatgtggtccaaatggtaggactgggccagggaggcctgcctggggaggcctaccgggggtcgaccgaccccggcctagctccgctggcctaggcccaagccaatgatggttgtaactgacgttccaatggcggttatactggaattaatggcctcaaccgtcattctcaagctataaaaggacttctcatccttcattccaacacacaccaagttgagctaaattacaatatgctctattgtatcttttattgtatcttttaccctatacttagaatagggagagagtgaaggaggatatccatgatcgataaaatagtcacgcactactagaaaaagcatttttcccgacatggggtctttttttcgcaagcggacatgacccttggagttaaatgaccgcctacaaaaatataaatcggggtgaagttcgctcggaccacttaagcggcgattttcgtaggcggtccacctaagcggagcctgcgaaaatctattttcgcaggcgcaccttatgtggtccgcctgcaaaaatcgtacctacccaaaaaaataaaaaaactttaatacttatctactcctccaacccctccccacaactcatttccccacacttatcttctcaactctctctctctccctccactggcttctcagctccccctcccctcccctccctccctccaccggcgatagcggcggcgtcggcgcgcggactcggcggcggctcctcggcatcccgtcccagatccgactgcagggaggccgggggaggtcgacggcggtggcggngacgtggttcccggcctcccctcccagatccggctggagggaggccgggggagggcagcagcggcggcggtgacgtggacggctcccctccggcgacggctccccggctgtcacaccccgaagttttcctccctagccaaattttaattttataaatgaccctaagaaaatgttggtgaaatcaggagaaaaccctaagaaaataatgcaattaataatcggatttgacatgtggaatttttcttgagttctacatgtcgaaattcattaacaggatttttagtggaattttcagagctctagaaataattttaaccaattaaaatggagcaagtgcaattttaattccagggaaattcctttttctttttctttttctttttcccctctttttcctcctttttgcgaaatgggccgtcggcccatttcctttttctcccccccctcctccttgctgggccggccgcaggccgaggcccagcccaatagccggccgcccgcctccctcctctcggggtcgccgacaggtggggcccacctgtcggtcccgtctccctcctcccgccgatctcgctcgcgccgccgcgccgaaaccgccgccgcgccctcgtctccgcctctcccgggccacgtcggccacgtccgcgcgtgcgccgagtcgtccgcgcctttccccctctccctcccgttcgcgcccgcgcccgagatggccgggattcgaaaatcgaatcccgcctctctctcctccccactcccccacgtcggccggcgaatcccgccgctcccggccacgtccggctccctctccccctttttaagcatcgccgttctcctctctctctttttccccatttcgccgcactctcccgagctctccatcgcctccgcgccgtgcaaccacccgccgccgccgcttttgctactccggccgccgctagccgccgctaggctcgccgccgtcccgcgccgtcgccgccgttagcttcgcgcggccgagatccacctcgtccgcccctcctccgtcgaggttcgtcgccggagccctctccccacgcgcacgggtgagcgccgcctttgccgccgccttcggccatggattccggtcgccgtggtctatctccctctctctaatccctctctttttcgtccttagggcacgccggagctcgtccgctagccgccgccgttctcccgtggttcgccgtcgccgtccgccatcgtcttcccgcgcgccggccaccctcggtgaggcatctcctctcctctccctccccgtttccccgtgcgtcgccgccgcccgcgctcgccgtcgctttgggtcgttgccgccgtccgctgccgccgcctccgcgtcgcctccaccgccggatgccgtcgccggcgccgcgacgcgcgcgcgccgccgtcgctagccccgggtcggccggtcggttttgacgccgacccgagcccgagggctgccgccgccgccgtccgtccgatcggcccgagggcgatccgggccgtcggatcggccgccacgtggcgtcgccgcccctcctctctctcccccgtgtcgctgaccggtgggccccgcatgtcggcgccgcgccgccccgcgctgacgtcagccctggttgatattgcgcaataattcatttaaggatttcttttatagtaataaacacagtgaatcttctaaaattcataactaattcatccgagctccgtttaatcccattcaagtctcagtaaatcaagaaaaatgtgtagaatccattaaaaatggttttgttctctgtttcagtagtcttatagcctgtttgcaatgtttgctttgtatgtcgctagattccgatcccgccgacgctccggtgtacttcgagatagtcgccgaggtccctccagcagcagagcaaggcaagtcatgcttgtcacttgaacatgttgatcctatattgcaaatgctctattgtttcctttcaaatattgcattgttttataatattactatgggatggttacctattgttatagccatgcttttggatatcatgctcctttgttagcttgggttataacctgattagagttaggactagggtttgcttagccatgcttagttcaactagcacacattggggaatctcatttaaaacctagactataggtgataatgttggtttaataccaccgctccggtgttggttaaataaaatgaatcacatggtgggctgtgggtgcatggttttgctggtcgcacccatggcagttaaggaccggttcgcgggatgccctggaagaatttatcgtacttaccacaagccagcgtgggcaacggctgggcttgtagtgtagctttcctctagtcgacgcatccaggcaagggtgggcgtgatggagcggggcgggccctgcgacggcctctgtcgcttccggattcacctaggcacgagaggggactgcccgtcgcccgctggggacgggggtgaaacctgaggtgtggtgtgcttggctagagggggttatgcgaagggtcctgtcacggcctctttccggtatgtcgtggtggcatgtcggcgcacggaaacgtgtcgtggggctgtgtcttgtgggtacagttgtacacctctggtcagagtaaaactattcgaatagccgtgctcgcggttatgggcggtcaaccagattcaccgtgattagtctcaccttagtataatcctttaatttgtatagcataggtggatggttgggcctgttgcaacgtggtgtagcgttgaacagtggatgattaatactgctaaattattacaactgttttcgcattcaaattcttgtttataaatgccagtatttatgcaaatgaacctgtttagctatcccttgttgaatccatgcatcataccctccattccagtatgacttgctgagtacagtgggtagtactcagccttgctctacttttcccaacctccagagttcgagttcgggtcagatgaaggtttctctgaggagtaggcttcgtccgtgccgtcgaggatgcctgtggggtggtgttcccgctgcagcttagtcaaggcttagcttcagtttctttgttttccgctgcatttatgtaagactttatgatgtttgtaagacgtggatctgtatgtcaacattgtcgtttgtgtacccggctggtcctggacggggattttaatgcacattctgcttgggattccattcgggaatttctgggcgtgacaagttggtatcagagccgactttgaccgtaggacaagccaaatggaaaaacctaagagccctctgaatccttttcattgcatatgctctttgcaattggatttgttccgggaaaattgggatctgttcttgtggttcaagggaaaaatcttggtcgctcgtttaagtgagatttttcaaaacgagtcagtctagggttttagtaaaattattgggatttattcgtcagtcagttgaggtttgaggggtgaaatgcattaggtcctagctcaggaacttgggttgccaggtatttatgctttgttcgttattattattatgtatctaatttctcattatttcatcgtcatgtgagtctgtcttatttattcgctctcatgtaaaatgatctatgcataaaattttgctcttatttgatttcccttatttgagtcttttattgctttatttaaatttggatttgagcatgcattgatcctactcctttgtcttctctagatggccggtcacccacccaaccaccgcggagaaggcatgatcgatttcgtggcagagttggcacgcatgacattggtggtgggctaccccgacgcgccggagtacacgaccatcccaccgctcagtggcgagcttcctcaccgtgtccgcttggaggtccatggttacgtggggacttgcctcgctaacatggcggtcgaggcgtcaggaggcacagcagatcatgcctgtcaggaggcagcctacctgatgatggccagactacgggagcgccacaactacatcttccacgacacggcgtaccgctaccaccccagtcgagcccacggtgatggcgtcagctccttccgtccgacagctggcgagaacgacaccaccttcggtcacatgtgcgcggtgatgaggggtctggacaggatgcactcggatctgcacaaggcgactaaggccttgaatgatgggaagctcatgaggatcgtcgctttgaaggacgagatagcgcgtctgaagaaggagaacgctcagcttaagggtctcccagcgccaggaggagtccggatccgcactacgccccgcaagactacgaaggcacccgtgcgcatccagctcgcgcccaggaacccacctccagcagcagctcccgcagcacctccagttccgcccgcagctcctgcagctccagttcctgcagctccagctccagctcccgcgttcgttctctccttcgccccagcgtcagccgtcagaggtccagccagtggcatcgggggttggttgcctgctacccccagtggcagccgcgatcgcagctccagtggctcgcagacgggcagcagcgagacgtacctgccaggctccaggagtcgttcagagggacctggtgatgaacaggaggacgctttcgactccaccgaccgcaggagccgttccgagcattaggctcgtttccccttagttcagcgactgtctagtttctgcttgttagtttgtgtgtttaggttgcttgtttggggtcagtcgacggtcgatgtcatgtgcctatgatatgactgtcttaataaggatatttgcttgctcttttaagtgtttttaattcagatcagaacaattacagttttaattcctttgtaataaagtttagttcctgagtatctgtttttcttcttttccccgtctgctcttccctccagatggtcaacaccaggactggcaaccgcacgacaggcgagggcagcaacggtgaagaacgcgttgatggtatgcaccccaacggcgatcccggcaacggtccgccaccacttcccgagaatccgacacttgcccaagttatggcgcatcagactcagatgatggcagccatgatgcagcagatgcagcaacagcaccagcagatgcaccagaggatgatgcagtacgctgaacagcagcaccagcagtttggtccccctccccctcagtccaagttgcctgagttcctacgagtcaggccacccaccttctctagcaccaccaaccctatggaggcaaacgactggctccatgcaatagagaagaagctgaatctcctgcagtgcaatgatcaggagaaggtcgctttcgccacacaccagcttcagggtcctgcgtcagcttggtgggacaaccacatggccacccgcccaccgggtacggaagtcacctgggcagagttctgccgtagcttcaggaaggcacaggtgccagatggggtcgtggcacaaaagaagagggaatttcgcgcactccatcagggcaacaggacggtgacagagtacctccacgagttcaatcgcctcgcgcgatatgcaccagaggatgtccgcaccgacgccgagaagcaggagaagttcatggcgggcctggatgacgaactgaccaaccaactgatatctggggactacgccgactttgagaggctagtcgacaaggcaattcgtcaagaggaccaacgcaacaagatggacaggaagaggaaggccgctcagttcagggcacatcagggaagtcaccagaggccgcgtttcactcccggacagcagggtggacctaccaccatgatcgtccgtcagcaccgcccgttcaaccctagcaacttccaccagggcaccagtggcagtcagaaccaccatggaggtcagcccaaccgcggtgcagctccacgcccaccaatggccccggcacagtcaggccagcccacgcaagccaagaaggagactggagcaaaaccagggtcctgcttcaactgtggcgagcttggtcacttcgcggacaaatgcccgaagcccaggcgtgccgggccaaggtttatccaggctcgtgtcaaccacgcatctgcggaggaggcacaagcagcaccagaggtcgtactgggtacgtttcctgttaactcaatccctgcaacagtactttttgattctggtgcaacgcattcgttcatctcaaagaaatttgtcgggatgcatgggttaataagagaagaacttagcacaccgatgcgggttcataccccagggaatagctccacttcggttcaattcagcccttctataacaatagaaatccaaagatcaccatttctagccaacctcatccttctcgactccaaaggcctagatgtcatcctcgggatggattggctgactaagtttaagggagtcatcgattgtgcgaatcgcacagtcaccttaaccaacgagaagggagaaaccgtggtgtacaaatccctagtctcgccaaggaaaggggtctcgttgaatcagattgagacagaaatcccagtggacaccgtagagaagaactcgagaaaattggatgatatacccatagtctgcgagtatccggaagtgttccccgaagacctcactaccatgccacccaagagagagattgaattccggattgacttggcaccgggaaccgctccaatctataagagaccgtacagaatggcggccaacgaattagcggaggtcaagaagcaagttgatgaacagctgcagaaagggtacatacgaccaagcacttcgccttggggcgctccggtcatttttgtggagaaaaaagataagacgaagaggatgtgcgtcgattatcgcgcacttaacgaggtcacaatcaagaataaatatcctttgccgcggatcgacgatttatttgatcaactgaaaggggctaaagtgttttctaagatagacctgcgctcaggctaccaccagttgagaatccgggaagaggatatcccgaagacggccttcaccacgcggtacgggctatatgagtgcacggttatgtccttcggacttaccaacgcacccgcattcttcatgaatctgatgaacaaagtgttcatggaatttctggacaagtttgttgtggtgttcatcgacgacattttgatctattcaaagtccgaggaagaacatgaacaacatctccgtctggtactcgagaagttgaaggagcaccaactatacgccaagttcagcaagtgtgacttctggttgacggaagttaaatttctgggtcatgtcattacagcccagggtgtggcagtcgacccatcgaacgtggagtcagttaccaagtggaccccaccgaagaccgtgtcgcagattcgaagttttctaggattggccggttattaccgccgattcatcgaaaacttctccagaatcgcccgacccatgactcagttgcttaagaaagatgagaagtttaaatggacagctgagtgcgataagagttttgaggagctcaagaagaaattagtatccgcaccggttttgattctgcccgaccagatgaaagacttccaagtctattgcgatgcatcccgtcacggacttggatgtgtcctaatgcaagagggcagagtggttgcatatgcctcgcggcagttgcgtccacacgaaggaaattatccaactcatgacttggaattggcagcagtggttcatgctttgaagatctggaggcactatctgattggcaaccgctgcgaagtatatacggaccataagagtctgaaatacatcttcacccaaccggacctaaaccttcgacaacgaagatggttggagctaatcaaagactatgacatgagtattcactaccacccgggtaaagccaatgtggtggcagacgctttaagccggaaaagttactgcactgccctatgcaccgagggcatgtgtgaggaattgcggcaggagtttgaacatctcaacataggaattgttgaacacgggttcgtagccgctctggaggcacggccgacgctcgtggatcaagttagagccgctcaagtaaatgacccggaaatagcagagctgaaaaagaacatgagagtcggaaaggctcgggatttccttgaggatgagcatggcacaatctggatgggagaaagattgtgtgtacctgacgacaaggaattgaaggatctgatactcaccgaggctcatcagacccagtactccattcaccccggcagcaccaaaatgtatcaagatctcaaagaaaagttttggtgggtcagcatgaggagagaaatagctgagttcgtcgcactctgcgatgtttgccaacgagtgaaggcagagcaccaaagaccagcaggtctactccaacctcttcaaatcccggaatggaaatgggaagagattggaatggattttataacgggactgccccggacatcatcgggacatgattcaatctgggtagtcgtggatcgactcaccaaggtggctcacttcataccagtacataccacctatacgggaaagagattggcagagttgtacctcgcaaggatcatgtgtttgcatggggtacccaggaagatagtatctgaccgagggagtcagttcacctcaaaattctggcagaagttgcaggaagaattggggacccgtttaaatttcagcacggcctatcatccgcaaactgacggtcaaaccgagcgagtaaatcaaatcttggaagatatgttgagagcatgcgctcttgattttggtggagcttgggacaaaagcttgccatatgcggaattctcgtacaacaacagctaccaggccagtctacagatggcaccgtttgaagctttatacggccggaagtgccgcacacctctcttctgggatcagacaggcgagcgtcaactgttcggaacagaagtattagcagaagcagaagagaaagtcagaatcatcagggaaaggttgaggattgcccagtctcgacagaagagctacgcggataaccgtcgaagggagctcacctttgaggcaggagattacgtgtatcttcgtgtcactccgctccggggagtacaccgttttcagacgaaaggcaagttggcaccacgcttcgtgggaccatacaaaattttggaacgaaggggagaagttgcctaccagctagaacttccgtccaacatgatcggcatccatgacgtgttccacgtatcccaattaaagaagtgcttaagggtacctgaggaacaggctgattcggaacacatcgatatccaggaggacctgacctatgtggagaagccggttcgcatacttgataccagcgaaaggaggaccagaaacaaggtcaccaggttttgccgagttcaatggagtcatcatccgaagaggaagcaacctgggaaagggaagatgagttgaaagccgcccagtcgcacctcttcaccagcttcttcgaatctcgggcccaagattccgtttaaaggggggtaggtttgtcacaccccgaagttttcctccctagccaaattttaattttataaatgaccctaaaaaaatgttggtgaaatcaggagaaaaccctaagaaaataatgcaattaataatcggatttgacatgtggaatttttcttgagttctacatgtcgaaattcattaacaggatttttagtggaattttcagagctctagaaataattttaaccaattaaaatggagcaagtgcaattttaattccagggaaattcctttttctttttctttttctttttcccctctttttcctcctttttgcgaaatgggccgtcggcccatttcctttttctcccccccctcctccttgctgggccggccgcaggccgaggcccagcccaatagccggccgcccgcctccctcctctcggggtcgccgacaggtggggcccacctgtcggcccgttttcctccctcccgccgatcttcgctcgcgccgccgcgccgaaaccgccgccgcgccctcgtctccgcctctcccgggccacgtcggccacgtccgcgcgtgcgcc

SEQ ID NO: 4812 - DNA, 7773 bp, Oryza sativa
  unsure (1)..(7773): unsure at all n locations
acgtaaacccaacccgcatctttgaagactgggccggcaaatctagcagattgacgaagtcgtggcgcccatcttcgaagactaggttgacaaatcctggagattgacgaatttgtggcgcctcgctgtcgacggggtacatcgcctaccactgaaagcacaaagccgttaaattctggaaaattcgctctcatagggagttgaacttaggacctaagatactacttagactcttgtaaccactaggctactggccttttcgcgctgtagattccagttctgattatgcattgttcagagatcaagtgcagataacccaatcactacctttctgaatgaaatctaatccaaatagtgaaagctaaatctgttatgtctgaacagttctgaaaagctggaccagtcgaagagcttcattgatagccatagatacagctctgatctgagagcatttagccagcttaagcttgatcatttgcttctccgggaccaaattgattgacaggctgaattagtcccggtcccaagcatggcagatgcatttgtccgtggcatctgaatctcctggagccgacatggaggttgcctttgtagcagagatcatctcagtcaccagctagatgatttgtcgtggattattattggcttcacgtttcaaaataatatgatttctcaaaaagttttttttttctgttgtattgtttatttctttagatcactgggtcactggataagatatttaattttgtttggtaagataagatatttagctgtttaccactcctgcatgtggcaattaactatttgtcacttggatctacatatcttatacgtataaaggtccacgcgtcattgagatataagtgataaataattaaactccagtggcaaacagttaaatgcccaagataagatgctactactatgcaattggtttttcaagacaacatggagctaggattaattcggcatgatgcttactagttctatgcaattggtttttcaagacaacatggagctaggattaattcaggagcacccgcgatagtttggtagcttgttgatgagtaggaaacggagtcccaagtcatttgggctgaaaacctgagcaataaaaatgttgatcatgcattacccatccccttttacatgttcatctatttatggtgctttaccaaacatgctgccaggctaagctctttttatttatgttttctttgcccttgtttcaaagtactaagcaacaggtcaaatgaagcaactaaataggtgtaattttcataaagttccactatttccttaaatctccttcatcaggaaggagccagtattattattggacgtccacagtttnttgggnggttnttggggggnaaaggtggttaacccaacccggggaaaaaattttaagcataaaacccttgccagtgatctcattatttcaaaacctagcttgttgtttatggggaaaaactatggaaaaacagtgcctggttatacttatattctgcagagggtaactcagttaatttctatttggtcactcctgtccacttcaattaggtaatttagtggaaattccttgtatacctctgaaatcgacatctttgcagagtttagaatgcatcgcaaactgttcctgtaatttgaattcatgctactgtattccatttatacattcagtaagatctgatgtaagttgcggctcttctcatttgccccttttggctactgttccttgttttctggtaactaatcttggttaaatattatctacatttccataggcgtttggctgggcatatgtgaacaatcgccacaacacatgggagcaattctacgtctactggatatgcccttttgttggtgctgttcttgctgcctgggtcttcagggccgtgttcccaccaccggcccctaaacctaaggccaagaaagcatgatgaaatcaagcacaaacttcaactcaggagttggtacaatgttggatttgaagagcccaacactattagtagtatgacataaatccacgatgattacacatacatactggttaccattcagtttaactgctaggcttagtcattaaaataaggtctggtagtgacaaaataagctctgatggttaacctaaacacatttgaccttacatctcacagtcacaggatgtaagctaaaaaaagcgatatgttatgtgcatgataaatagcagaaatatactacatatcattcagtagtactccatctgcttgcgcttccccttggcgcttgctcctaccttgcctgcttcttcagctctctaccaaaacaaaaataaagatgactgtcaaaacagtatggtttaaatctgatcccgttgttgtatatgccccaaattaagcttgaacaataaactttgaacatttaaaaagagggaaagtgtgcactcagcagtacttcaaggcatgtagctaatgaggttagtggccatggcatcaatgtagttaaaggtaaatgtacaaaggttgctactgttgccagcatcagttaagattcacgttgcacttcagcatgctgcatcttttagaatcaacttaggcttgtaccaataatgtattcggtaattgttttcaagaactccctatattcattcattaggcaatataattcactcaggtttatattggagaaaaagactctcaaactaatacccaagcttaggctctgcataaatttgtgcctcttcgaataaacttagctcataccaattcttaatttgaaaattactactatcaaagttcaacatgagccaggtaattttcagtggttaagacaagagaaggaagtttgtattggataagtgaaaccaactatgaaaaaattctacactaaagagaacacaacatcaaccatgtgtcaacaaatcattcggaaattgatttcaaaacctctacaatcattaattaagtaattaattagacaattcactcaggtttgtattgaagaagtgaaacttagcaagcattccgcaaactggatatcttaagcttgtcccatataggaatagtacattgaaagcatcatagcgtatggctataaagtaagaaaaaatcgattaaaataagtattgtggcaaaacagtaagccataaatgcaaatgtgagaattaataagggtattgtactttttgtcgacataacaacaaaatgctacggaagttgctgatttttttaaaatttcagtttaaatttgagcctctgcatagtgcacactctactaaatcattgaatagacttaggctgataccgattcttaatttgaaaattactactagcaaagttcaacatgagccttgtactgctcattggttcctgatgagaagaccggaagagggaagctggcacacatatgacacactaaactgtgttcaatacctcaacataaatggctggccaaattaagatgtcaatattttttaattagttgtgcaagtgaaactaacttgatgtgacaaatataagcgtccacatatcacttacgtctaaaacaaacaagtatagaacagtaaaacagttaggatatgaagctagaagtacactgggtggcgctgagggtaagtagcatgcagtagcaagtaaactaagtacctggtggtcctgtaggtatgcagtgaagtcagtggcaatgagattgggtataagccactgcaattcaccatgttgagatatctttgtggaggacaggaccttgtttcgccgaatgtcgaagcggatcatataattggcaatgggcaccaggtcatcatcgacaacgacgatcccaaattcatcaacttgtgcaggtacctgctcgatgacattcagaatggtatacattaccccatcttgggtcaggctgaggacaggggaaactggtacaacacatggcaaccccatttgcttgaagctctcacttgcccacatctcttccacagataaggacctgctatcctccttccactccttgaaatcaggggacagaacccatgtcttgagcatcacctcattgggggggcaatgaatatcttccaagccaaccaaggcgacaaacttgacggcgccagagacgcaggccatggaacgccgggctagtggcatcatctgatggcggagcctgtgatggacatcgatgcaatacccagtgggcaacggaatgaaccccaacttggggccatccggtgccaagatgcggtcgcagaacaagatgccctgtaggagatcaacccagcagatgcggccgctgtccagggagaaggcgaggtcgatctggaacaagtgttttggaccacatagatgtgcagggagagggaggcggggaatggaggacttgacccactcgccgccgctcttcttcatggtcagcgatgaccatgcgaagatggtggcttcggggaggcccaggccggagttggtgacgatatcggcgaggatgtaatcatcggcagagcgggaggcgtcgacgaggacggcggtgcggccgaggtgtagcaaggtggggaagcgaggcgagtcgggcagcggggggatggcggtgagggcgttggtgggggcgtcgtagaggaggtagcatcccccgaggtcatcggagcagcctggtcggtagaagccggcgtagatgacgacgatgcccttgtgggtgctggcgatgtcgccgtcgcggatggatcccagctgctgcgcgtgcgcgggcgtcggcgacatcatccgcagggagctcacttgcggaggatcggcgaggaagggatggggttccatcgcctccatcgcctctcgccgactcagcagccgcgctctgctccatccgatgactatgcctgcggcatctttccatgtgccgtcgggtaactcgcgtcctccgaaaaacactactctctccagcaacacatagggaggcctagggtttgccatggttgctgctgctagctagggtttggtccaacaagaagaagattgccaccagcggcaatggactggtgggagaacggggaaaaccctctctcggtctcggccaagagacacagacggacggacggagatctgactgagtcggagacgcggatcgcgccgttgctggggctggacggttagatgtgctactcctctgctcccaacaaaagacacgcaaaaaggtcttccttcgtggaccaggtgcagcgtgaaccgacctcctccttatttttcttctctagttcaacaatttatttatttattattattattattactcattaactaaaaatgcatgttcaggtaaaggctattttaatcaattattgttagatttttttaatctaaaaagtatatgggatttttattttgatactattgatatataattttggactcttattgggatgatggccatatttagaaaaacctatggcttgccatctctgggattgaggataaatactcgccattccatgctccactagatcaatatggcgtggagttcaccggtgcaagcaaggcctgattaacactagtagggtctaactcttcacgatacataccgatagctgggtctactaagtttttcttaaaaataatacgatggtttaggccagtgatcttgttccatccaagctttgccccagggaaaaatgtatctgtggggtagttaaagctcttccaaaaaaacttctaaagagcttgaggggtttgttaggatgagatttccactatttaagagcataacaatggtgttgtttgtggtgatgttagcttgggtagtccaaaggacggcactggttgagcggtttaagatggcaagatttccattacggaagattgttagctccaatgatgcgggatcatcaatcggcttatccctatttgcaacccatgcagaagttttttggcaacctgattgaaccatattccttaggctgtgtttagttcagcgcgaagtttggattttggttgaaattgaagatgatgtgactgaaaagttgtgtgtgtatgacaggttgatatgatgaaaaaggactaaagtttggatccaaactttggatccaaactttggaactaaacacagctttagtaccacttgttagtttttccagacgcttttgtacctgtgttgaagaagccgagtgcgtaccttgcattttttgagacaagcttgtcatcgttggccaacgtttggccagctgagatggtgtccgtcgtggcagaacgtatccaaagattcgatctgatttgaacttgctgcgatgctacgaaaatgaggagagccatggtgaaactgtaggataggtggtcactgctcttcacttcttcttgcatttttatagaaggtaaatgaggcccatagggaataacaagttaacaacgaataggccttgtttagttggctaaaagaaaatttttggatgtcacatcggacgtttaaccggatatcggaaagagttttcgggcacgaataaaaataactaattttataactcatcaggaaaccgcgagatgaatcttttgagcctaattaatctatcattaacacatgtgggttactatagcactttttggctaatcatgaactaattagtctcaaaagattcgtctcgcgattttcctcctaactgtgcaattagtttttatttttatctatatttaatgctccatgcacgtatccaacgatttgatctgattttttggaaaacattttagggaacgggccttactaatgttggagggcaaaatggtacagtgatgtccatcagtgtcagtcactgatcaggcagccaatccacacgatgccccaccaatcaatacgcctgcaccattttatgaccaggaataaatgggacctgaccagggttcaacttaccgttcataaccgcaccgcacggttaccgcggttaccgatcttaccgcgaggtacaaccgcacggttactgtggttaccggccttaccgcgaggtacagtaatagaaaaaccgcggtaacctccttaaattcatataaatttaaaaaataattcaaatttttgataaattttacacggtttcatacggttttcacgattaccgcgcagtaaccgtgcttatcgccggggcgcggtaaccccgtcctctgcggtttgggaaacgctggacctgaccgcatgccgtggaaactgaaaacagacttctaccattctacctactctcaacacgcaaaacgagaagttttatccctttaataccctttacctatctatcactcttactatttttttcaataattaagggtttttttagtcattcttactctctactaattccacctcaggatgctaggaatgaatttttttttggacggagggagtagtaaggggtgtgtttggttgggaggttttgggtgaacgggagatggcggcccattttttttttgcctgtttggttggtgggcggaagtgggattgggcggcccaaagaggaatatacctcgcagatgccggatgcaaccgcccgagcggccgggcgagcagggcgagcgcccgaggtcgggtcgcttcaccgcgcatcagcgacagccacaggtcaagaggcgagagcgcggcgacggaaggcgaggtcggcggcggcggctgcagcggcggaaggcggggatgagcgaggtcggcggcggcgcgagatgcgggcggaggcggcggaaggcgaggttgcagcggcggcggggagggccgaggtcggcggcggttgcggcggcggaaggcgaggtcggcggcggctgccgcggggaggggcgaggtcaacggcggcgcgagatgcgg

SEQ ID NO: 4813 - DNA, 16917 bp, Oryza sativa
cctggagatactcgttggagctctcactataagacactgaagagtttggttcaattgttccctacaactgttaaagttctagagtatgtggaagagaatgacagggatgacaaaaatagtaggcaagcagctggcctccttgtttattttcagttatttcagtttgtgttttatttgcagcttatgttgaatatcttggcaatcacaaacaccttttccgtaactttacaaagaaaggatcaagacattgtcaatgctgttaattgtgtaaaatcaactagaaatcacttggatgagtttaggaggagtggttgggaatctattttagctgaggtgcataacttttgtgagaagtatgacatttcagaattggagatggaggatgcatacataaatccaaagaggccacgccaaaaaactgggattacaaacaagcatcattttgaagttgattgttttaacgaaattgttgattggttgcttcaagaattggacaatcgctttaatgagaaaacatctcagttactcatatgtgcagctgccttaagtcctaggcaatcatttcatgatttcaatttagagcatttgatgagtttagcaaaactttatccaaaggattttgatgatggggaactaatggatcttagacatcatctttctctttatatcgctgatgtgcgtggagatgatagattcgctaacattgaaactatatgtcagctttcccaaaaaatggtggacacaagaaaacatatttgctatccattggtttaccggcttttaaagctagcattggttttgcctgttgccactgctacagttgaaagatgtttttcagccatgaaaattgtgaagacgtatttgcgcaatcgcattagtgatgaacacttgagtgattgtgttatttgctatgttgagaaacaagaattgatgaaagttaccaacagtgcagtaattcaccgatttgagaccttaaaggcacgtttacatgatgtttttactaagtgatctcttctcttttctaggcaaaacaatatgtggttttggaggtttttatccttttttgctcgttttgtgatggtggatcaatatttcagtaagcacttcattcctatgactttataactctgtgtggcacttaattatattactctatgtgtcatattggttattaatattgtgtgttgtctagagctatgatatgcataggaccccgggtcatttttgttctgggttcaccactgatcctcgcctttggccatgtagcgatgcctgccttgggacgaaggcgaggcatatcatcacctactcgacatgatttttgatgagcaggaagtaatcgagctatacagctatacacatcctcttgcttgcttgccttctcctatgctgctacattggtgtgtttgttgtactgctgctcgactctgccgaggctgacccgtggagcattgtgggggttggccggattgccgggctgggttcgtggattgcatcctcggagaccgccgccatcacgcatgcggatacgccgaggtcgaggtcgatggcgatggggactgccgcgtcagccatcgccgccgccgccgctccggctcccgcttgccgtcgccgcccttgcctgcagattacgctacgagagagaaggtgaagagaaaggggggagataaagagagagaacggggagagagggagggggaaggagagagaatgacatgtaggcccacatgtcagtggggcccacaatactttttatgtgtgaatcacatgtgggtccatagttttttttaattctaatgccacgtaagcgccacgtgggacgaaaattaggtcaacattgccacgtcaacgtcacatcagcaaaaccaccctccaaaaccaaattgcactggtttcaatagtttagggagtcattctatccggttttgcggttgagggtcacatattagattcgggttacttttaagggagtcaaagtggacttattccttaaccgaaggcacaatttcgcatgggccgggattgtttcctcgccaggatgatccacggggattgggccccgatcccggccattcccggcccaaccgaacaaggtctaatgagtattgggctacaaacgttcttatttgttcatatctttcacggtacggaaggacgaagtactagcggatagttttaatcaaccaagtatacatggtgacacgctttttaaatggctaaatggtgtgcttcgtgtgaaaacttattatatgaaagttgttctaaaatatcagattaatccatttttcaagtttgtaataattaaaactcaattaaccatacgttattaacacctcattttacgtgaaacacttaatcttcatcttcagtacattcaaacaccaccatagtatcagcagaataaagatatgatcagtttacaacagtggaaaaccaaatcctagataaaactcttcctcacccttttgtctacggatcaggagcaaaggaggaggaaccaatgaggaaccgagagccaacctggcgatgatcaccgattcaccgctctcaccagtccacgttcgtcttgataacggccgcagagatctttggaaaaccatggataggagcgccatcctttgcttcgcggctacggctagctgccctaggtgaaacacgaaaaaacaccatggatgggagcgccatcctttgctcactcatatctatttatgagtgagttgagtattgaatacgagaactcggacttgaaatcatacacccattgccattgcactatactaatcgagcactttctattagctttattgtgttaataaaaaatatctaacctttgattaaaagttgtgtggtcttttgaagcctaaccgatcttgcgtacatttgggctatcttttttcgaacgcgcaaaagaattgcacgtcaatatattagaagaagagagcagagtttgattacacaacgcacacagtcaaaaggccgttgacaggggtcaaggaaaaaaaagaaaaaaaaacaaatataaggaagataagctactaagaaagaaacaaaaactcctatcacaaggaagggtggggtagggggtcccactacactccggcctgcaccggaggcagggagctggagaagagcgaagacagggccatggcgtgatccgagggaggggctgcacgcatgaggtcgagtcattcggggccgcaatcctcttgctacgcttcggcactacccccacggtggcaacaacaggcgccggaggcaggggtagcggggccagacttggaggcatagacctggagcatttggcaaggaaggtgcgcaacgtggcattctcgacgaccgaaaacgggagctgcgccatcggccgaccatcatgatctagggcgaccatcggaacgtcgaacagaaccgtatcccccgtgaccaagggaatagtcggtggcaagggcaaggttgacggtggccgagagtagccgaccagtgggacctggcttgagagaggaggtgaccccgccacggccagcgccccgtggcggctacccgtcttgacggtgccttcaggcagggatggggtggggagagccgagcagccggtgctgtccctactactggcacaatcaaatcgtcggcgtccaatggggagggtgaaactgcgaccgcctccaccaacctcgatgatgggagcagggttttaaatttcaaaatcagcagttctgccgcagctgagcgatagaaccaaaatttcggaaaaaattttgtatgattttttttgaatttttgacggattttgaataaatttgaataaaaattgaccaaattcacaaaaaattgcaaaaaaccaaaattttcgggcgagatgttagcatttcggtgggggtggggggggcgaaatttccgaagaacagaaatttcaaacactggatgggagagatcgcggcggcatgggcgatgacacgcatcctggcgaggacagggccggcaaaggcgagggcgcacagattgcagcagtcggcggagacaggggcgcacataccgcagcggctaccactggcctcgacaaggagagggctagtggcatcggctacggaggagagcgaggcggcggcggcggcaagaccacgtcaagcgccaccaccgacctcggtgatgggagagatcgtggcggcggcggcgacgtgcaaggcgcacagatagaccaaggcgaggagaggcccggccacgccagcggcggcagcaacatgcacggcgcatagaccgcagcggccaccaccaccggcctagacgaggctggaggcgttggagagcacaacggtagtggtgatgcgcggggtagcacaggaggtggcccactgcggagcttggccggcggcgaagtctcgggtggcaacaaggggcctaatgacggccgaggtggcaaagacaacggcggtgcgccgctggtggcgtcactatcttgccggtggagcagacggccgcggcgatcgataagcttgtctgtgagccagtagtggtggccgacgagccagcggcggcgacgaacgagccggtggtgaaagggacagtggcggccaacgagcccacggtgagggaaggcatcgtgtcaccaacgcggcttgtcggaccggagagaggagacgacctagagaggggggcagcccatgggagagaggggacggccacgggggagaggccctcgaaccgaagcatccagaaggaaggggtagatggggaaaattaatatgtgttcgtttggctggggcacgggttgggttctgcactgtgggctgtgttacctcatcagtaacttgatccagttaaaccacacaaccaggggtgcttgcactatgggatgggtgtctttgggccaagtttttggactaggggtacgggctccatggcttacactgtgagtgccctcaaccgcttcctgctgatcatgcaccatctatcgctgcgtggcatctatctacccgcacgacacgacgcataaaagcatagctccacgtaaccatagtaaaaaaccggactgaatgggcggttgaaccggaaaaaaccagaaccggccaccttgacggttcggttcaactaaaagaccgcccctgcaatcgatccggtaaaaaaccggccggtttttgcttgaaccggtgaaccggtggcgggttttaagtatcgaacccgtttttatttttcctattgcagtatgacgtgatgaatatattatgttaccacaccatatttattttttttatgttgtgaccatgtaataaaagatatactggtttatttatgcatattttcaccaatttgtgatggttctatattaaaaataatacaaatcaaatatctctactacttaaaaaatgatgtttcctccgtccgtcaaaacaaaaaaagtagcgaaaaaaagtccgactcctaccgattccctattagaaatggaaaaaaaagtccgactctagatccgattcacccttaaaaacgaaaaataaaattgatgtgccggattgaagatctgtttgcaaaaacggaacctaccggttgagagcattccatttttatatgattttaatttttggatctatacttttgcatttgagtccctgtaatttttatatttacatttaagtccctataatcttgcaataagatacttgaggtcgtttttggttaaaaataataaaagggaaagaacaaaggcagaaagctgcataaaaagaaaaagaaaaaccgaacaaaaaagaaaataaagaaaaagaaaaaaaaacaacaacaacaaaactccgtttctcctaagtggcgaaaaaaccgtagatctgatcctataaaaaacaaaagaaaagtgaaaaaaatgctagatctgattcatttagaaacagaaaaaagtctaattcctataaaggcgaaaaaaattcaaaaaaacatctaaaaagttcgaccggttctctaggaagaaaaaaatggtttgcataaaataaaaatacgcgtgaggaaaaaatggaaggggtgaaacaacttccgatttctaaccaatatatatctcttcgctatgtataatctaatctaactatttaaaaggataaaatgcacgacaaaataaaaacggttcaaagaaacgtgtgagaaaaatcagaaaaaagcgcaaaaaaatcacgctaaaaaggttttccatcttccataaaaaataaaaaaacacgcgagaaaaaatatttccatcatcggtaaattttttttagaaaaacatgtgaggaaaaactatcagaaaaaacgcgtcatttctaaaaaatggtttgaaaaaatcgtgtaaaaacatcatctattaaaaaaaacaaatcggtccgaaaaaactgtcagaaaaaacgctaaattgatggacacttgagccagatatgatccatcgattttttatcatctactacacggcttttatttcgttatatattctcctgtattggaaaaagcaaaaaagaacattcgaaaaaacaagcaaaaaacgcgcgagaaaataattgtcagaaaaaacatgcaaaaaacacacgagaaaagaaaagaaaaaaaaagagaaaaatatggttttcatcgtcagtaaaaaaagcaaatgaatatgctaggaaaaaagtgttagaaagaaatgcgccatgtttgaaaaatggtttgagaaaatcgcgcaagagaaaaaaacattgtttataaaaaaacatgttgcttattaaaatacaaacattgtcattgacatgattatgcatgtaaaacgtatattatcattagaatttttttcacccgttgcaatgcacagacatttttgctagtaatattaataaataaaaaaccggcggttcgactggtgacccggcggtcagagcgggtcgaccccggtccggtttttttaccatgcacgtaacacgccaccgcacctccttcatggtcatgggctccaccaacaccgggttgggttgacgacccggcgcctttggcatgcagccgccctggttgggttgacgtacaggagcacgaacgagatttgcgtggagggtggcttcaggctgcagattgacacgagtgtaacccccggatcggacagcaaagcttatactactccctccgtattttaatgtatgaatgatgccgttgagttttttaccaacgtttgaccattcgttttatttaaaatttttataaaaatatgaaaatatttatgtcatttttaaagaatatttgatgattaatcaagtcacaataaaataaaataaatgataattttataaattttttaaataaaacaaatgatcaagcattggacgaaaagtcaacggcgtcatacattaaaattggagctagtaatatacaagtcgaccattagcttcaaaaattaaaattagttgtacacaataattaatatttaatctatctcacataatttatttatcggagtctaatccagtgctacatctggctactaacctgtttttttttctctcatctcattcttcctctacataagcacaaatacgatgtgacaacttgtataatccgttcatttcattctattgcagtcgctctaatacacatagcacagaggatttttttaggaaaacttagattatattaatgctagaaatagagaacatatttaattgcacggttgttggaagtgaagtcactggaaccgagattttgggcaccacgatttccttttaatttttggactggtatagggttagggtatcttggagcacaaatctactaaagaaaaaagaaaagagagagcacgcgctgggggagccattttgttctggagctaaaatatgcgctattaaattgttggtgctttaaaactagtatttaactaggtgaaaccccacgcattgctgcaggaatttagtatgataaaaaaagataacgtataatatagctagataacatcagattaagtaaactgatgtggtttatgataatttaaattcaaatagtatgtagaatgatgattcaaacgtaaaaagtaagctggtatgactttacagaagaagaaaagtagggagatagtttggaccgtagattaatcatctaaaggctaaaaacaattgatgtgatatgacttagttagaggaaaaaatgagaaaaataatttgaaccatagattaatcatttaagcactaactaagtgaggatgaactatataataaagatatacattaaaacattatgtgaattatgttggatgataatttaacatgtttgtatttgaaaagctcttaaattataataactataaagatatagcatgtttgcatgatgtttaaatgtgatgattgttagtggatgatgatgtggtatcttgttaattagtggattagtggatgatgatgtggcatcttgttagtggatgatgatgtggcatcttgttagtggatgatgatgtgacatctttgcatgtcaagcttaaggagttagtgggggatgactttatagtaagataggatttgctaccaaaatataccaacaacacatataaattgtgaaagaaattaattgacactaccaaagcttgcttaggattttgtacttgtcaaaatttagcattgaagaaaaccaaatatagcctagctatagtggccaactggccagtgggtgagattgaggaggttgaagatggtaaacaatatcagggtggtgtttggtgctttgattagttgattcacgtgcgctagtatatggggtggcgcgtcgtcttcggctaggacacggcggtgttgactcctcccggcttagaggcggcggatccggcgccgcccccgccagatctggccggagagcgtagatggaggggtggccggcggctgtggacgctggcgctcgcggaggtgcggccgcggcggtggaggccggctctcgcggaggcgcggccacggcggtggaggccggcgctcgcggaggcacggccggcagcgggggaggccgtgtttcgcggaggcgcggctgcggttgtggacgccggcgctcgcggaggtgccagggtcatcagcttcaagtgattgagctgatatactgcatactgagattctgcggactaaagatagtatattctttcatcatacaatttatcgagcttcatttatttggctaatatttcttatggaacacacgccgccgcatcctcgctggaaatcctccctgcgtggactgccgccgccggagtcgctgattcttccccgccatcggagccaccgcggccggttccgacctcggccccatctgctggccgattccgacctcggccccatccgccggcgccggcgccgaggtccaccgccgcggccggagctgactttccgcctctgtgacttgcactttgaaagtacatatttccccccaattcctaactttccatcacatcacatcacattcaaaactttcctacatacataaattttcaacttttttttccaaactatcaactttccccaaacttctccccaatttcagaaactaaacacagccatattcttgtgaagagaactataaatgattgtgcgccaccctcttaggtaggtaaaaagttattatgcaacagacaacagaagtatggttacgcgcttctgattgggaatttttattattttttgaactttttaaaatattaaatttaaaaataaaccatctcgatacttatttctaaaccttaaccttcttgtccactccgcctcgcctcacttggctatacaatagtcacaccatacacacttgcgcgtggcaaaaatggttcatattcgaaattaagttttgggaaggtttatttttaaaactaaaaatgaaaaggttcaaaaaattaaaataatatatctctgattggtcatatattacatttttatctgttggacctcatatttctaacgagcacagaacctttcagtatgattagatcaattccctgttatactaccttggagttgtatgcttgtgtcatgctcaaacagctcgactattcagcccatccaattttcaaatgatcataacgacttattgtcgcagggtagagacatacaaagaacaaaaaataattttgtttttaaaatagctcaaaagaatatttagtgaaattttatcggggtgaatatgttgggatcatgagttcccaatcacaaattctctggccgcaccaagtgtgccccttttcgatcaatcactggttctgtgtgttttacgtgacattgcaggaaaatgcaatgatattttagtacttttatatgtcgaaaacgtatattacacgtgcacgattactagtagaagaaaaagaaaaggaaaggccggtagcggccagctaagaccaagaggaggaggagtggaggccgccgaggaagagggtggcctcggagcggacgggcatccggcggctgcgagcttgcggccggcatatccagcgagggaggcgattgcgacgaatcgggaggcgcctgatatggtggggcttcctgttccttcgtcaccgcagatggtcggccgagctcgggacgactcgaccgctatgccgagagacatggtcgacagccatgcatgccgagatatgcatgcagctcatgcaagcaagcagatcgctcacgctcaggcagggcctcttatctctggctcggttgagctgagcaagcggctaccaattcaaacagaaaccaaaccaaaacaatccaaaaagacaggcatacaaacatgtagtaatgataatagtagtactcctgcagcacaacaagttactagtactactaaattaagagcgaatgcagtgatgttcatacggtacaacaactatggttgtttttctttgtattccagcatgccgccatcccgccatgctgcaacacatacaacaccggtccaaagaaacaaagaagatacatgcctccatgaggcgagcaagatacgactcattcgcagcacctccagattgctgcttcctacatatcaacataacaatgcaatgatggtctgaagaatataatgataagtcaattttgatcaatttgtcttacttacatctatgaatctagtttcctgtcacgaaatctctccaacctagtttcctgacgatttatctgcgtttttgttcgaaagcctgcaaaaaagaaataacaatccactttctaaattcacgtgcaaaagaatttgtatttgaaatcaattaatacatgctaaagactacacgacttacacgtcaactagatactgccggccttgggggttatgttgagcaaggcgcgctatcgcttttaatacatggggtagatattcctccaggcaatttgaaaatgcagcctcaacttcatgtaacatgaactatataggacaggaaaatattaacttcatgtaagatggttaaaattttgaacagtagaaatggagtagtactgaactcactctgttttgtgcatgtttcaagaagttgtttgcaaagtgaaggcatccttttggatcattagtatacaaaggatttagattatgccacactccatttaccaaatatgctcttccattgggaccataaataaaagcacgacgtaattctgggacctgacgactttgtcttgccaagaaaatgttcccagagcagatatatttgttgtagaatgtccaggatgtctaggataaatgttatcaagatgctctaattgtgacatcctctctaaataagattggagacaggggtgattgataataaatgccacaatagcctcatcattggaattctctccatttggacaattcctcaagtactcaagcagatcattaaagtacaatggaataccatgtggtgtaaattttgcaatgaatatggaataaagctttgcaaaatcttttgcacatgtcacaccattaaattgtactgtaagaacaccctggatggtaacagcaccattgtgaaatatgatgttgtcgctattgaaagcgccattgtagctcaggttttcccagtgcattgcagtgatgtggttcaaaaccttttggatgttgtatgatgcaaagtccgagaagtatcttactgataaccatggtagaaccggcggatttgtacgagtttgacgttgaagtgcaggtactaaatcaaccgtgtagaaccatgtgttcgcatggatatcatcaaacttctcatcaaatgtcatgggcctacaaaaaagacacacaatgttacaatgttagagacatgtataaatataggaaattaacatcacttaaaaacaaaaaacactcactggccggctcttcctcgaaaacggatttcaatcgttgaattccgatataaaggatagtctgacagtgacttattgacttattgtactctaaaatctttccacataatactgcatatgtgtccttaacatttactctcatcttttgacaagcagagttgattagataatcaacttttgtgttagataaatccacttgtacagatatattaaccccacatgccttgacaaataatgattgtaacccctgcaaataagaatcagcaaaaagagcatataaacatcaacatatgacaacaaaaacaaatgcgagattgattaaaacttgttagtaagatgaagtgcagcaatgcattaaaaaaatggcgcacacattacttaatgtatacagattgatctctaagctaaaaatgaggttatcacattgttgctctgacttaaaatggcatgggtagcgatgaggacttggggatggtatgcactgcgatgatgacttgggtgatggcatgcactacgatgatgacttgggcgatggtacgcactgcaatgaggaatcagatgctgatacatgcaggaacgttgactccgataatgacaacaataggtttactgacctaggtggtgacaacatattcaacatagattgtgataataatttcagtgatctggatggtgactatgaagatagcgaatgaaaattgctgcgaacgaaagctacacaagagcaacattgatcagttccatcgagaccatttggtatggttgaaactaaatagataggagcctaacattttgcttggtgatgtgtttggtatttgggatgcagtatgttgttttattaccttgtgcccatgtggtgctaaggtaatgtagcttataagtgcagacctgtaatggattgatggatgttttattaattaaatggttcaactattgaactgttggatgtttagtaattttgattggcaggtggaatgggtcatgttcaatttgattagcggagctgtgaaatagtggttgcagttaaaattttatttgctttgtctggcggttccaacttatttccttgacggctacaataactcaaaaatggataaacctgtcaggtttccaccctcaccaaattgcataataaatcttgtggtttaacaccgtaatgaaaatgattaaacctgggggggggggggtgaacaccgacacgaaaataaattaaactggcggtttcatccaaatctctagcggtgcacgaaattatatatgcgacaattagagggtgttaccgaggaattgggcaagaaagaagatggtggaggagcatcttgcttcacatggacgacctccttcacctcgtccagcgtgttgtcctgcagtcaagacaacccaaagaaaagattataagcaagggcagatagcaagaaagagattgctcgcatcttgtcaagcgcacctgatttttctttttctgatttttcaaaccattttttagatgtgttttacaacagttgaacatgctgcggtgctcaggctagctaggagcagtacctctcatcctttctcgatcgatagtgtggtgtatggagtacgtgatgcgtttgaggtttagggtgtgatggggaaagatgaagtgagaatgcaagatctaagggctcacgcagtcacgctcacacgcacacgacagaacgaaaaaacaccagcgtaaaagaaaagttttattcggatcatcaccttcttcttgcacagcgtagagtcgccggagaactgtctttgcgcccgtcgccgccgcgtccatgcagcccttggcagcttggtccccgtcgccgccgccgccgcgctcgtacggccctttgctcccgcggcgacggcgacggcggcggcggcggccgcggccgccggagtgaatcatggtctctgtgggagtcactgaggtggagaaagaactgagggaggaagaagaactgaggggaactgaggggagctgctacccgcccggccctccgctctccatgctgcttctctctctaagcgagcgaacaagaaaggcagggcagagagggagagatcgatagcctatgccttcctctggggctctgggcgctaaccctaggcgctagctagctacccctagcttgtacagtagttgcacctcacaggcacacattactgcaggacacacacacccagcgagccacacgcaaccagctgtccagctgcttttacttttgcttttgcctgcaacagggaagcaattcaattcaaggatacgcgggtgatatggtgattggtggagatttttacctgtgcgcgttaaaaaagatgacccctgccttctgtcactaaaaagttcaagcctccctttataccatcgtcgaactttatcgcgccctccacactattccatctgtttttagtcctaacagtgtcaaacagcgcagtcaaatgactttgttgtccttagggttgagagagaagagagagagagccgggacggagggcaccaccgacgaagagcactggacggcggcggtggcggccgcggacgccgcggcctcctcggcggcccccatggcggcgaggatccagcgcatccccgacgacgaccccgctactcacctgcgtcgacggcggcggtggcaaggtcgccggcgtggagcttgccagattccgatgggcgtggcgagggtgcggcgtcacctacgtcgacggcggcggtggcagggtcgagcacggcgatgcggcgcaggagcgagccagcgaggagaaggccgagcgccgcttggccgccttgctgccgcgccaccgagcaccgcctcggctggccaccggcgccgcttggctgccttgccaccttgacgccgcggctgttgcggcggcggcagttgcgatgacgacgaagatgggaacggcgttgcgacgacgacgacgggggcagcgctgcgacgacgacgacgagggcggcgctgcgacgacgacgacggggtggtgctgtgcgacgacgacaacctatatcgcaccccttccctccgccatgtgactcgatggagcgcgacgtccctctccctccgagcctccctcccatctccccggcgtgtgggcctcgccgccgccagtttggatggtgctaggaggtggcgcgtcgagacgacgatgacgcgcgcgcgggcggccgcgagggctggggcttcgggggaaggggccgatggtgaggttgaggttgagggtgcctcctcggtcgccgccgccatgggtcgcccgtcaccggctgccggccaccgctgctcacgagagaaagatgaagaggagaagaggggaaatagagaggtgagagaatgacaggtggggcccgtaactgaaagggcaatagcgatatttttcttacccgagcccacatgtcagagctatcaaacggttagatcctaacagaatagcgatggaatggtgtggagggtgcgataaagttcgacgatagcatagagggaggctcgaacttgaccaaacttttaaaattttttgagtatcaattttgtattttagtacgtttgtaaatttcgtatacgatatgagcagtacttttaaatgaaaacctacgcatattttctttcttattttaaactaggcattgacttggtcagatatttgaagctttagcaatcaaatttgatcaaatcttgtcaaatatttatgatcggagtatgcaaagggtgttctagatccgtactactagtaggatagaaggcatcatgcctcggggatatttcagggtggcatcgtactttttggtaaagtctgaagatcttgcatcacaattggacatgttttctgctcagttaattcgacggatgtgcttgacttaaacaccacgcacaataaaaaaaagggacaggaggattttgttcgatctgattccattcacaccactttctaattccgttaccctttgcatttcctctctccaaccaaacgcctccaatagtcatctctaataagatcttttgttatgctttgcaaaacatccaaggcatggagactgtgtggaattacggtggcttgactgggaaaatgaccctggggatagtgatgcaaagatcgtgatggtctagacaaaaataaaaatcaatatgcacaagttaccacagaatctagaactgatcttcagcgttattgcaagctagcagtgctgtagcggcaacggcacgaacgagaacctggtgtgaaatcttgggtgtgtttggtttacgatcaaggctggatgggatatggcggtccatattttgttagatatggcgatccagttttttggttgggtgaatatggtgatacaattttttgtttggttgtagggataaaggtggatttggcgattcaattttttatttggttggagggagtagggtggatgagcaggtgtagtcacctctcactttgagaggtgagtatacccccatcaaattcatatatactacaaatcacaaattcccaaacaaatcacaaattatatatatatatatatatatatatatatatatatatatatatatatatatatactacaaatacacatatagagaaaaaaaaagaaaatgagaaaaaagaaaaagaaaaaaaatgcctcgcatccgccgccgtggctctgcctctccgacgttgcagacctcgcccctcctcgccgccgccgccaacctcatccctc

SEQ ID NO: 4814 - DNA, 10645 bp, Oryza sativa
cgcccgccggggtcgcgcccggtggagggctgtggcgcccggcggggtcgcgcccggcggagggcggcggcgccgcgcgcggcggcgggcagcggggcttcgggcggcggcggccggtggggccgcgcccagactgcgcccgttgttcgtggcgatcggcggcggcagcggcttctttttttttttaatttgtgatgattcactgtgatgtatttgactgagaagttagaaatttgtgattcattgtttggatctgtgatgtatttgagaaatttcttaggatattatgatgtatttgatttgtgtgcataagtaactttatgattgtgatgtggatttggtgatgtgaatttgggatgttagttagatttgcggattgatttggggatttgcctacttgattcgggagaaaataaaaatgaaaaaagaaaaagaaaaaggaaccatctgcactgccgctattgtctctttagtcctggttgggtaacagatccctttagtcaaccgggaataaagatgtatctttagtcccggttattttaaccgggactaaagatggacatctttagtcccggatccttactcccggttggaaaatcggggttaaagggggttctcaaccgggagtaaagatcgtttctccatccgtgatagtacataacccttataattaatcatcaatatcctaattaagcaaactagttacatatgtctatcttgggtacgtagatatagacaggattacattacattagtgttccatttaagaggtgtagacggcaaagggaccagacataacaaaagccatctcaggaccagctttgcaaacactttacccttttgagatccaatgactagcactttagaaaaaggtaactgtgtaggagtagaaaggttgggatagacttggctctggttgcctagttgcgaccaaagcgcactgagccagaaatgtttcataaacttagtgggggtaaatatgtgatgcaaaccccaaacctagatgaaaactcatgtaaagatcgataaaaaaaattgtataaacatattaaaaaccacacatgtagataatacgatgctacacaaccatatataaaatcttgtctaaacttgtcttcgtttgtgagatataaaaataataaagtttgaacaagaaaaatgtcttgatgatttgtccaaaaaaaatgttatttttatatatgataaacaaagtgtgtaacatcacctcatctacatgtgtgattttttttttgaatatagacaactttttagtcagagtttacatgagttttcacctaatttgtggtttaattacaccgcatatttgcccaatttagtgagtatagtgagtttctgtagagaagctcatcttagaattattcatgtattccactactaaattactgagtgcaaagtaaaacctatacagttaaattacggtcgacctatatacggataaatattggatggcaaggggaatatatttatttaactagaacaaatgtccgtgcgttacaacaggtgaagtctattttaatcttattactgttatgttatatggtttagttaagatgaaatttactgtgggagttcgtttggatatatatttttaaaaaaaatcatgagctgcagttaagtccgattatcttaagttagcatgtgagtttttttaaatagacttcttgtatgatttcttatgtattaccaaaagtgaacgatattaaaaaccgattcaaatacggatatatatttccaaaaacaaacgaacttaaaaaccgactcatacatgtatgacgtaccaaaataacggcaaaaacatcttaaatttttataatagtagagttaggatcggagtgtatatttttggacagtgaaatcttcccaaacaatcgatatagcacaataatacacaacaaaccagacgactgttttgacattaattaactactcctaattaatgtaattttatgcaagttaatcatgaataatttcattgtttgatctgatctgcgctcgttaattgttttgcagcaaatcaatttatgttattaatccttgtctttccattgcagcaaaaaaacattctccttacatattttggttccatcttttttttatcactttcctggtcttgctttaatattttattgagggattcataaacaacacatgtattttacagcatggatatagctactagctccttcctcaaaacatatgcgcattagctgcaatatgcaatgcatatatataaattattatggacttggttaggttgctagactaaaaaaagcaatatatacgtgaataaatgttatcatcattcggaatcatgttaatttgtacatacgtgcaagtttgaatttggtgataagacataaagatacgatacatagggcctgttttaaatccactggcaaaatttttcatactgtcccatcaaatgtttgaacacatgcatagagtattaaatatgaacgaaaaaataagtaagtacatagtttgcgtgtaaattgtgagacgaatcttttaagcctaattgcttcatgatttgacaatgtggtgctgagtaaacatctgctaatgatggattaattaggcttaataaatttgtctcgcggtttacaagcggaatctgtaacttgttttattatcgtctacgtttaatacttcaaatgtgtatccgtatatccgatgtgacacggcaaaacttttcacccatggatctaaacacggccatattatatatgggttctgagctctgaaacagttcatgcatgttagtaattcaccctcaagtacagctagaagtagagaatgacgaccttaattcacttgtctaatacctcgaacaatgatggaaggagaattcttggctttaattagttccactccattatttttcccttaaagtatcacacatgataaaaaaaatgaattcaaatttaatttcacagggaactatcagaaacaaaatcaactacaaaaccgcggaattcggaattaatatttattttgtcatatataaattaacatactcagtttggagttcataagttcattacgaacaatctgaagataaatgagatactatatatatacgggagattcacacatagagtgactgtcgtatatatatatatatatatatatatatatatatatatatatatatatatatatatatatatatatatgctatacacgttagaactctcctggcaaagcataccataattaaggagcttatgattcttagcatatactccctccatcccagaatgtttgacgccgttgactttttaaaatatgtttgaccgtttgtcttattcaaaaaatttaagtaattattaattcctttcctattatttgatttattgttaaatatacttttatgtatacatatagttttatatatttcataaaagtttttaaataagacgaacggtcaaacatgtttaaaaaagtcaacggtgtcaaacatttagggaaggaggtagtatttttctacgaggaaccattgattattggctagctatctagcaaaagtgtcacacaccatgcatgggaagaatggcagttcaaaagccctagccagtgagatatataaaaccaattaagctatttattatttctcaatccaaaagtttagaacattatgatgggggaaaaactttggaggtagaagtatttacagaagctctagctgaagccttaattcctcacaaaacacgtcaggcaaacgatcatgcaacatccatatgcatttttatttgcgataaattggagttaatcaatcaattcgcacatgagatcttcaccctctcttcctaaatcctgaagacttgactagagttggactttgtgttggttgtaagggtcgagtttaagacgatctcggctgtgtgccattgttggcttagtggcggtctgtcacgcttagtggcggccggtccgatgctagccttctcctggttttatgtgttggtgttgccggtgtgtgggtggtggtatatattttttatttttcctgattacgatattacagggttgtaatcttataattttttagtgctctatcaatagaacctcataccgtctagaccagagtcgttgaaaaaaaatcttcacacgtataaatgtctgattcagatgtaattaagcatgcatgttgtgattgattttgattcataatgcaaaacgatcaatatgtgtagagatgttagttagttagtttaccttgggtgctgggtgttcttgacgaccttctggccgtacttgcgccacttgtagccgtcgtcgagcacgtccacgtcgctcatcgtcttgaagcagaatctcggctcccgcaccttccgccgcgccttccctcctcctcctcctcctcccccaaccttcttcatcctcaccgcgccaacccccagatgatgctgcgccgccgccgccgccgccgtgttgttgccggcgtcgttgatccccatggcgcccatcgccgccgccgcctcgcccttattccccatctgcggcctccctcgatgatcgccttcctcgcaagacctagcacggcaataacgtcgtcgacatgggagaaaaggggggagagagagagagagagagagatcgattggttgttacggttacttaattactcgtaattaccatggatgcggcggcgacgatctcggaggaggcgcggcggcgtggaggccgccgccgtggtggtggtggagggtgggaggagagggcgcgtgcgaggaggcggcggcggtggttgggtggtggtggtcgaggacgagggggctgtaacctaggacgccatggtggtggtggtggtgagacggcgtgggcgtgggatgctggaaggagaaggcgacggtggtggtggccgtggccggggcggcggcggcggaggtcgtcgacgaggaggccgccgccgccatggtggtcggcggttggcgggcggcgccgtggtggcctagcgccatcaccgccctccctggtgatgggaacatctctccctcttctctctctccagtttctctctctgattattttcgctgtcttgtttgcttttttgtgaggtgtgagtgtgaatgtgtgtgatatccggatgtttatagggtgtgggagagacaagggattgcattattatatatcatcgaggaaattaagacaaaacaaaaacaaagtcttctcgaacttttacatcacacgcattctgaacaaaattatcaacaccttatagttactccatcatgattataatcggtcatgaaaattgatacatacatacatacatatacatatacatatacatatacatacatacatacactggtggagaaaccatctttcgtcggtcggccgatttccacaatagtcccggatgcaataaaaaccggggctaaagatgatctttagtcccggttcaaaagggtaacgggcatatttgatctttagtcccggtttgtgttaccaaccgggactaaagatcatctttagtcccggttccacacaaaccgggactaaagatcatctttagtcccggttcgaatgctgtcaggacctgtcaggcccccccgggatctttagtcccggttggtaacaccaaccgggactaaagatcttaactttagtcccggttggtaatcccggtgatctttagccccggttggtgctaccaaccgggactaaagatcttaactttagtcccggttggtaataccaaccgggactaatgatcccggtgatctttagccccggttggtgctattaaccgggactaaagtcccacccctatatatatgtcttcttcctcctccagctgcccgagcaagcttcaaaatttcttcaaaaaagaggggaggtcatgccaaaatttctattaaatttattttggtgattacatacaaatcggaggtgcctaaaaggtttgcaacttcatcctccaatgttttttttgtcatactacatttgcacctatgttttgcacactttttttgtctccaaaatttagttgtaagttgatgagagagaaaatgtgtgtggggaagaaagaatatatagaaatttagttaatttgctaaacaaggttttataaaatagttgagaaggaaaactctagtgaaagttaatcttaaataatagaaaacaaactaaaatgaaaattaaaagaagtaaaacaaattaaaattagtttaaaactttacaaatagtttttaagaattatttggtgtaatattttatgatttttgtatgaataaagatatcttataattattgtatgactgtcattattgtaagaataattatttgtgtgcggtttttttgactcatgtagatggatcggcaatggatgtacgctgaccggcggtccaaagagtttattgacggcgtgcactattttttgagagtggccgaagctaacaggcaaaggggttttatttgttgtccatgcaataagtgtaagaatcagaaggagtattctgcatccaggactattcatttccacttgtttgagtcggggttcatgccaagctataattgttggacatcccacggagagcaaggtgttgaaatggaagaagatgaagtggaagacgacaatattccggactttgctcagtatgttggatttgaaggaaatcaaacgggcgaggaggaaatagctgctgatggtaacgacgttgcggatgatcttggtcagatgttgcaggacgctagggaggactgcgaaagtgaaaaggaggcccataaattggacaagatgttggaggaccacagaacttcgttgtacccaggttgcgagcaggggcacaaaaagttggataccactctggagttgttgcaatggaaggcaaaaaatggggttagtgacaaggcatttggcgatttattgaaactcattaagaacattcttccggggggaaacaaattgcccgagacaacgtacgaggctaagaagatagtctgcccgttaggactggaagttcataagattcacgcatgtccgaacgattgtatcctatatcgcggtgaggagtatgagaacctagaagcatgccctgtttgcaaagcactacgatacaagattagacgggacgatccaggagaagttgacgggcagctaacaaagaagagaattcttgctaaggtgatgtggtatttccctataataccacggctaaggcgtttgttcaggaacaaggggaatgctagaatgttgcgatggcacgctgaagagcgtcaacaggacgggatgctgagacaccccgccgatggttcgcagtggcgaaacatcgacagaaaatttaaagaatttggaaaggacgcacgaaacatacgatttggtttgagtacggatggcatgaatccttttggagagatgagcagcggccatagcacttggcccgttacgatgtgtatctacaacctcccccctggctatgcatgaagaggaagtacataatgatgccgattattattcaaggccccaagcaacctggtaacgacatcgacgtgtacctaagaccactggtcgaagatcttaaacagttgtggaagaaggaaggtgtccccgtgtgggacgaggacaaacaggaggagtttaacctacgagcgctgctgttcgtaaccatcaacgattggcctgcacttagcaacctatccggacagtccaacaaggggtacaaggcttgcactcactgtatggatgaaacagaaagtacgtatcttaagcactgtaggaaggttgtatacatgggtcatcgtcgattccttgcagcaaaccacccggtacggaagaaaggcaagcacttcgaacataaggccgaccaccgtacgaagcctaaacatcgcagcgggaaaacagtgtttgctatggttaaagatcttaaagtagtgttcggaaaggggcctggaagccagcatatagagagcgaagatggtcacgcggcgatgtggaaaaagaactctatattttgggagttaccatattgggaattcttggacgtacgccacgcaatcgacgtgatgcacctcactaagaacctttgcgtaaaccttcttggcttcctaggtgtatacggaaagtcgaaagatacactggaagcacgtaatgatctgaagcatatggaacaacgcggcgaccttcacccggaaccaaaggagaaaggaagccattacttgagtccagccagctacactcttagcaaggcagagaaggaaagtatgtttgaatgcttggagagcataaaggtaccgtctggatactccacgaatatcaagcgaataataagcacgaaggagaagaagttcacaaacctaaagtctcatgactgtcacgtgttgatgacacaactgctaccagttgcaataaggggtatccttccagacaatgtccgtgcaacaataacaaagctatgtgcattcatgaacgcaatttcgcagaaggtcatcgatccggatagattagaagcccttcagaatgaagtggtgcaatgtctcgtcagttttgagttgatatttccaccttcatttttcaatataatgacgcatctgctttgtcaccttgtgaaagagatccgtattctcgggcctatgtacctacacaacatgtttcctttcgagaggtacatgggcgttctgaagaagtatgttcgtaaccgtgctcatccagaggcaagcgtcgccaagggttatggaacagaggaggtcatcgaattttgcgtagaatttatcgaagaccttcgcccaatcggggtacctgaatcacgccatgaagggagactacggggaaagggaactctcggaaggaaagcaataatgacggtagacaacaatttattccgtaaagcccatttcactgttctgcaacactcttcattggtagctccttacatcgaggagcacttggctctagttcgcgccaggaacatcggtaagtccgatgcatggattacacggcatcacattgatactttccccgcgtggctacgacaacatctcatgggtaacgagtcgatcaaccaacaacttgccttcctggcgaggggaccgtctgggtcgatcacgacattccagggatatgagatcaatgggtacacattctacacgagagcccaagacatgaagagcacgaaccaaaacagcgctgttcgtgtcgatgccatgggacacgatggaacaactgccacgtattacggtgccatcgaggacatatgggaacttgactatggtcctctcaaggttcctctgttccggtgccaatgggttaggttgactggtggaggcgtattgattgatgacagtgggatgacaactgttgaccttaacaaggttggatactcggacgaaccttttgtccttgccaatgatgtaacgcaagtctttttcgtgaaggacatgtctagcaaaggaaagaagggcagagggcctgatgagcctaagcgtcaagtggttctcccaggcaaaagaaaaatcgtcggagttgaggacaagactgacgaggattacgatcagttggatgggcaaccccctttcacggtgacgattgaccctagcatcctcctatcaaatgaagacaccccttactcacgcagcgatcacaaagagggaacaatagtgaggagaaagtacgtgcggtcaaccgtcaccgccgatgtaatgccgtaattattgtgtacacgatgtaaactattttggatgtattgattatccatataaatcaattgatgtatggcatatgttaattacgcacgattattagaggtttcaacaagtttaaatcatgtatatgctagttatatgtgatacttacaatttttaaaagttttaaatcacacaggtggcaatttcatatgtatgttaattagagtttttaacatttaatttactagcattcatatgctaattataattgactagaggatttttaaaagttttaaatcacgcaagtggcaatttcatatgttaattagagtttttaacatttaatttactatcattcatatgcaaattataattgactggagaatttttaaaagtattaaatttaatatatttttaaaactatcattcatatattagagtttttcacaatttaatttactatctttcatatgctacttatatatgacgcatcgaatttttaaaaggtttaaatcatgcatgtggcatttacatatgttaattagagtttttagcatttaatttaatataattcctacgctaagtatatatgatgattacaatttttattaattttaaatcatgcagtatgtacatacatatcttaattagagtttttaccaatataataatatcattcatatatatgctaagtatatatatatattggaatttttattaattataagtcatatatttgcttattacgatttatccacttaatttattatagacaaaaatactttttcgaagtaattgtcattaatctttgtactttaaataatgttaatgcattaacttctattttataaacacatatgtaagcgaaaatcatatgcagtgctataatctttagtcccggttcttaaccctaaccgggtttaaaaagaatttcgaaatagcgggaaaagatatttactcccggttgttgagggcctaaagatatcaagatatcttt

SEQ ID NO: 4815 - DNA, 53304 bp, Oryza sativa
  unsure (1)..(53304): unsure at all n locations
cccacgccgccacctacaccaacaccgccaccctcgccacctcctacaccgacaccgccaccactgatggtggctgtactatgtttgtcgccgcagccctcgccccccaccatgctctgcctccatacccacgccaccgcagggtcatgccgagcgtcgacgacgacgccggccacccacacggcggccatgagcaagagcaccagcaccggccgccggttggccatgatcagaatccccgatgagcttagctacagctagcctatccactatcttcgtgctcgactattgctgcgtgtgtgttgtgtgcagcggaagcgggagaaaggagaggtatttaagctgcagaatccacgggtggagatggctgcttcttctgcttttggttgatctggtggtgggtgactggggagcaggggaaggttgactagtgtgtgtgtttgtttgttacggattaattgcgcagccttttgacaattttaaggtggattccccatgcatctaggtgagcttggcttagctgggcgtgtgcttttgcttggtttgattggtttttggttggatagctctcgcttcttttgtcatgtgaactctctcactcgtgcatgcaatggcaatggcaatggcatgcgtgtgtatgcggccgtgcatattgatggcgagctcgtggtgttgggattgggaagaagaaagcaggcgatcgatgtgggtgagcgcctgagcggtgggaggagcagagcaacagcttattacagctcggaatgcgtttggatgctatgcttgatgcagcagaacaagtccattcctctgccctttgtgttgcatttcagtctgaattgtacattgaatggaaggtttgaaactgagatgctcgttaatttcttcgtcccagcatgcttcatcagtactcgatttcaggagaaatcccatcgtgcatgtatgatgtatgatgtatccattaacacattgtaaacccctgcctaaaatagcttctgaagggtgttgttttaataaaccttataatctattgttccctcggtttcaaattatttatcctaacccatgtttatgtttgaccattaattttaaaaaatccatatagtttaacagcatatgattattatgaaagcatttctcataatgttagattatataattataattaatgataaaatatacatgtttgacttagtacgaagcagacaataaataatgtgaaataggggagtagatcattctgagcttcagtcaaacaggccagattactatagctctgattgagtatacgacatactgtatatatacagaactagagccatcaattaaaaacccctgattacccataataaaagataacaccggacacgcaaaagatggcacttacatggatataaacattgataattagtgatggttagtgctgaccgctcaacgctcacctccgtttcctgaagtgagccttcagctcatggaagacgcagaacagcgtgtccatggtgtcctcgtccaggtgcgcgtccttcacgccgccgatcgccacgatcgtcctcacccactcctcatggagggtcgagaactccgcacgctcctcgctcgacctgaagttcccggcgatcttcgacctcatcatctcgccggcggccgacgccctctccacgatcgacctcgggagccctgccatggtggcgacctgcaggccgtagctctccgggcaggcgcccgaggtgagccggtagaggaaggtgagctccttctcgccgccgtcgccgccgtttcttggcttcagcatgcaggccatgtgctgaagggtgacgtgggggtgagaggcgaactccttggtgagaggatggtagtgagttgcgaagagcagacggcatcggaccgcttcgacaaggtgtcggaatacctggacgatgataaatgtgaaatcaacgaatcaaggggaaaaaagtagttagtgttatccatctataagagcagaccaactccacatatctcgttagtaccttaatcgataggtgtaataaggtcataaatcccattagctaaagcaatagagaagcagagcataaattcatagctttcacgagagatcattatctagcctacccatactgtagcctattgagcaacaaaatcacataacatgtctagagcaaaaaaaaaaaaaaaaaagcaattggtgtcacaaagaccatgcatgtgaaaaccagtattgatttgcgcattagcccagattagttcataccatgcgctgcaggaactttaggccatagtaataacatctacttccatggaagtgcatggtgctcaaacagtgtaagcagaagaattttgggcggtagaggtaagatgggcagttggtcagatatactcactgcatatgcaattgcatatccatcaaatgtgctagttcctctgccaagctcatcaagcaagacgagagaatcctcggttgcattctcaagaatagatgcagtctcagtgcattcgacaagaaaggtacctgcggcaacaattcaagttagaccactgtcacctcatatctgcattgtgctcaaatataagagacaaagtacataacacaatgtaaaggaattgagaaatttgactctgcagactcatggttcatcaaacagctcaaataaattggaaaagtgctttctactgaaaatctatagatttacacagcatatttcatatgccaaaaaaactggcatgtacttgatgccaagtatttcttgattgtacaaacaacatttcaataaatttgatgtgaatatcaattctattataagatagtatttggttcggacgtcaatgtatgtacatgtattatttagtcatgaaaattatgactaatgtcagacgattcagatcgagtgaaagttaactcatttaaaatgcatgctctttcaactaaattttggactcaaagcaataggtcaataggacatgcaagaattatcaaatctgttcggtaatgcatccttactttctccagacataatccgatccattgcaccaatccgtgtaaatatggcatctgcaagtgtcaactcgcatgactgacagggaacataacagccgagctgcagatcagaagcaacttcaattatacactcgaatagggaagcctataagtagccaagtataggagcataatttaatgatgttatacaaacctgggcaagcacaatagctaggcaggtggcacgcattattgtagatttcccgcccatatttggaccagtcaacaacaatgcaaagcgattttggccagataaattctgaccaagagatagatcatttggtaccaacccatttacactttctgcaaaagcataaggatgccataaacccttcatctgaagtacaggcgcttttcctttcagcagaatgttcggtctgcacgttgtgccaaatgacgacaatgccatggctgcaaaggacctaagcacatcgatagtgctcagagcattgatcactagagaccattcagaagcttttccaactaaaagatccactagcatagccaaagtgtttgcatcatcgtctttgacactatgatcctaccaaagctcacatgatcaaacaataagagaaatcaggagttcaggactaaaggtgataagctgataagaataaataacagaaaaaaagctaccactgcttcgttgatagataatgcacattgcaccatatttatacctggtatcttggaaaatcatcatctattgcctcttcaaaatgatgaattaattcaccaagggagctcaatgttggaatatccacagcctttgacaatgctgagatgccatgatcttgtctttgtaggatgtctagtaagtcaattccaacacggaggcccttgacaagcatgccaaacgtttttatctggaaatattgcaaaattttgcatttcagcagtcagcaggataggtagaacacaaaagaataaggcagacatcatactttgtaaaaaaaaaaaagaatggcacaaatcaaactcaatctgtaagataagagtgaaaagctaccaactaacccttctttttaatatcttttctccaacaaagggcaacagaaccgcagatgataaaccaacagtggattttactcgtcctagtaacctctcgagatcagggactttacgtagatgctctagtgtaacagatcctagcccacaattttgaatgaagccctcaacaatgtcgagcctttcattgatagcatcaatatcttttagtgggtggcaaatccatcttcttagaagccgcttaccgcatggagttatgcagtgattgaggtgcttatataaggtacctgccataaagtgaagagtacagaaagattatttttgctatatatgatttgacaaaattaagtggaatggaacataggtcaaagccacatcccttacctgatgaaccaccatcaaagttgttgctgaaaatctcaaggttcacaagagtctgaccatccattcttagacatgttctgtatacatggtaggctaagacctccccgtttttcagagcatcctctagctgttttcagattgtagctataagaatttggaacagaattcatgctttgtgacagataatctattgataaccataaaagttatagtatggctcatgggagttttttttttttacatgaacattgatttgaaacagaagtcctctgcacatatatagttatagttgacacatttaaactattgcaaacttgtgctggaagactacataaacaaaaggaaaatactgatgagaaatgacactattctaaactgacattgtgtaagcgaaatggcagttagtaaaaagaaatgacacaactgactggcatgacatgaagattagcaagaaaatataatcaaggaaaggattgaagataagtataccataagtctagttaaatggctcacaagtccaccgagtgcacaaataactgcatctttattcactgaagaattcaatgcagataaccatgaacttgttgacgctttaaagtatcctctagaatctattaacgtttgaatttctgaaacgtcagagaaatataacccatatagtggggtcagctgcattttcacagaacctgcaatttaaagaaaagtagttttcagttaatttcaaactcctctagttcacctgcagatttaccttttttaggtaataaggcaggagagtccctacattatatattaacggataggccagatacatgtttgaaaaaaaaagaagaatgaaagattatgaacttacctgctgaagcatatttcttaattaatctatgagtttcttttgaaaggcctgaaaaaatgggaacatgtaagtgaagattgaagattccttatatatgaaagttgaagattaagtatgttctgacctgaggtttcatagattatttctttcggagagacctgaaaaggtatattagtgatcattgcttctaatctgttgaactaatggaaagagatcacaaagcctacctgcaccagcagagcccccaaagctgcaaatgtatcatcatcatggactgaacccacccaaattttaagtgcagcataatctaaaaatgcaaatccatagacccgggaaccatttgaagctagtgtaatctgaaagttcaaaaaaagggcattagatcaagagcgccgataaagaatgctaacacagaccaattccattttattcagaatgagaccaaataagatcaataaaaaaactgaaacagaagaacacaaggcgccatcacaacttgaccattagaccactatcaacctattatatataaatttctgacgtaaaagtactgttataccattagaccacatgaaaaaaaaaatcatgctaacaatctaaataaactgcaagaataaaactaaatcttggtataacactaggattttattgaatgtttcggggaaagatggtatcaaaacgccattttaatgtagctacaagttgttccagtaaatatcttgtacacctgctgatttcacatgtccatgtggtacagtactacagcagtcaaccaggttgtagattcaatataattctcttcagcaaatttatttggttataatgtcataacaccatgcttttgctgactttgggaacatgataatgttatgcaatgattaggtttgggatttttattttaacctttttaaacaaaaaaaaataaccataaacccttcagggtcttattttcttaattgttaaccatttttggaagcaaactttgctatgcccgagtgataaagccatggagcaaaaacctgctttctgcaccattgtggtagcgtgacaagataattctgccaccacccacaatggcatggcgaggagaagcctgtcatggttagtggcgtggcaaccatgctaaaaattaaaagtactaatggttggtggtactgttgtgtacttctcatatgacttgaatatactttgaaagcattacagcaaatcatatagcctaaatccaacacaatgctttgttaatatggaagcatacctctttgagtgaaagaaggtgaacagcatcagccccaatgttgctgtcccctactgttgatggtgtggatacatgaaccaattttcttagaataacctagcaaaagaaaaacaatgttgtatggcatcagtctctcactcttaacttcaaaaggaaagtttaccttactctttaaacaagagtaaagggtattagagtgtgaaagcctcaatccttaagttgcataaaacattgcaactaaacactccatccaaaatgatagctagattaaaaaaaaagcttatcatgaataaaaggatgaacataaaccatgcgggagaaatgttctagagtttataccgaggtacagacaattttggacatcctgagagagcaaaagaactctcccagagagagagagagagagagagagagatcggtcaaaaattttaaaagataagcattggaattgcataaatagcacacttttgccactagctatttagatgaaaaagaaatcagtacaatgtccagaaagaataaatttggggttgatgacaataaggaaagcttaccgaatttgatcctctagatttggcttggtctgcagattccatttgttcaattctgccaactttatacctgaaagaaatgctggatttatgagcaattcattcaccaaaagatacagaaaagggaagaggaaaatggatgccacaactcaagaatcatataaattacattcaaaagataaataagtacattgtaaaaactaatggttgaacaggactatttttttctggaaatcaatgatgacaaagtgctaaacaataaagtgtttatcttgcaagtacgtgcatattatcatatcattagggtgtggtggtaaagtcgtgagtgaatgactcacccatcaagattcaaatcttggtgtccaattaaattgttgtgtgcatccctagttggtacaaaggtcaatatcccttccatattaacttctattatctaaaaaaaaattaataggaatggagatgtacataaactaacaaaagacctcctataaccaacataaggaataataagcaggaacctgctgaagttcgagatatgatgtaccattttacaaagtgactcttattattaatatgctgaaaatgaccaaacataagggggatacggaatttaccctcgagctaaaagcttttcaacggcaacatctatcccactttctgaaatgccaacctttacataagataagaaaaaggttactatcatgtaccataaggtggcactgatgctagatagtttgtaagtcgggtaaaacagattaaaagaacatggaaaatgctaagatgacaaatgaaatatggaaagcacaaagtgaccagaattaaatcaaaataaataaagaaaaaaaatgaagaactgtattgctataatcctgatttatttagtatttacacagttgttttggtcatgccaggagaaaggttagagggatgttttgattaaatactatagagtactcacaagtgaataagtgtgcattacttcactcaacacaataaacgagttgtaaatgacatcatttagacttggtggcaacagtatagcagactttcagaactaaaccattcaatgataaaaacaatactctagacagtactagcattcatacctgccggcactttcccaccccactgatagtcattttccagtcaagttccttttggccaatctcagcatccacctcatagagctcatagaattttccctagcaataagggaacaatcattgccataggttatacttatacaatcccaggtgctaaaaaatgttggtatttggtcgatgtatgtaactttgggaaagatttaagacagtaatagaaattctgacgtgtcggcaatctgggaggatgaacaaataaaaggccttaaataaggcaaatcattttggtactaggacagacagtctataattctagtttctgttgcatatctatcagtatgcatcaagtaatgaagctcaaattatggccagcaaacaaaaaaataaggggaactcctatgacaaaaaaacatctcctatttatggagttaggcaataactcagtatgacaccaaggcatgagagatgcatattatccacagcagtaatttctgaacttcagttttagatcatttgcccaataggcactgatgagacatcaaaaatgaaacttacagaaacatcagccttcagtgtcaatcaaagcagtcagggtaaacattgaaacttaccactttgaaaaacaaaacaacatccatatacttgcacttaatattccaatattgcttttgagatgtagacatctttctcaatgcatcaggtggaataaaaagagttgtcttatcataaagtgggtctgccagccgccttctatttgcatctctgatattcgaaggattcagccactcaaacttgctgcgtgcactttcagccatttcatcatggaccttattctcaactggagaacactgagctggtttcaccttcttgtttggaccccagaaaggagagcatgagtcgttggtagtcacacgttgatcttcttgaacccgcttcagacgaggaattactgctcgcatcactggtgtttctggtttcaggggactcggatcaaattccgaaaatagttcagcacctgctccaatgcgtttgtcattcttaggcactgaggataactttttcagatggttctgtgatggtgttccatttgaatcaaattctgtaaataattttgttgctttaatgtatggaaggtctgaaggcccagaactaagcttctctgaggattctcgtctaggagtataattggaatcaagtgcaaacagtgtagcgccccggacatattcaccattaggagatacaaatgagaactttgatggatgctgcaaaggagtttgatctgaatcagattctgttaaaggtgtatcagctccacgagaagatctccagaagactgtttttgaagtatcctgaggagtttgtacgtcaaactcttcaaatgatgaattagctccaatgcagttattattggaagactcaaagggtaacttctttggacaatgcggtggaagattttgatataaaccaagttccggggacagtgtgcttgctctaacaaagtcatctttggaaggccataaggacttcaggggctcctgcaaaggagtcatattcgaaccttcttctgcaatcaacatggctgctttgttatctccagcattgcaagattctaagaacaatgcacttgagcactcatttgaagtagtttgatttttcacaggtaaggctctctgctccacatgtctagcctgggaagcatcctggtctctgaaacaagcacaaggaaaatgtcatgataacgcaacaagacacgactattttgaaggccctagcaagtgcctggttttgtccatagcagttagcaaacaaataactttggtacatggaaaagaacaccctgaaatgaaataaaccaagagaaacaaagacggccgatttaagtaatcagtacaacaatccaaacctgcaaggctgcaactaagattaaggatggactacttcactaaaatataattctgaaccagaaatctgatatccattgaggctaatcacaatgaagattaataaagataaaatatgtgcaaattatcaattttgtagttgatgccgttttgtgctagaccaatccaaactcgaacttgattttggtttcaaaaaatgaagctctgtggatgggtcctccttccttgcctgaagaagcaaattaatcgcaaaagtacaatcaaaaccacagatcgcattaacatactatctgaaaacccagacacaaacttgaaacaaacttagatgagacagaccgatcaaacatgactaggaccacgcattgcaggccaaaactaccatacatcgcacaccgcagcaatcaaaaccattaaacctcccattatgagtcaatccacagataagccaaggggacgaaagtaggatccatggcatattcacatcaatgtcacccttattggatacagacctacagtggcagtaagtactaaataccaccaatataagtcggcgcgcgatagcaactagaataatccgaatggcgcacattggaaccaacccaatagtacatcgattgaatccttcccgtctagtattaactagtgatacgaacgcgcttgaaaccctaaacccgaccaaaagctttgccgcaacccgactgggaaggcccccaaaccaccacccccaaaaccctagccgcctcccgccattcacagtacgacggctgcgttacatagaagcagccagcgatcggcgcgccgtacctcccctgctgctgctgccgcggcggccgcacgagcctctccatgatccccgcgaccgacgcggcgggaggccgcgggggcctctcgggcgtcgcgccctcctcccccgccgccgccgccggcttcttctggaggaaggagaggatcgactgctgctgctgctgccgccgccgcggctgcatcgtcgccggcgagggtcgggcggggggaaggcggagggtgcgagtttgagaatgggagagagaggggaatggagtggaggcgacgaggcggggggaggaaatgggatttttcgggggggaatttgcgagcgggaaatgcttgcggagcaacgaaggcgcgcgatgacgcgggcggtaagattgtttcccgcttccgcttttgggacacgggtttcgatagaggaagaagaagaagaggcggatgcctggacaaacatacaagggatcaaccataccgaattttgacttattttggtactgttggttttaccaaattttggtagagttttaaggaaggaagttttttagaaatgctaaaatttagtaagtagtactccatccgtttcacaatgtaagactttctagtattttccatatacatacagatgttaatgaatctaaacacatatcattaacatacatacatacatacatacatatatatataggcaatgctagaaagtcttacattgtgaaacggaggaagtagtaatagttgaagtgtgtgttgtttgttgcgtaaggttgtaagcagcaacaaactgagaagatccttaaacttaacttttaatgcaaaatttgatcatatatatactcctttagaattatgaaactttaacttttaatgcaaaatttgatcatatatatactcctgtagaattgtgaaactgaggattaagggtttgactagcaaaccatataaaaaattaacgatgcaaaaaaataatttagggtataacttctgctactattttgatgattttaaggtcaatgttaaaaaaatgaaacgaaaaacacctagaataattttaaattaagtttcaaaacttaaattttggtagccgctgtacttagcgtgatcttgttgaccccaatttctgtgtgacccaaatgtcggtgacacaagatgaataattcctctcaatgtttacctgaagtagtactagtaatatgatcaaatcccagctgatccacttctgacaccatcaaaaacagcagaaattcaactccctccaacgcccaaagtacaggcacaaaatatttcacagcaagcagcgacatcgtgataaacagaagttctcataaactagacctaagtggtgacgcgcgcagttgacgcatatgtacaatcaccacagcaactgggtggtaagtagtggctggtgctgcctgctttcccctacctgatacaattggaagctggtgagaggactgaactactgaattcacaagcttccaacaaacaaaatgcaaaagggggcataagtttatctaaggtgagccggactcctcctcagagtctgcaactatcatttcacgatcatcttccgagcctgatagagaaaactgctttgagatagatgttggcctctgcctcattgttttctttgtcatggatcgaggagtaagctgtcctgggcgcatgacgtcttcgtcgtttttcatatttctccgactccggcggagcccttgcggaggcttgtcaaaccgacgggaggcaagacgagtcctcttacgtgggacaaatacttcctcctcttcagtatcacccttgttgggatcataagcatcattttctccatcactgccaacatcattttctccatcgctgcctgacgagtcatcatccttaccattgtagtctctgtcttcatcctcatcagaactcaggtcatcaagggactcgacatcctcctgtccgccatctttgtcctgctccggattgacgtcagaccctccagcatcctcctgtccatcttccttctgctctggaccaatgtcagaccctccattggctcctttattgccctgatgtgaggcacgcttctcttttttgcctgcctcctgtggatcagattcttttgatttcctgcattcaagcacgtgaattcttttcaagaagaatgattttgcatttggattacttgagcaacaattcctaaaagctcagtgctaaataagcatggagaatgtgatccatacttcaagtttgctgtttctaaattctagtaaatctgacatgtcaattcctggaaccaacaagtctcaaacctgttaccagttatcccccccccccccctctccttctaatttgcttatactatcagatgctgctaatgttagtaatgagggactatgctgtaccacaagaaatcgaaggtatttaattgcttatattgttgcagtgttccaaatgttaactgccaacgaactagggggaaaacaggaagggaaagaatggttttaacttacgctgcagcttttattgcctcctttatagaacgatcgtaatcagctgcacacaaagcaaatcaagggtatcaatgccaagacatagcaattggtcacaaaacataaatactttgatcagttttactgagtatttaaaaatagaattagaatatgagcctgttgaatgctgaaaacatctgtattaacctatagcatttgctgcaattcttagagcttgtgttattagtgagagctgtcaacaatcatcattttccactaggcttacagttatatggattggaaacggtaaatgggtaaagtatctacacttctactaaatgagggactggcagaagaaatgagagatgcaacatgaaattcaatgtacccagcaagctgttggttatgcatccagactactattcgtaaaatatgatgaacagtctcaagttgtcatgcaccttgtgtactcaaggatgctaaacagaaagccccttacagtaattgtagctgacaggcctacgttcacgcaatgaacgggtttggaaacttgtagcataagctaaaagttcatccttcttctgctgacgttttaaatcccgctccttcttctgcaaattaaacagacaaaaatgtggtcataaatcataaaagtagagtatgagcttcatatcttgctgccaagcataaatcctgattccaaagtagaatataaatgcattcatgtattggacacccctggggaaatatagacgcaacagagtagaaagcacgtgagctgaaagctaccttttgaagcttctccacatctggaataatttctgtcttaagatgctcgccgatggcagattccggtcgacctttactgcatagtttctcctgttgataccatatgtcaaatatgggaacaaaacacaagctgcacaagaaaatgaacagccaatacacttaccgatatctcaacgaactcatcaaggttagtcgcaactgtttcccactgaatattgataactggctttgtcaaacgaccattctttcccttcaagttgcgcttgaaatcaagtgttacatactcactatacaatctatggccaatagttgagtcaccatcatacctaacaagcagaaatatttcaatggacagtgtcagcaggaaaaaaagaggacgcaaaggcatgctaacagtgactcattgattgcaaatgataacatgaaagtgaacagaaactctcttaccagtatatagttccgttactactacttcctaacttttcttttcggaaattggaaatatcaactcctcttttcatctcgtcattaacataccataccgcgtcattttgctgcaggatagataatgtctatcagaataatgtgcatttaaaagctgaaggacttgggggtatttgactaattagattattaaacctgaaaggaaactgcaattacaacaaggtgaactcatagaatcgttacctctgaacgaacttcacagagtgctttaagtatcaacaagcgtttaatcggatcttgctgtttatacgtgtcaatttccttcctgggtaaacaaataagtcgcgatatgaagttacctaagagtcatagtcaaaaagcttatttacaatgcattatcctgcataccctggattaattttgaacgggtttgcaccttcagcaacctgaaaccaaaatgatgttaatgtctgggactgctctagttatatttacactagtaaaaattttatgcaaactaaaacatacccatgtccaccaatctgataatttcttggcagttgccgttatccatccatcatcgaccttcagatttttgatagttggtggtattccctgatacacgtgactattacaacttagcaaacatcatttcagacaaacatggcaaaacagtaacataaacaggcttattcgtcattacatcaacaacaaaaaaaaatgaaacttagagaaaagaaaaggtatcataatatttggtctccctaatacagggtagtaatgcagtataagaataactgatgcaaacatcttgttactagtacacaatagctcaataaggaaagatgcctcccacagcaacgcagatgatgcaagcttgttttatttgtatgtcacgtgatttagaaatctcaaacaggcatgtccataacagttaatgaagttaatcagtcactatgtcactgttttttaacaagattaaaaaatgattgattgaacttattcagtactttcaaaagaaaaaaaaagagaattacatatagataaagttttttaaaagataactatggagaaacaggttatggtttttgacaagcctagctgattacataacctgcaacttactcggtgattgcaaacaaaaaggacaaggacaaagaaatgaagttttttccctttttgcagaaaacctgtcatggtttgtgacaaggttaaagattacatagaccaacgcaagtgtgtattcagttcaaaccctccctgcagatacacaatgcctctagtgcaaagcaagcacgaacaaacctacaggcagagtatctgctgccttaaacaaatcagatcaccaaactgtctacaatgcaggcattctgcaatccaaagcctacacgatccaaccataactacagaagtcaggagtgcataggtgcagcctgaaaaaacaaactacacctttataagcgcaatatggatgcgggcaaggtcgtggttattggcgatgagcgcggtctcgatctcctccgctgatagccccaggttcccctcgatcaccggctcaaacacctgaaaaccaaaaaaaatccccaaaccgaaaccccgtaagcccaacacgccaataccaatccaacccaacccttgaagcaggagagggacaaaaaaaaaagaaaaagaaaaaaaaaggaagccctagccgaaacggctcacccggagaaagtggagcaccgacgcgagctcccagctgcggcggaggaggacgcaggggtcctccggcgccggcggcgacgcgggggggtccaccggggacgaggccgggggcctcgcgcgcttcgccggcgaggccatcgtgcggggactggaggagacaggcgggaaagtgggggaaattttggtggtgggaggcgggagggaggggaggaaagtggagaggcgggggaggaggaggagacggcgctgcggctcgtggggcggtggcggtttatggatggtgcgggactgggagagtgtgggtgtgggcctgtggggtggtcgagtgggcttggctaccatttgggctttctgtgatgggccaaaatctgaaatgctgtattcgcatgtgtccggcccaaatctgatgttaggtaagggttatacattcatccaaaataaattaatctagaactgaatgtggtatatttattacgaatctgaaaatatgcatgtctagataatctatcatatgccaccgagtttaccttatttcaactgtttgctatcgactttatctccttttgtaaatatataccactgaccttgttgttttctacaataattttcaagaattgcctaaaatgctctttgagacatactacaggtgttgacaattgttcgatccactataatttaaaacaaatataaaaaattgtatttagccttagaagcttgtgtgtgagattttctttcatgctttttgaaaaaaaatgtgtagcatatgaaagagaaatcacatacatagaatatagccgcattagaaaaaaaattatagcatgtcaatgatgatgtacagcagtacagaaaagaacattaacacgagagtactatattaacaaacataaattacattttgtttaagttcatacatgtaaaatgaaaatcttgaaatatacacacacttctatattatgtagaaggctacataaaaaaattcatattttattgaaacttctagtaaatcaattaattgtaacatatattttcttgaaacttctagtagatcaattaattgtaacctcttataagccttgaaggtattattttgaaaagtattcaccccaataacatattatagaaaaaatgacaaagccagtgccatttataaagagagacaaagtcgatggcaaattgttaaaacggagtaaactcggtgtcatatagtggattctctcaaaatgttaactatcgctccctgtaccaataaaacttacaaaaacttagccaacagtatcgctgtaaaacaatcacaggacaacgttgtggagaaattagattgtatgaagattataatcataccaagtaaaatctctgatcaaagagcaggtagtacttagtaagccatgtcttgatatatatatatttaagtgtaactacacatccactcaaacaatgtgtatgaagcgagataggtacacgaggaaggaccgccagggtgaggtgtggcatggtgctccgggcacagccaacaccgggctaagccaacacgaggcttcgcgactcccgagccgaagaacggagagaaataatttcctctacaagcatcgtccgaccttgtggtaccacgcgcttgattgccaactcagttcggctccgatgtggaggctttagaccactggatagagtggaacattaggcttggccttattgatgttactacttatccatcaagaggatgtacggtttggaaccttatagcttgttggtctataatgttgttattggatttaactttttttaatgggataggacataaacaggaatggcgaaaagctgatagccatatatgaatgggttacagatgggatagtagagggatgagtaccatgaggaaagtgaaagacatgttaagtgttaacgatagatttgcacagaagaaagatagcttatgtcacgtctcaaatctaactttccagttgcattttattttcttttctgccacttcatgttatatgatgctatgaccaggacccatggtttctgtcgattataattaaaaaatgctattgtttaactaaggaggtgtttgacggtgctatattatccgtagcagctgcagttgccaccggaaaatcctcttttgctttttagcgtataaaattttgatttatacgtattactccctccatttcaggatataagatgttttgataaagtcaaactactacaagtttgactaagtttatagagaaaatagtacttcctccatctacatttgatagtcgtatttcatcttagcacacagaccaaggataagtaattttacttatcatccatttaaacatgctactagtcattcctcgtaaacaagcgattcattaatatttacatttctcaatgcccatgtagccaatcatgtgtgaaagaatggagagtcatgcgagaaagtcattaagatgatagtttgttgaattgaaatatgactatcaaaaataaatttttcagatttagaaatataactatcaaaagtagatggagggagtaatattttcgacccgagataaatttataaatattattttttttataaacttggttaaacttgaagcagcttaactttgaccaaaatcaaaacaacttataacctaaaacgaaggtagtatatacttatatttatatgtataaactttgtaactaaatatatacacatatgcttatatacacatctatacaaaattatacattatacatataaactttgtattcgtacatataaaattacacattctttagacatataaaaagtttatacatatacgcacaaactttatgcatatacaatttgtacgtatacgtatggaacgcgatgcgctgatcgtggattagcattttcgactaggtagctacatatagcattatcaaataccctcacaataataaatatctaattgtccttctaaagcaagtatttcctacgtatgttgaaaaaaaaacttatctttatatcttgggctactatgaaaaccgaactatctttcattagatacgcaaatatatattcatttgattatatgcattattatgaataagtgcgcgtagcgtataagcacatgcagttatactgtgttttaaaaatacacaatcatatttatagtcaggtaaacgtaaacgtaccatgtattcatttatgtaccgggcctgttcatctgcactatagcaggctacgacgcagtcacctcacacggtattttgtgtagcataattatgtgttggattgggatcaggtgcagtcccaactacaactgcacacgttagggactacacaggatcatgtccatttaaattttcaatggaaggttcagattaaatgctacagtagcattggtataataatttttgttggattatctaaatgaacagcgctctattaaatttgggcctttgaatttgcatcctgcggccatagtataactgtctaagttgcagtcatagtaataactgcataagaattaagggtctgttcactttgatgccaaaattttgacaggatttcttatatagttaccaaaatttgacagcaaactaaatgtagccacttttttttgtaactttaccaaaatttggtaaggttgtaaatgatatcaaagtgaaccggctccaaatccgtatgtgttgtagccgctttaacatgttgccgaacacggctgctgcaactttatagagatattatccttactaaataaaatacaccatcgatgtccgaagaagaaaggaaaaatcatattgaacgatcaaaccattgtcgccgtatgttggtacacggtattaaacgtgccaaaaccatcttccccctccccacagacgtcaaacgtggcgaaccacttgacaccaacgtgtgcacgtctgacttcttgcactccctatacgtcttgacccccccaccccccaaacgcccaacggatccttctggaacccactcgcgccgtcaaaccaccaccgcctccgtctccttctccgttcccgtctccgtctcccccagagagctctcgtcgcgcgcgcgcacttttctcctctccgactgcggggcccaccagtcagaagagaactctcctggcgcctctctctcccccaaccccaccggatacctgatccgggccgtccgttcgatcgatccgacggcggagacgttgtcctgggctcccacggcaggaattggatggttctagaactcacccgagtcccgaccaccccacccccaccaccacagccgcctctcatatatcaagcggccgcccacgcgcccctcgcatctttcgcgaaggcgattcaggcgagaagagagagagagagcgcgaggccggcggttctagaagcttccagacccttcggcgcgagcgagctcacctcccccgtaggtacggcccacccttctcttcccaggtcgcgccgcgagttggatccgcgccaccgcccgcccgtggatctgatcgtgtttcggcgatttgttcgttgcgtttttgattttattttatttttttctggggtctcagcctggggggatggtttgcgctgctcgggtttcagccgcggagggatgatgtttttcgttgttattttttttttcgcggtagctgcgcgggattttgactcgctagggttttagatcggtcgtggtgcttagagtaatctcaaatccttgaattgttacaaatttttatttttgcagctctgcagatcgagatttatgtgattttagtgttgatgtttaggtggttataggtttggatcctgctgtgagtaactcgtagatcctgatcctgattgattgtatttatgtgcgcaggagctgttcattagatctgaataagggggattgaagcagtgaggagaagatgagcgtggtgggctttgatctagggaatgagagctgcattgtggccgtcgcgcggcagcgcggcattgatgtggtcctcaacgaggagtcgaagcgggagactccggctattgtctgcttcggcgacaagcagcggttcatcgggacagcgggcgctgcttcctccacgatgaacccgaagaattctgtttctcagatcaagcggctcctcgggcgcaagtactctgatcctgagctccagcgtgatattgcggccttccccttccgtgtctcggaagggcctgatggatttcctcttgttcatgcccgttaccttggtgaagagcgggttttcactccgacgcagctcatggctatggtgctttctaatctgaagggtattgcagagagcaacctgaatactgctgttgttgactgctgcataggcattccggtgtacttcacagaccttcagcgcagagctgtgcttgatgctgccaccattgccggcctctgcccattgcggttgtttcatgagaccaccgcaacagcattggcatatggtatttacaagactgatcttccagagaatgatcaattaaatgttgcctttgtggatgttggacatgccagcatgcaagtctgcattgctggttacaagaagggacaactcaagatcttgtcgcatgcatatgaccggtcccttggtgggagggacttcgatgaagtcctgtttaagcactttgcagcgaaattcaaggatgagtacaagatagatgtttaccagaatgctcgtgcctgcattaggctccgtgtggcttgtgagaagctcaagaaggtgctgagtgctaaccctgagtcaccaatgcacattgaatgcttgatggatgagaaggatgtgagaggttttatcaagagggaagagtttgagaagattagtgcatcaatactggaacgtgttaaggggccactggagaaggctttagcagaagctggtttaacgacagagaatgtccattttgttgaagttgttggttcaggttctcgtgtcccggcaataattaagatactcacagatttctttgggaaagaaccaaggaggacaatgaatgcgagtgaatgtgttgccaggggatgtgcgctggagtgtgctatccttagtcccacttttaaagtgcgagagtttcaggtatgtgcccgctttcaccctgctgccttctctgctttggctatctgcacaatacattaatagaaatcttgctgcttcatgccttaaaatctctaattaaggattgtttaagacgctcatcctcatgtgcaccgtcattaaagtttaattggatagtccaataagatttgtctccttacatgactccattaagatcatgcaaccatcaccaatagttattcatagtgtcgtaattttcatgacaattttatccggtactccaatgaaactgtttccttaatatcatgcaacctctagttataaccaataggtttatgcagaatgttcgtcataattttcataacaacttagcgtgatacttaacatgactcaaatatcatgcaacctctattcatgagttttgtgaccaatatggcttattatgcagaatgttggtcataattttcgttgtaatttaatctcatactccaataagattgtttctaacatgacttcattaagatcgtgcgaactcgcttatgcagagtttgtcttgttggctccttgaatctgggtttacccaccaatttaattcttgcctaataacattgctggaatctataaagctttcagcatattcttactgtttaaggataacatatgcactgaaggcctgatttgaatgagtagtatttggttcaaaaatctatttcactcccttgaagtcttaaaattaaaacaaatcttagtatactactactcaaaatcattttaggataacactaacactaggatttttttctttcgtgagtttacaataaatcatcctagttcttgcttgtacaacactaaagtatgttttttccccagctataacgctaaaccctgtgcaggttaatgatggtttccctttctcaattgcaatgtcatggaaaccagactctcagaatggtgataaccaacagactgttgtattccccaagggtaacccattgcccagcgttaaagcattgaccttctataggtccaatacatttcaagtagatgtcacgtatgttgatactggtgatttgcaaatatcaccaaagatcagcacttacacggtaactgacttaatatttccttttttatgttctcgaatgtgcttcgagtccaactatcgtgtattgatcatgttcttttgttgtgtgtgtttatgttaatgtataggttggtcctttcaatcccggcaaaggtgacaaagcgaaactgaaagtgaaagtccgccttaacatccatggggtggtcacagttgaatcagcaacagtgagtgataatgcaggctgttttttttttgtagttcttttcctaaatgattttcgttgaaataaatctgagagtatttctattggtctggtgcagatgttggaggaggaggaagtggaagttccagtagcagctacaactgagcctccgaaagattctgccaagatggagacagatgatgcacctaatgaagctgcttctggaactgatgtaaacatgcaggaagccaaagcccctgcagatgctgctgccgannnnnnnnnnnnnnnnnnnnnnnattctgaggaaaaatcagtccctatggaaactgatgccaaggtaaattttcattactgacaaaatcttgaattatcatgctagcaggtgcctgaagccttttaatttgaaaccttttgctttttgaagtatcatcagtacaaggtggaagttgaggaaacagtattctggacatgttttttattcagagctaacatatcttgcctttgtagtttatatttatagataaccttttgaagcttacatgcgcaagctgatctgattagtccactgcactgttatgccttcgatttgacactttccttgcattgattttatcacgactttttccatgccaaccacaatgtgccagtgtgcaacaaattcgttgcaattgctgtttttgtggtagttatctatcattctattgctgaaactatacttgatacaaatatgatcattctttactggatccttcctactgtggttcaaaatttggttttatcttttcctcaattcctcagtctgtttcagtttgccctaaagggacaagtgaattgatgaaatgcgatgaaggaaaaagtaaactgtatcagatgaactaacagttggcacattttgatgaaaaaactgcaggttgagccatcaaagaagaaagtaaagaaaactaatgttccagttgctgagttggtttatggtgccttggggactacagagttgcagaaggctgtggaaaaagagtatgaaatggctcttcaggacagggtgatggaagagacaaaagataagaagaatgccgtggagtcttatgtttatgacatgcgaaacaaggtttgatcgattccactctttcctgacttcatctttagttagaggcagaaactgataatatgttatttttcagctgtatgacaagtacaatgattttgtgactgctgaagacaaggaagcattcattgctaagcttcaagaggttgaggattggttgtacgaagatggtgaggatgagaccaaaggagtgtatgttgctaagcttgaagaacttaaaaaggtttgtctctttcatttattttgctccttacatcttgttagtttgtatattaaaaaaaagctatgatttttggtcacaggtggggggtcccattgaggcaaggtacaaggaatggatggacagaggcccttccatcgaccaacttgcttactgtatcaacagtttcagagatgctgccttgtccaaagatccgaagtttgatcacattgagatggaggagaaacagaaggtattcaatgcatcaactacaaaattagcacaatatcttttctctatacactgattgcaatgctagttcacgaactacgttctgctagtgaatggtaacagaaataaaatccttttattagggttacaaagtaattgacatacgccctgcttggccctacattggattatagcaattttgaatgaattgtaaagcttgatttttcagaataattttagatagacttttcactcgtcttagttgatcccaccgatagacggtattaaattcatttgcttgtcacatgcaggtgattaaccagtgttccgaagcagaagtctggctgagagagaaaatacagcagcaagatgctctgccgaagcatgctaaccctgtcctactctcttctgatttaaagaaaaaggccgaaacggttgacaggtccgtagataaatctctcttgacgccacttgctgttcctgtatcctatgtttaagcatacttctaacgcccattctttttacaggttctgcaaaccgataatgatgaagccgaaaccagctcctaagccacagacgcccccacaaacgccaccgaccgagaccccggctggcggagcccaaacaccagagcagcaacctcagggagctgaagcggctggcgaggccagcgagggcggcgccagcgaatctaccggcgagcaaatggagacggacaaaccggagggaactgaagctgcctaggctgcagctgcggaaacgtttttcagtttcctgcaagttgctgctgctcggtctgcattcgttatcagattccgacaccgaagttcagtagaggttcgctagggatggatttgtgattcaccatacttcgtgaggatcatctgcgtgaacgtacgtttaggtttatatcctactgtaccaatgtgttgttaaaatcggctttccctttttaatttttctgccaaggggttttctttcaattcgagatataagggcacgtttcagatttggtgtcctacggggtgggtgttatagcgggacttacaatggaactcaaatttttaagtccgatgtatcaactgattcttgttccatgggatttgcacgctcttctggacttacttttgcatgtgttaatgtgctggcctgggtttaatggcctgctagtgtgcattcttttgctgctggccttggtcttgggtgttttaagttttaaccggtggctcgttgcttctgcttgcgctcatctggacgacattttctccattaggacagggtagaccgtagacctagagaaatcaagaggctggaagggcactaaacatcatcagttactgatcaaggtcaagttgcaactgtgatacaagggcccattggtgcaaagggagccttgtgtgctgtggctgctcgcatttgttgtacgaggctccagccggcccactagtcctgtcgtgcaaagcaagtatggatgaaaacggaaaggatagttttcgttcgttccgaagaaaacgaatacaaatacgggtatgatactggggtttccgacaatatagatttggaatcctgtgaacaatactattcgggtatccgttcaagcaatgagatatactcaatttcttaataaccctacgaccttcgatctacatctttttatatttaatagtagtctatctttcaacactagtccacactattaatattatttaaaattttattattttataaattatattatattttatataaaacaagctaattatatatgatgatatttatttctattataaattgaggtgattttcgtgttttcagaaaaaaatgtttccatattcgtgtttgattatattcgatctttatttgtattcgagataattcatatttgtttccgtatattacaaaataatatgaaaacagtattgcatgattatccgttagttttcattcctagttgcacggaagtattcgccaaatacttcagtgttaaattgtaacgaatgctagacaacctcatggcgaattacagcggggctaaaaattaatagacgctttaaatagttagagagtgtagcttaattaaccgatatgtagatagaaccctatcgaggatgtatatgtgcatattttcttggaataattaactattttttcttaggcatgttttgtatgtgttgggcgccgcgtgggtgtaaatgttattgagagagtgtgcgttgcacgagtcacatatcatatgagatacgttgaatatatatagagtaaagttctgtacatgtgttaagaaaaactgtacaaggtctaatcgatatggctgttttcttccccctattttactaacccacatatctcgtttttcgcgtgcacgtttttcaaactgaaacggtgtaatttattaaaaaactttctatatgaaaactgtttttttaaaagaatcatattaatctatttttttaaaaaataattaatacttaattaattatataacaatacgagcagttttacgtgccgggaggagggttcccaccccctcctccagaacacagcatataggcgcttggctcatgcgagcacccacgttttagctcctcattttttcgccccaaagctatagataaaattccttgtgatagaaaattttctcattcttttcctttcatatctcctaggaaacgagggggatgaacgagtgaagactatgttttggcacatcgtatgtgtttgccatcgtttccaaccgttcgtgcactgaagtggtgtgccgccagcccgccactctgttgggtctgaatttttgcacatccatgtagtagtgagcatcctctaaactctccttgtgtatcgacattaattgcactgtaaagtggaagactatatatctcctacacttgtcaacaactcgacatagggggtatatggagttgttggattatcctcgaaccggtagtctatctggggcccatactttggtttggattactagccaagcaaagcatttgtattttcttggtgcccacagcttccagataagcatgccaaagttggttcggaccaacccaaaaaactatgcattgtatgccgaggcaatttgtgtgtacggggcatggtagttgtgtatggggcatggtccgtgagtttccacgaggtctggtcttcctccccctactcagatgtttttatcaatgcaactatattagagcaggtacaatagcagactataagccagctgcaaacatattttaaggagataaatgaggagagagaagggcagcgggctacagatttgtagccagctgtagcacggactccaagacacagtgtgtgtatgacaggtgggaccaggtactaatagtgtagtatataactattgtatgaatgagctattagattggctatagatgaattggagctagtagttggctatactattgaacttgctcttagtactagtactcatcacaagaaatttaaatgcttgctttggaaaagatgactaggaggtaatcaatgagggcagcaatgtaatttgccatgtcttttactatctccgtccttaaataaataaaattagttcaatttagcccaaaaatgtgtccctaaaagaatgtgcagtggtccacagtccactagacttttttttaatactatgttttcttctcatttttagtcgttgaactaataatactcctctttcttctcataatctcattttctttctatatcttttaaccccttacttaataatccattcgttaaaaaaatataagggattttgaccggatgtgttacacatcctagtaatacgaatctagacagaacatatgtcacatcagattaaaatcccttatttttgagacgaagtgagtatgtctttgctagctaaaagcctaaaactacacttaaatgaaatgaagggagtaatacagtgtgagatttgttagaacgacatatgtaaattgtaatagagggaataatataaatgcattgcttatggttagaaatgaaaatagcagttacgtttcataaattattttgaagcaaggccatggcaccttggcacgatcgatctgagcaaggcttgagtatacatgtaaagagttgatttttagcattcaaaatctgtaaaaaaaaaagatccttttatctactggagtattggtctactgcacaaagtacaaaccaaagtagtattaaattaacgagcattatccattcaatacctctcaattaccttcctaaacaataacttttttttattaatagagacatttttctcttcatactaatttttcctataacggttataaatgattttttttgagtactccctctatcctataatataaggcgcggtcaaagttggcacggtctccaaaactaatatttagcttataatttctcgtatgctataaggtttgtagcaacaaaattataaccgtatgaaagtaattttaaatctcaatctaatgatataatttttaacaaataaaattcatttcatattatactaagcgttggtcaaatgttttaaatgttgaatcttgaaaatgcatgtgcgccttgtattatgggatagagggagtagtacactttcaagttttaacgtgtgtctacataaaactcagagcgacccctaacaatttgaggattatatatgtgtaaaatgttaaataagactttatctttagaaaatactaatcgcatatataatagatcaagcctaaatattttttttacaaaacattgggatgggtctctactacgcatgcaaccagtgtccctccataaaagctacgatcaaataatactcttttctttagatatatcctactatcaaacgaacaagaattgttcacaaccataacacttagagctatgtcaaagaagctcacctacctacacatcaattcagtttattcttatttttagggtcatgtatagtcgctgtcatcttacacgtgtatattacacgtgtatagagacagatcttgtaaaactacgtacacttctaattgcgatgcatttagtataacttaaaaatacacttatacagagaacacaactaaaaatgcgaattttgataccttatggtttgtgtgaaacccacaagcatgctttgcacacattttccacccacacaaataattaactccaaaaatgaaactctcaaagcataaattaaaccaagcatgcccaaattaaggtgcaagggcaagggcaaggtccctcctttttctcccctctttcccccaccaaaccagcagccatcaccgcatgcgttactacgtgtgtgcatggcctccctcaccatcaccaccagcagcagccagcccaacgtatactccactactactactactacgtcagttacactccaccaccgcgtccgcgtccgcgtctcgccgctcgccgcccgcgcgcgctcgcgtctctcgcctcgcatgccaagtgtgcgccgcccgccgcgccgcgccgcgccccctagcgcgcgcgcgcctcctcatgaccaacgtgaccccacccaccaccaacccccgcttccgcgtcactccgctcgcctccaaaaccacaccgcgccgcgctcgcgctctcgctctcctcctcgctctcgctctctcgatcgatcgaatcgattccgctctcccgaatcatcccctcctcctctcgatcccctctcctctcccctccccgccgcacgaaaccctagcaaccaccgcgcccgcgcaagccaagatgcctcttccccgccgcgccgccaccgtgaggatccgccgcggccagatccaccgcgtcaccgccatgccaccgccgccgcagcaagccccggagccggccgggctgcaactgctgctgcagccggaggtggtggcgccgaaccacccgccgcccgctccaccggcgccggcggcggtgcccgcgccgccgcagccgcagggggaggcgaggtaccgtaggccgctggtgcggctgcaggccgtccccaacgaggaccacgtccccgacaactacggcgacggccccgacgagctcgggatcacgccggcggtgtaccaggcgctggagcgccacctgccgccggatctcgccggcgcccccgccgaggtgaagcgctacttcatgcgcagcgtcctccgcaactacgtcccctcgccgtcgcagcggatcagggtaagtgtagctagtatacgcgcttttactatttaggcgtctcattaattaattcatttcatcaaatcaagcttcattaatttttgattctctagcagctatagtcataaatgcagtttaatttggcttcatgtacgtagtagtcagttttgcttatttacaactgttttaagtttaattaaccatgagtagtgtgtcttgctattgcatgcatatgatgagttggatatatagtgttagtgtaagtacatacgtagtgtgtgttgttaattaattaagatgaattaatcacgtcgtaacttatgtataatctggaaactcgtttgcagacgcagaatcagagggagtacagggaaaggatcttgtccgcataccaggtacgtattttcttaagcattcatttttttttaaaaaatgcactcttgcactataatcaaaatgtatacacgtattagataatatattatgaatatgtagataggaactcttttttttttgtacatgtaaaaatgctactccttaattacatgctatttgcctagctagctagctaagaaagtattattgcttgaaatgtgccatagacacatttgaattaaaaagtgtgagccacactatttgcacattttatatataggtgaacacacaaactcataggtatatcatttaccctataatatgtacacttacagattttttttttcttattggatattttcaagccattacatccggagctgtacacaaatgatccatcaactttcatcctaccggcatttcttcaagccataaatggcaacaccgaagaaagcatcacaagcataatgatggagccagcaccgggagtgtttgcatttcctatgctgaagccctcattctgccagatgttaatgtcagaggtatgtgattatattgcagcatggaatatcattttggatatatcatgtagtattattttgctgctaattgtggacactaattaattagctttgtaaacgtatatatataaggttaagcaatatcggtaatgctcgtgtggtgtttattctcgcaggtgaacaattttttgaggtgggcacaatcagcgaatcaaaggataatgagaccaacatccttagataggcatgggagaggtgctgccctctctgattttggcttgcaagagatgttagacaatctgatgaaggatttcatctcaccaatgtctacaggtcaattacttgtctcacaacttgattttcttgtaggataggaaagtagattaagattatgatattcatgtatcaaaattttcctttctttaaaatgaaacgattaatgacttaactccttgatcatgcagttcttttccctgaagttggcggcaatacactggactcccaccatacattcgttcttgagtatggtgaggctgatggtgctagaggtatgctataaacatgtaaccacgcatctatgaattaatgactagaactatatataattgtgctacataactcccttagttcattttacatttaagttttagaatatgtgttgccatactttgatcatcatatctacgctctacactatatatctagctagattgatgatataaaaactatatcaatagatttaaagtgtgaaataaccttaataatattttaaatttttaattagggagtaccctaaatatgtacttatagagatatatattacatgtcgacactcaaaccatttgtgtacatgacatattacacacacttttgatgcaagcgcatatatagctaggaagtaatgttttaccatcattttcacagtagctatgtactctctctgtttttattttttgaaaaaaccaactacttctgccacatccaagtactatggaaaaaaaaaaactagtgcagtactacgtgataaaaatacatcaataattaattctatatctgtgtctcctgtagctatcggaaactgtgccgcacacacgatcgaggacattttggtcttttgttgttagcactaaatttgcatcgggcttttggaaatcttttttttttctgggacatatataggggaagctatcaagctatgcatgtagaaattaaaattgctgtcctgaggtaacatattaacatgatcagctttttcttatatattctaaacaacaattgatggagattgcaggtttccatgtggatgatagtgaggtaacactaaatatctgccttggcaaacacttcactggcgctgacatgtacttccgtggtatacgttgtggaaatcatgttaattcaggaacacatgatgaggtactgattgatgtataatttgtaaattaaattaattatgcacccattttatttagatgcccattaattgccatggagcaatgcaagtttttagtaaataaaaaaactattttcttttagtgttaatgctgatcatatcatccaaacctttttattcctttgagcatttctcctttagccttaacttttctattgcttcaggggttgaaccccacaagtcatctacatcctcaccttccttgaacttagctttgtttctttttctaatccatcagtcaaacaataacatttgaatgagaggatgcatgcatggctatgaatatcgacaaaggtgttgactaaagcttgactgtattgacggccatgatgatccagtaatggttggctggaagacatttagagcgagtagaaatgtcaacactatcacaaatacagagatctctaacagctccatgaaaaagaaatccatttgagatggttctaactagatgtcaaatcactaaaaattaatctggaatgggtcgcccaatattgaacccgccacaaacgatctttaatatctcctaatttgcaaatcattacagatcagtgaataatgaatgcaaagaagaggttgttcggagctaatctttatgatctaatgcttaacctataacatgatcatgtaattcataatttcttgtgcggaatttggtatacgagaaaggcggtggctgtctcgcagaagagggatggatgagacagaatcacgagagagcgtgagggagggatgatgacagtgggcacgcatgctagggtttgggtttggggaaggagaggtcaaggagggagtaggaggtagcgggcaccaagtgcatgagaggtgacccaatcgagctatcgtttccagttgatacgacgaccaatagctgatgcgtgctcggaatcctgcctccgtgcatggggcaatgttgatagcgcaagaggcgagcacaccttctcaaaatgccatgtcagcactagcttggggaggggggggggtaatcttcaaagccattagaacctctgtgtagtcaattgcctcttttggttttgccattgaagtagaagcagtctctcgcaaatatggttgctagcttgatgaccatcgtcgctagtggcagtgataattaatcttgtaggtgtcaatgtccctccagggcatcacctacattgcttgaaatggctgtttgggtctcctccagtgctagtgaggatagggtttcattaggttttccgaaagtgggcttgccgtgtgagagattgtcgcttcacgcacagggccggtttcccccatttaaaaaggccttgcggggcttgagggcatattcacaaagaatgaaacttgactccgatcatggggcgtacgtaagggaagtgatcatacggctttggttattcatgcaagatcttgttagggaagtgcacataatcgtggggtgggccacttcccaaacgtgattctcgggttagccaagatcaaccaatagggaacatggttttccccttcgttcattggtttaagcaataaatggatttcggactttcttactattattattgttttttaaatggagagcattatactttactttatcttatcactaaaatagtagacaaacataataagaacatactgcatcccacattccaaattaacacatgcgtacgaatcaaccgatttctacaacacaaagacaattgttaaacactttgttctttgtctactggtgtatagtgggggccatataaaccgatgaacaaattagcaaaaaatgtacatagctagaattgtatagaaattctagctatgtgtgatatttatccctggctagaggattgaatgtctactatttaattcttttagcacttgtatagcagatttttatcagattaattaacacatggaatttggatgtctgaaaaatttctgtaaatctgaaagtaggtttttatttatctataagtaggaaatatttccgtaaatcttctgtaggaaaagtcatgttaaaagagatcatatctacatctaataggtttcaaaattgcattattctagtttgcagatgtgtttttgtgctcatttcctttaattttgttactgttaatgcatgattatgcaaattaacatttgacatcttatttttgcccttcaatacttatacgattcaggagtattttgtacatcccaacgtgcccggacaagtcctgctgcatcatggtagtcacaggcatggtgtcttctcagtaacatctggacggagggttaacatggtcatgtggtgcaaaaggtaacactcaatgtaatatttttacctatatttttcttgtatgtacagtatgttggctactttgtttaggtgaattaatcaatataggaattcatatagtagtatgtccatgtaaaatcatgtcccttagtttccaacacttctaataaaggtgagattccatgagaaataccagctttcttgtaaatttaattaacctgattgaattggctgttgttaatttctgggctgatctggaatcatacatgcatgaaaaaccctagtatcacctcaatttatcgatctgtagctgaagtagtgtttcttgtatatacagctcagtgttcagggagatgaagaaattcatgactgatttttctgggttttgttgcgagtgccagtttcagaggacggcaagacaggtgcaacatcttcaggaattgacggtttgttacttaacccaactccaatatatagaaaagtagaagcgatacatatatacatgaatattcagtaaattgcaagcatgcagatgccatttaatttctgccaactcccctgaagttggaaaaccaataatagcgagtacatgaaacatttaatcaggataaatattgataaacacactggaatcaatttaatcttatatactcgctttatttcagtatagccttgctaggatttttgtaacaccccacttaatttccattaatatattggccatcataagatagcatgatcttttacctttgcttctctattcaagttgcaaggcttaaatattttatttttcatatgaaactgttacattacagttagtacctatatatagctaaccagcttgactactaccattctgaaatcgtttatgatcacttgaaatatgcaggctcgtatctctatcagcggacaggagtcagaagacgaaactccttaattaatatctgtccgatcgagttggccggccaaccagttcctgaacaattatgaacagtgaacagtgaataattaagaacatgttgttatgtattgcatgctataccgaatttactagtgttttcaatgtatgtttgtatgaacctagctactggttcattgaaaacttgctgcaactgactcgattggagctcaggattaaacaacttagccggttagagcctatgcttggttaattttcaggttgtgtttggttaattttcaggttgttggtttgatttcttgggttatttttagtttatttggtgtatagtggagagcggctgttgagttgcttgttgctctagatctaaggagtagccacaggaggagaattcgatttgggtgaaaaagggtgagaatacccatattttacgaccgaaactaagtcaacaaccacttcaagattgacaagagagaactgttttgccgcgctattaaaaaatttgcccctccatgaaatgacatgatacctagattatgagtgataaaaggtgcaatcttccgatggcgcaaacaaacaagatgtaggtgtaaatttatgggattgttttgtcgttttattgatttgtgggatattgagaggtacatttataggatagttttgttgctttattggttactggatatatcaaggagttgcggttgccctaatttataagcgacaaaaaagattgaagcaatcttttaatggcatggacaagcgagatgacatgtagagtggatgaaattgctcgtatgctaacactgggtgctccttttttagcataacggtttcgcttacccatttaggcactagtcctttccctttttataagtcagtgatttagttaactacccacaccgtacgaacactgcccatgtacttgtgaatccacgtgctatttgacttaagcattattttcagctaggccttgagcgtacgggactaagtgcactatcttttttattaattattaatttgttttggagttattttgaatatcttctgaaatttgagtacaaattttatacctttcatgtgaaagttttgtgcagaaactctctctctctacacacacacaaatttcataaaaccctaaattttagggtacacgtgacataaaaccccatatattgtgatttgtttcaaattatcgcaggttttaggccaaaatgttttatttttacgtcaatactcatattccattattacatatatgatattttaagtatatatttacattggtaggataataaatttacacacgcttctctattcaagttggaaagctcaagtattttattttttgaatgttattacaggtagctatagctagtcagcttgagtaccattttgaaattgttgctcgtatatctataagtggatatataggacgaagctgctccttaaatcttaaataactgttggagccaaccggtccgtgttgctccgcgagcaccagtatgttatgaattctggacaatgagtaacatgtctttatgtattggatgctatgaaataccaaatttaattaccagcattttttatgtttgtttgtgtgaacctaggtatatattggtttaaaaccttctgcaaactgaggcgattgacagccaagaatgaataacctagacctgtgcttggttaatttttaggccgttggtttgatttcttgggttagttttagtttatttgatgcgtaaaccgaagcatctgtacatttaactagtagctaaggctgtgttttaaaaaatcatattgatctatttttgaaaaaaagtagctaatacttaattaattacgcactaatggactgctccgttttccatgcgcactgtgcatattgcaaacatatgattccaaagacaaccttaagtgcagaagctaagtaagcgaatgctgcaacccttccagcttgacgaggtatataacagttttgccacgatattgagaattttgcccctccaagaaattatatgggacctaatttatgagcgacaaaaagatctttcaataacaaacaataagaagtataatttataggatattttttatgctttaatgtttattagaaatatcgagtagttgcatgagtgacaaaaattaaatgatgcaatctttcgatggaacggacatacgatatgacttatatatacgattgagttgacacaattgaaagggttgaaatcagcgacataattgaagtgatgccaattgtacttttaaatatttaatcgtaataagataaaaaaaaaccccaaccatcttaaataagttaacctaatacaagatatgaaatatatgaatcagaacaaaaatacctataataagatttaccacattccgcactggagtaggtatttcatatgaaaatgcctataatatgatttaccacattccgcactggagtaagagtagtaggttgaggaatcaaatagtagataataaccgtggtgattacttttttttttctcatagggacccccgtgcaacacagcaggtaggagagtataccagaatatatcgtgcggatcattagacaagcccaacctcgtcatatcaccgcactacgtactacgcagccttcaataccacccatcagtaaaaagcaaatttcagaccaaacaataatcacacaggatatatgtcctaaaaattcaccagtccatgacttcatatataaaccattgtattacccaggaaaacagtgagcattcagtaacatcaacatccagtccaaagtctaaaccatctttagtgatggtaagattgatgcccagcaccagcaccatagccatggccggctccaaatgtcgctccaggtccaccgtacagcaccccagcacggcgcgtgcccatggagcttcccggtgcgaagtgcggccgagcacctggtgccggtccgacaaaaccggcacgatcggtgtaggggaaagagtgggaggccgggttccgaaaagatgacccgtagttcgagttcgagccccttgagtacttggagggagggaaggactgaggcccggatgctccccgagctcgcttgttgttctggaatctgttcatgccactcggcttcctcctgtcagccttctctttctccatccttgcgaccttcttccttatgccatcgaggttaaatgctgatgttagctggcatgtctcgacacacctgatgatggacttgtaggcgttgcactccgagttgtttgcctcttcctgagaaagaaaacatgagcccttctttagtatgagagtatactaatgtaggacagaacaaataacaaaagatttggtgcaagagacaaaatacggtagaagtccatgaaaagaaatgccaagtaaatccaacactagagatcaggctggactagagatatataggccaacagctctccaaaattctcaacagccttatactgggctgttatttgttaagaactcaggtaaaatacatttcgaataaactgttaagaactgaaggtagaccgggcagggtttcgcagaaagtggtatgcaggtactgctagcatgctaaacctgctaatattaagtcacaaactgacagaatcataggtggtttgacaacgatagtagtaatattaaatcacatatagaccataaaaaaggaactcctcgtgcaggtggaggcttcaagtagagaaaaaaaggacctgcctaaatgagtcatgcaaaaagatatgctaaacagtaatacataaggcctctgactaaatagaatcatgtgctaacatagtaacgaaaaatacctctgcctaaacagaatcatgcacaaaacagtaataagaagatatattgggatggaaatggaatggagagtcttaccacaacagaatttgaatgtcttccacctctcagtgcaacctgagtcttgttagttattctctttatataagacttaagaagcggtacaggtggaaatcgctcaagcaaaccagcctcatgggcgatatgaatagcttctatctcatttcctgactttatgaattcctcaataacatctgaaacacaaaaccatattagttttgtcatgttttattttctccaggttaaaataatgctaaccgtgatagatgaattgaaatgactaaaattagtaattaaattgtgcgaagttcaaaatcaactcaacaaaagattgatataattcaaagtaattgcagaaatcactttatcactggaaagtagatattggtcagtaaacaaagcatcaataaaaaatgcattcaaatgcagcccatcgataaaaatagcagaaatcagttgtgatggcttttagttcaagataagatcacggtatcaacagcgatagcagatatcgcttgtgaaacttcatcattcaaattgtagctctacatcaaacaaagccatgatgagttgatctcttcagtaacctaaatttcaagtccatactcttttagcagagactatggagccctatacttttggggagtttcctctgctggagaaggatagtagtgaatgaagatgaattttagatgaaaaagtagcctgttttaatgaatcagttgctagcacacaaaaagatatttcataactaatagattgagcagcggttcgtatactgcctgaaagggaatatttattatttgcgttatatcctgccataagaagaccaatagaaacaatacttgaaatggcaattcattacagagcaccaatgctaagacctttcgactcctaactaaagaggtagccactgaagtatcacaagaacaaatatctaaatagaaagaaattgatgcttaagttgccgatttgaagtaacagcccaaatatttctcaatctaggtattgactcaagattattataatcctcatatgcagtagtacttttaattcttattgatatagttcataacctgccctatgatctcgattcaacaaacctaggatatgttcttaaatcagttcaatgaaagcgaaagcaacagataaaagcaacacaccattacctctgaggctatcctcgaaaccaaggacgcaagcgattctggcaagttccctcctccgtccattatcaactaatagccgcctcaagaaatctacatcatacctatcttttagtccaaatgcagcaaccatctgcaggaatatctgcacctctgcctgtccacccttctctccctccttcacctctcttcccgacgccttcttatcttcctcgactttcctcttctctacttcccctgtcttcgccgcattggccaccttggcttccgcctctcctccttccttctctacttcctctgggtcctcttcttccttctctacctcctctgcatctgcctcttcctccgacgcgggcaccatttcctctgggtcctcctcttcctcctcttcttcctcatctacatgctcttctttcttctctgtcgctgttgcgttctccaccaaaggcgcttctgtcatctccacctcattgttatccggtgcatacaattccatcttgatcccaaatttctctgaccaattcttggcaactccggccgccctctcaaccagcgtatctcctatctccggcggcttccggccatcggaatcaaacaacgagcgcagcagtatgccgagcacccagaactggtcctcacctgcaccatcctccgcggccaagaagtcggcgagggcgtcgagcacgaggcggggcgggtcgaccgacgcggcgacggcggggccgacctccttccggacggcggcgagctcccgccgccgcgccgccatgaagcgccacagcgcgggggcgtccatgcggccgcacatccaccggagcgcgccgcggacgtcggcgggcgggggctccgcggacccggcctccgcgacggccgcggacagcgccgcctcggcctcggcgaggcgcgccgggacggcggcctcgcgggcctcgagcgccgcgagggactcggaggtggaggcgcccgcggcggctagggcgtcgtcgagcgacgcggagcgggcggcgaggtcctcgtcgagcgaggcgaagtgggcgagcgcgcgcgaccaggcgtcgtggcaggaggcgaggagctgctggtgggagtcgaggtgggcgaggaggcgccggacctcgccggcggcggcggcggaatcgccggtggcggccatggcggtgagagcaagcaggttgggtttggattggaatcggggcggctcagatgtgggtggagatggaggtgggctttctattgggttttaattgggccataatggacttgtgcaatatttaatgggctttctgttggatttttatttgggccttggtggtgagacggaccaaagcaggtttgggtttggactgaatcggggcggctcagatgtgggtggagacgaaggtcttgtaataagttcactttgggtccctctatttgtcgaccattgaccacaaaaccgggtatgacccgtcccccaacttacgaaaaccagacaaacgaggtccataggcggttttgatagtggttttggctgacatggtgcctacgtggcttgtttgactaggtctccatcacatgtggcactgatgtggagcttacgtgacaaatatatctacgaaaaataataaaaagcgtggccccatatgttcgctgcacacaaaaaaaaaatttaaaatggtggggcccacacgggccccatgtcagcctcactcctctctcctttcctttcccctctctccttcctggacagcggacggcgcgggtgggcggcgcagcaggcgagctccggcagcggcggcgggcatggtcggcgccgccccccgacaggagcgccgcgtacagcgcggcgtaggcgagcagccacgcggagttggagaagttgaggcacgctgcacggccgcggagagcgggcatggcggcgtcgtgcgcgcgcgtgacggtgtcggcgccgtcgaactgccgagccagagcctgcagccgcggcgccccagcacgcggacctcgcacacccaccgccccgcgcacatctatcgcgctcgccggcgaccgctcgagcaggccagaggggcggcgaagcgggggtgagcggacatcgtcgcggccgtcgaccttgccgggtggtagaggagcggccgtcgacctttcacatttttttggtaagtcagacaacgaagaactagaaatgaacaaaagggatttcatagctatgctgaaccttgacccacttaggaaattcataatcaactaaaattttccttttcttttccacttcaatgttgcaaatcatcaataagaatcaaaatcatagacagtatattcctccctttattactagttacgagtagtagtacaatcgctcagcggcgacatgagggataaccaaagcggttggcttcaacagcgccggacgaaatcggtcacgacggcgagctccttgacggcattgtcgcagttagggatgaaaacggatcaaatacggtcggaaactaattatatcatattcgttttcattttttttttcggaatcgaaatcggatacggatacccggatatgaaaacggaatcgaatattatcgaatacaaatatggagcaaatacgaaacgaaacgaatacggtgacgaatattaatcagaatataaagacccctcaaactaagcatcacaaatcaacgaagaaatataactcattattttttctaataggacatatcaatattttcaaaatttagcaattaataataaacaactacaaacttgcacacactgatattatgaaataccatccatcatcatgtgaagtgaaaaggcaaagcactactaggcatgccagatactgtcaaccaatctttttagtctaaactctgaagtctgaaccacagttttttttcaactgaaaacacatgtaaaattcatagagcatggtaaagccacagctgcagcctgcagaacaaactaccgcaaggcacaagcctatttatgatataatcacacatgaatacacaatcattaacacaaacggcggcgacgttggcttggcccggcggcggcgtcgccttgcccctgcggcggcgatgtggcaagccagagggctcggcaggcgaggaggcgatggggcgccgcggcggcggcgttggcttggcccggcggcggtgatgtggcgcgtgacggcgcgaggaggcgatggggcgcggcagagccggcgttggttgctccgacggcggcgatgtggcgactgggcgaggaggcgattggtcccgacggcggcggcggcttggccccgcagcgaggaggcgacgacggcttggccccgcggcggcgccgacagggcacgccggcggcggcgccggccgatgaggaggtgaggagtgcgcctgtgggactctgtctgggactggacagtgggagactgggagtggactggatctgaatggatggagaattggagacttctagggtttcttgtaagtcagatatccggtgaaaaaaaccggatagtttccgactattatctgattccgacggatatcacctatatcatattcatttttgtatctgcaaaaaaatatctgtatttgtttccgtatccgaaaattttcgaatatatccaaccgaaacaatctgtatccgaaaaatggtccggtcggtcggaaattatccgaatcactttcaaccctagtagcagttgggcttgggcaagaagaagatttcaaccctagtagcagttgggcttgggcaagaagaagacatggccctcgccctcggtctcgtggaactccagctcgccgtcccactcgcacttcttgatcccctccgcgtacgagcgtgccctctccacgaaccagtagtgatccgccgtggtgaccaggacgcggctggccctgagctgcctccactcctccggcacgccaacgagttgacgcacgggcggtcgaggccgagcttgccggcgctggcgaactcccacgtgccgtggaacgagccgcggtagccggcgtcggtggactcgccgcccaggggtccttcccctagaagtagaggtccacatgggcccaccatttattattatgtgtgtgcaactgacacgtgggtcccatgggttatattattttttgcggttctaattgctacataagcgccacgtcaatgacacgttggacaaagacctagtcaaaatgagccacgtaggtgccacctagggataaaaccggagcggatagtttccgtccgctccggataaaaacgaatacggatacctctcggatcggataattctcggatagttcggatacggatacgaatacggatattttctctcggatacgaatacgaatatggtatcaggtcggatacggataataattcggatatccggtgaacagtgctattcggatatccgcagaagccaccagacataccccatttctttataactctatgaccttcaatatacctttttagattttaataatagttcatctcttaacactagtccacattattaatattatttaaaattttaaaaatatttataaattatactatattttatataaaatgatctaattatatatgttgatatttgtttctattagaagttgaattggttttcgtattccgagaaaaatttgttttcgtattcgtgtccgatcatattcgattcttattcgtattcgagatagtccgtatttgtttccgtattcgagctatccgtatttgtttccgtatccggcaaaaaatatgaaaacgaatatggtatgagcattatccgtccgtatccgctccgttttcatccctagtgccacctcagccaaaaccaccgagggacctcgtttacctggttttcataagttgggggacctgttgtacccgattttgcgagcaagggatgaaaatcggactgggcaacaaatagaggaacccaaagagggacccaaagtgaacttatttcggaggtctttgactccctcaactatgatccgagtatgattcatggcctccaaccacaaaactgtgtatattgactcctccaactatcaaaaccgatgcaaactatatccttgggtggttttgaaagcggttttagctgacgtggcacccacgtggcagtgttgacccagtcttcgtctcgcgtgtcgtcgacgtgtcgcttatctacatgtaataaaaaaacttgtgggaccgacatgtcattcacacaaaaataaaatagtgggacccacggacatgtgggcccacatgtcatcctcacctctcccccctctctctctttcatcttttccactcctctcaccttccaatagtagaagcggggcggcggcgacggcgacgacgcacgggggaggagctcgccggccgtccacactcgggggaggagcccgccggccgtccgcgcgcgggggtggagctcgccggccgtctgcgcgccgggggaggagctcgcctgccgtccgcgcgcgggggtggagctcgcctgccgtccgcgcgccggcgtccgcgcgcgggggtggagctcgccggccgtccgcgcgccgggggaggagctcgccggcgtccgcgcgcgggggtggagctcgccggccgttcgccttcagggggaggaccggaaggagctagccgtgctttaatttgggcatacgtacatatcgatccatcgatgcaaatgcatgcttgcatatgctttcactgttctggatatggtttcagataagctaagtagctcgtccggccgtccacgcgccgcgcgccggggaggagcttgtgcttcgtgcttcggccggctgatggaaggtgagagaggaaaaaatgagggagggggggattgaaaatgtggggcccacatgtgggtggtttttttttaatgtgcgaatgacacgtcggtcccacaattttttttactctgatgccatataagcgacacgtcgacgatacgagggacgaagaccgggtcaacaccgccacgtgggcgccatgtcagccaaaaccgcttctaaaaccacctagggagggatatagtttgcacggttttgatagttggatgagtcgatatacccggttttgtggttggaggtcatgaatcatactcgggtcatagttgaggggggtcaaagtatactttttccttcctatttggattgtccgaattcttcatgttgggctggtgggcacaaaacgaactctacatgggctgcacaagcgctctcatagcacttaaggccttgttcggttccttaggatttaatccccaagtggaatatatccagggagggattgagtgaatccctcccatatgtcactcgactcaatccctatgggggttggaatcccttgctctctcctattccctcttttaaaccccatgttcgttttagccagagattttagctatcaaaatatgataaatctcatggctgctccttcgagcagacctgcttttgttctatcagccgactgtaatcagaccagaattacgtcaaagttttcatttgcaatggctgtaacgagcagctaatatgagcagcgatgcttcaaagcttgtcaggacagtattgcagattagaagcacaggaaaaacaatgatgggtacaaagaaaaaaaatgatgtcgacagtatcaaatatcacacatttcactgtgtgggagcactcagtttaaacacattttttgtaactcagatacatcacaaactaaacaggtttatgagtggaatgagctgagcagcaggagacactataatgatgccctgactttcgtcatgctgtctgaagcaataaatcttcaggaacttcagaaaattactaccatcaaataaattatctggaatttccctaccagtcgatttcatggaacctacaaagcataatgagtaaacattagctttcctatctcacaaacagataaaaggaaacaaaacttgagatgattgaattttcagaagatgcagaaatcatgtataacaaatatatatggccaatgcagaaatcatgtttatcttgacttgtctgcattttcagaagatgcagagatcatatatacaacttatatagatatacaataaaataataattgtcaatgcacggctacatgctttttttgactttgtattgcagtacagagaaatggagactgctatgttatctagcagctacaggcaaaaggtcaaaaagggaaagcaacatgtatactgtactaattagtaatttactatagataagaatggtcaacatttatgaagaacacacttcagtaattaaattcaaatgaaaagtaaacagtggtaactatggctgaggaacaatctttgcggatggcatgtaaaaactaggatttgcatcagtgtaggatacatataagtgattttagggtatctagagaagaaaaagaacttggtgacaactcaaagttatgcacaagacacgaactaggatcatcgtcaacttttggcattcttaaacatgttggacatgacatgaaatagaatctgtttcaataactagaatatgcttcaacaattttggccgttcctgtatcaaagtgcaatagaagataccaagaagacctagtttactcaaatacagaaaactgaattgctggctccctaaaatttgccttgttgttttttttttgggaatttcagttatgttcattttggccatgagttgcagctaaacttatcattggcacaaaagacttgaacatgagttctcaaaaaatctataaccataaaacatacatatctatcatacagtaccaatcttggtaatcaggtagaactagttcttggtgaatcaaagacaaggaaaaaaggaaaatctctgcactgcaagtctgcaactatatctacatgactctgaatttcttcagattttgcaatcttgagaagaatcaagttcgaatcctgcaactttggaaagtaaaagaaagaagaaactcttctgtactgcacctgcaactagatgactctgaattccttcagatttcgcaaacctgcaactgcaactacatgactcagattccgacgtggagggtgccgacactttgaaggctacgggccaagaaccaagaaccctctcctcctccttctcctcctctcctctcctctctggcgtccaagaaccctcccgtgtcccggcaatgccaccgccggagccgaacaaggacaaagcgctgccgaagccgaagccacccaagcccaagccccaagccagagccgaagctgaacacgcggtcggcattggcgccggagcacgaccagacggccggcccctacggcacggtgcgtgcgacgacgggaaagccggaaagggagaagagaaggaaaccctaccctaactttgaaagaggaggggagagggggaagggaagcgtgctcactggagagaaggtggcggccggagaagagagctatgccgtcgccgtcgccgtagccgtcgcctctgggtcgcgccgcgctccgcccccgccgtcgcgtccgtgtcttcgtagcgccgccgctcctctcgaggaatttttccgctcctctcgagtaggtgattttttcctgggcctacagaacagggaaatcccgtggtgggctgggctaaaatccatgctagggattaaccgaaggaataagtccactgtgactcccttaaaagtaacatgaatctaatccgtaaccctcaaccgcaaaaccggatagaacgactccccaaactattgaaaccggtgcaatttgactcccttaacgattttggacggtggtttcgctacgtggtgcttacgtgacggtgttgatctagtctggtcttgatgtggcgcttaggtgacatttaattaaaaacatatttgtgggatccatttgtcattaaaaaaagtggagtccactgacatgtcatcctctctctttcttcttcctccctccctttctcccttctctctttctctccccttccaccgtccgcgggagcacggctggagcggcggcggggcgggggccgaagtactggcggccggcgggagctgaagcggcggcgggttggagctaacgcgggtggaggcggaacaaaaggaggcggcgacaggaggggcttgagtggcggcgacggtggaaaccgccccacgccacagacctccaacgaggcggctgcggctgcagctgcctctgactagcgcgctggattattcctagcctccgtcagctccagcccacttccgccgcccgccgctccagctagctcccgtgtcagctcccgccggccgtcaccactcgggctcctgacgacggggaggagcctcgacaacgggaacaggtcagcgacgccgaacctagtcgccttcttctgcgcctcacccagtgtctccaggaactcctcacgccaccggaagccgcactcccccatgatggcgcgcagcgtcaagtcggttagcgtcccggtgatctgcctgctcacgttcagtgccggcagcggcggtgatggcgccaaggagcgcacccgccaaagagtatccccactgtggtgccgatggagtccctcactgtacgcccagccatagaggtcaaagcccccgggccaggcgccaggaggaggccgagctccatgaggcgggcctatgtaggcctaacaggtgtcaccggacaccgggtaattttttgtgtcaagttatagtatataggtatatacagcatgggacacccaaaaaaaaattggattggaccccggcctgtccagataacttactaaagcccaactaaagaaacaatccatcaaagctcacgttagcccaactagagcccaactattcgtgggaaggtgaaacgacgccgtgtatctcgagactgaattaactgcgtctccggctctccgctccttttcctcgtcagtcgtcggtactcttcgagactcgagacactgaggggctgtttggttcccagccacactttaccattacttgccaacaaaagttcccacatcttgtctaaggtgaggtgatcaaattgttagccacaacttactaagcctaagggaatcttgccacacttttttgagccattgacacgtgggacccaatttgttggaggagaatcttgccacaactgtggctacaaccaaacacctgtcaaatttgcctaaccttaggcgtggcaaactgtggcaaagtgtggcttgcaaccaaacacaccctgaatcgctgctcttgctcgatccttcttttcgctcaatcgctgctctactcagatcaagatcaagatcaagcaccgcgcccgcgcggccgacgacacgctgcgtgtaggccacggcgagcggcaacagcatgcattcgcgtacgctcgacttccagtcttccaccagttgcaacttgcaaggtttgttttctaccattagtccagaattcagattattggattaggacattagttcattcaatattctttagtgctgtcagagtaggagcatcaaaacattttaatttattcaatcattttttagttgtccacattctgtatcgctgcttactgattggtgcttgcactagaataactggttggcagtgagctaagtggttagctaactgattgacatgggaatttatggaaaagtattacaagagaaaatctccatcacatggagaagatgttgccccatcgcagccatcacacagacataatgctgctacatttaatagaagagatgttcctgaagatatcaattgggaagtggagattcaatttgatcctggcaaaaggaaaagaattgaggattatcatcccaatcaaaaggagatggtaagaagaaaatacttggacaatgggccttgtcaacctcgtccggatgatctccctgttacaaatattggtggtagagatagaaaatttaatcctgaatggtatgatgagtttggcagttggcttgagtatagtgagtccaaagataaagtttattgcttttattgctttttgttcagagaccctaataagaaatcagcagggtatgatgcatttgttacaagtgggtggtctagttggaacaaaaaacacagattgaaggaacatgttggtgatattgatagtgttcataaccaagcaatgagggattgtgatgctttactgaaaaaagagcagcacattgatgtttctttgaacaaccaaagtaatgctgagaaaattgcttattatactcggttaaatggctcaattgatgttactagaatcttactgaagctaggtatgccttttcggggccatgatgagagtgaggagtctctcaataaaggaaatttcaaggaatttcatgcttataccgcagagcaaaatccagctttacacaaggttgcaggtaaaaatgctcctggtaacagtcagtatacatcttcaaagattcaaaatgacatcatacgttgctttgcaaaagaggtactgcgttatattcttgaagaagttgggaatgatgttttctgcttgctggttgatgagtcaagggatgtgtcttacaaggaacaaatggcagtggtcttgcgttatgttggtaaatgtgg

SEQ ID NO: 4816 - DNA, 17563 bp, Oryza sativa
  unsure (1)..(17563): unsure at all n locations
cgccgcctccgcccgcatctcacgccgccgccgacctcgcccatccccgccgctgcagccgccgccgacctcgaccctccccaccgccgctgcaacctccccttccgccgccttcgcccgcatctcgcgccgccgttgacctcgcccctccccgcggcagccgccgccgacctcgccttccgccgccgcaaccgccgccgacctcggccctccccgccgccgctgcaacctcgccttccgccgcctccgcccgcatctcgcgccgccgccgacctcgctcatccccgccttccgccgctgcagccgccgccgccgacctcgccttccgtcgccgcgctctcgcctcttgacctgtggctgtcgctgatgcgcggtgaagcgacccgacctcgggcgctcgccctgctcgcccggccgctcgggcggttgcatccggcatctgcgaggtatattcctctttgggccgcccaatcccacttccgcccaccaaccaaacaggcaaaaaaaaaatgggccgccatctcccgttcacccaaaacctcccaaccaaacacaccccttactactccctccgtccaaaaaaaaattcattcctagcatcctgaggtggaattagtagagagtaagaatgactaaaaaaacccttaattattgaaaaaaatagtaagagtgatagataggtaaagggtattaaagggataaaacttctcgttttgcgtgttgagagtaggtagaatggtagaagtctgttttcagtttccacggcatgcggtcaggtccagcgtttcccaaaccgcagaggacggggttaccgcgccccggcgataagcacggttactgcgcggtaatcgtgaaaaccgtatgaaaccgtgtaaaatttatcaaaaatttgaattattttttaaatttatatgaatttaaggaggttaccgcggtttttctattactgtacctcgcggtaaggccggtaaccacagtaaccgtgcggttgtacctcgcggtaagatcggtaaccgcggtaaccgtgcggtgcggttatgaacggtaagttgaaccctggtcaggtcccatttattcctggtcataaaatggtgcaggcgtattgattggtggggcatcgtgtggattggctgcctgatcagtgactgacactgatggacatcactgtaccattttgccctccaacattagtaaggcccgttccctaaaatgttttccaaaaaatcagatcaaatcgttggatacgtgcatggagcattaaatatagataaaaataaaaactaattgcacagttaggaggaaaatcgcgagacgaatcttttgagactaattagttcatgattagccaaaaagtgctatagtaacccacatgtgttaatgatagattaattaggctcaaaagattcatctcgcggtttcctgatgagttataaaattagttatttttattcgtgcccgaaaactctttccgatatccggttaaacgtccgatgtgacatccaaaaattttcttttagccaactaaacaaggcctattcgttgttaacttgttattccctatgggcctcatttaccttctataaaaatgcaagaagaagtgaagagcagtgaccacctatcctacagtttcaccatggctctcctcattttcgtagcatcgcagcaagttcaaatcagatcgaatctttggatacgttctgccacgacggacaccatctcagctggccaaacgttggccaacgatgacaagcttgtctcaaaaaatgcaaggtacgcactcggcttcttcaacacaggtacaaaagcgtctggaaaaactaacaagtggtactaaagctgtgtttagttccaaagtttggatccaaagtttggatccaaactttagtcctttttcatcatatcaacctgtcatacacacacaacttttcagtcacatcatcttcaatttcaaccaaaatccaaacttcgcgctgaactaaacacagcctaaggaatatggttcaatcaggttgccaaaaaacttctgcatgggttgcaaatagggataagccgattgatgatcccgcatcattggagctaacaatcttccgtaatggaaatcttgccatcttaaaccgctcaaccagtgccgtcctttggactacccaagctaacatcaccacaaacaacaccattgttatgctcttaaatagtggaaatctcatcctaacaaacccctcaagctctttagaagtttttttggaagagctttaactaccccacagatacatttttccctggggcaaagcttggatggaacaagatcactggcctaaaccatcgtattatttttaagaaaaacttagtagacccagctatcggtatgtatcgtgaagagttagaccctactagtgttaatcaggccttgcttgcaccggtgaactccacgccatattgatctagtggagcatggaatggcgagtatttatcctnnnnnnnnnnnnnnnnnnnnnnnnnnnnnnnntaaatatggccatcatcccaataagagtccaaaattatatatcaatagtatcaaaataaaaatcccatatactttttagattaaaaaaatctaacaataattgattaaaatagcctttacctgaacatgcatttttagttaatgagtaataataataataataaataaataaattgttgaactagagaagaaaaataaggaggaggtcggttcacgctgcacctggtccacgaaggaagacctttttgcgtgtcttttgttgggagcagagggtagcacatctaaccgtccagccccagcaacggcgcgatccgcgtctccgactcagtcagatctccgtccgtccgtctgtgtctcttggccgagaccgagagagggttttccccgttctcccaccagtccattgccgctggtggcaatcttcttcttgttgaccaaaccctagctagcagcagcaaccatggcaaaccctaggcctccctatgtgttgctggagagagtagtgtttttcggaggacgcgagttacccgacggcacatggaaagatgccgcaggcatagtcatcggatggagcagagcgcggctgctgagtcggcgagaggcgatggaggcgatggaaccccatcccttcctcgccgatcctccgcaagtgagctccctgcggatgatgtcgccgacgcccgcgcacgcgcagcagctgggatccatccgcgacggcgacatcgccagcacccacaagggcatcgtcgtcatctacgccggcttctaccgaccaggctgctccgatgacctcgggggatgctacctcctctacgacgcccccaccaacgccctcaccgccatccccccgctgcccgactcgcctcgcttccccaccttgctacacctcggccgcaccgccgtcctcgtcgacgcctcccgctctgccgatgattacatcctcgccgatatcgtcaccaactccggcctgggcctccccgaagccaccatcttcgcatggtcatcgctgaccatgaagaagagcggcggcgagtgggtcaagtcctccattccccgcctccctctccctgcacatctatgtggtccaaaacacttgttccagatcgacctcgccttctccctggacagcggccgcatctgctgggttgatctcctacagggcatcttgttctgcgaccgcatcttggcaccggatggccccaagttggggttcattccgttgcccactgggtattgcatcgatgtccatcacaggctccgccatcagatgatgccactagcccggcgttccatggcctgcgtctctggcgccgtcaagtttgtcgccttggttggcttggaagatattcattgcccccccaatgaggtgatgctcaagacatgggttctgtcccctgatttcaaggagtggaaggaggatagcaggtccttatctgtggaagagatgtgggcaagtgagagcttcaagcaaatggggttgccatgtgttgtaccagtttcccctgtcctcagcctgacccaagatggggtaatgtataccattctgaatgtcatcgagcaggtacctgcacaagttgatgaatttgggatcgtcgttgtcgatgatgacctggtgcccattgccaattatatgatccgcttcgacattcggcgaaacaaggtcctgtcctccacaaagatatctcaacatggtgaattgcagtggcttatacccaatctcattgccactgacttcactgcatacctacaggaccaccaggtacttagtttacttgctactgcatgctacttaccctcagcgccacccagtgtacttctagcttcatatcctaactgttttactgttctatacttgtttgttttagacgtaagtgatatgtggacgcttatatttgtcacatcaagttagtttcacttgcacaactaattaaaaaatattgacatcttaatttggccagccatttatgttgaggtattgaacacagtttagtgtgtcatatgtgtgccagcttccctcttccggtcttctcatcaggaaccaatgagcagtacaaggctcatgttgaactttgctagtagtaattttcaaattaagaatcggtatcagcctaagtctattcaatgatttagtagagtgtgcactatgcagaggctcaaatttaaactgaaattttaaaaaaatcagcaacttccgtagcattttgttgttatgtcgacaaaaagtacaatacccttattaattctcacatttgcatttatggcttactgttttgccacaatacttattttaatcgattttttcttactttatagccatacgctatgatgctttcaatgtactattcctatatgggacaagcttaagatatccagtttgcggaatgcttgctaagtttcacttcttcaatacaaacctgagtgaattgtctaattaattacttaattaatgattgtagaggttttgaaatcaatttccgaatgatttgttgacacatggttgatgttgtgttctctttagtgtagaattttttcatagttggtttcacttatccaatacaaacttccttctcttgtcttaaccactgaaaattacctggctcatgttgaactttgatagtagtaattttcaaattaagaattggtatgagctaagtttattcgaagaggcacaaatttatgcagagcctaagcttgggtattagtttgagagtctttttctccaatataaacctgagtgaattatattgcctaatgaatgaatatagggagttcttgaaaacaattaccgaatacattattggtacaagcctaagttgattctaaaagatgcagcatgctgaagtgcaacgtgaatcttaactgatgctggcaacagtagcaacctttgtacatttacctttaactacattgatgccatggccactaacctcattagctacatgccttgaagtactgctgagtgcacactttccctctttttaaatgttcaaagtttattgttcaagcttaatttggggcatatacaacaacgggatcagatttaaaccatactgttttgacagtcatctttatttttgttttggtagagagctgaagaagcaggcaaggtaggagcaagcgccaaggggaagcgcaagcagatggagtactactgaatgatatgtagtatatttctgctatttatcatgcacataacatatcgctttttttagcttacatcctgtgactgtgagatgtaaggtcaaatgtgtttaggttaaccatcagagcttattttgtcactaccagaccttattttaatgactaagcctagcagttaaactgaatggtaaccagtatgtatgtgtaatcatcgtggatttatgtcatactactaatagtgttgggctcttcaaatccaacattgtaccaactcctgagttgaagtttgtgcttgatttcatcatgctttcttggccttaggtttaggggccggtggtgggaacacggccctgaagacccaggcagcaagaacagcaccaacaaaagggcatatccagtagacgtagaattgctcccatgtgttgtggcgattgttcacatatgcccagccaaacgcctatggaaatgtagataatatttaaccaagattagttaccagaaaacaaggaacagtagccaaaaggggcaaatgagaagagccgcaacttacatcagatcttactgaatgtataaatggaatacagtagcatgaattcaaattacaggaacagtttgcgatgcattctaaactctgcaaagatgtcgatttcagaggtatacaaggaatttccactaaattacctaattgaagtggacaggagtgaccaaatagaaattaactgagttaccctctgcagaatataagtataaccaggcactgtttttccatagtttttccccataaacaacaagctaggttttgaaataatgagatcactggcaagggttttatgcttatcgtgtacactccaaccaaaactgtggacgtccaataataatactggctccttcctgatgaaggagatttaaggaaatagtggaactttatgaaaattacacctatttagttgcttcatttgacctgttgcttagtactttgaaacaagggcaaagaaaacataaataaaaagagcttagcctggcagcatgtttggtaaagcaccataaatagatgaacatgtaaaaggggatgggtaatgcatgatcaacatttttattgctcaggttttcagcccaaatgacttgggactccgtttcctactcatcaacaagctaccaaactatcgcgggtgctcctgaattaatcctagctccatgttgtcttgaaaaaccaattgcatagaactagtaagcatcatgccgaattaatcctagctccatgttgtcttgaaaaaccaattgcatagtagtagcatcttatcttgggcatttaactgtttgccactggagtttaattatttatcacttatatctcaatgacgcgtggacctttatacgtataagatatgtagatccaagtgacaaatagttaattgccacatgcaggagtggtaaacagctaaatatcttatcttaccaaacaaaattaaatatcttatccagtgacccagtgatctaaagaaataaacaatacaacagaaaaaaaaaactttttgagaaatcatattattttgaaacgtgaagccaataataatccacgacaaatcatctagctggtgactgagatgatctctgctacaaaggcaacctccatgtcggctccaggagattcagatgccacggacaaatgcatctgccatgcttgggaccgggactaattcagcctgtcaatcaatttggtcccggagaagcaaatgatcaagcttaagctggctaaatgctctcagatcagagctgtatctatggctatcaatgaagctcttcgactggtccagcttttcagaactgttcagacataacagatttagctttcactatttggattagatttcattcagaaaggtagtgattgggttatctgcacttgatctctgaacaatgcataatcagaactggaatctacagcgcgaaaaggccagtagcctagtggttacaagagtctaagtagtatcttaggtcctaagttcaactccctatgagagcgaattttccagaatttaacggctttgtgctttcagtggtaggcgatgtacccgtcgacagcgaggcgccacaaattcgtcaatctccaggatttgccaacctagtcttcgaagatgggcgccacgacttcgtcaatctccaagatttgccggcccagtcttcaaagatgcgggttgggtttacgtgcgtgcatttataggggtgagtgtgtgtgcgttgtgagtgtaactcgtttgcatctaaattagcagaaactttaagcggtggtaaaagggttgaagaataattccagttcagctgtcacatgagtatgctaaaaatcctctaaaaaaaagagtatgctaaaaatgaatagataacttttatttttttaaaaaaaacaaacaaacaaagaacagagtacatgcaagtgtggttcagctcatcagtcaaagaacttatttgttatgtgtgtagttgttcaggagattgctgattcgttcaacaaaaaagtgctcatctctgaagactagattataactgatcaaatcaagtctacatgccgctgccaaatgattgagaattaacgtgcagagagaggccacttgcctgcttgcccacgagtaagcaaagccagcaagtttaaggtatccaaagcagcattagcagcagcagatgatgatgatgatgattcagagatccattgattacagccttctcacatgatcacatgagagaagctagatcacaacctgtgagcacacacttccagcagcacgccttcagaaacattacttaaatgctaatccaaattgcatcctcctcgctggtttgacgacacttcgtcaggattagccggccaaacgccaagattctcaaacctccattaaattagggccttcatacagaacgaccggattggagctttttggaacataagttgaatatatgatatggtatggtatctttacccaagacaagctagcatcgtggatgaaaacataatttgcagattttaaaaaccgcacgaatctttccacttttttttttcacgaaactcttacatataacttccagaaaagaaaatgaaatttgttaaatatgctttgtatttcaatccgtgcctctacttgctagatcaagctagcaactgatcatattggtgcattagttagttgatgaagaaaaaaatatacatagaaaaaagtagcagatagttggaaatgacatggatacttggatccaaagggtatcatgggtggcaccaccacaactctgatgcaaaacaatcaaaagtctaataacagaaagtggcccccatgtgacagcctgacagaccagtgaccagccactaaactaatcatgcacattatcctcctcaaagctcaaatcaatgcctccctagtgacagagatgcactgcatttcctacttgtttctttctaatcactggtgccacatgcattccagtcaactggcagtagtgcagtactaatgtactatcatggatcatggcaaagctagtgacatggtgcttcaatctagcttcccagcaagtatgcaagtcttttgtttagcttctaatagaagtggttgtgaacatgcatcatacatgtttatttcaataatggagtagtacttacatacttacaggctaacataatcaatcgattttttaaaatctcattatggttattacactcgtaggctgcagctggtctgaaaatttgaagagtgcactggccaagtgtccgtccgtgttgaaaagatttacaaaatacacatatgggcattatgataatctgtaaattacatagacaaattttcttagcaacacataatcattcgccattcggattctaggtattctagaagacaagcatagcactgacacttggtgtctctaggtaaatatcatcaagaataatctccagttattcttcgaaaaggaaaccaagctcagtgctagtgagagagattgagcaagtactgataccttgaactgtagagaatacaagaacacacaaactaattactgataaatttataatatccattcataccatccaccagttcaagagcaaacaagaccaatgaatgattgaaattacattcaggtcgtccaatcaaattaatgtgcatgctcttgggtttgtcagtgttccgaagctaattacctaaattactttgaattaaatatggtggaaaggattattccttgtaccattctagctaataaataatgttgggttcttcaaacccaacatctgtaccaactcctgagttgaagtttgtgcttgatttcctcatgctttcttggccttaggtttaggtgccggtggtgggaacacggccctgaagacccaggcagcaagaacagcgccaacaaaagggcatatccagtagacgtagaattgctcccatgtgttgtggcgattgttcacatatgcccagccaaacgcctgtggaattgtagataatatttaaccaagattagttaccagaaaacaaggaacagtagccaaaaagggcaaatgagaagagcggcaacttaacatcagatcctactggatgtataaatggaatacagtagcatgaattcaaattacaggaacaatttgcaatgcattctcaactctgcaaagatctcgatttcagaggtatacaaggaatttccactaaattacctaattgaagtggacaggagtgaccaaatagaaattaactgagttaccctctgcagaatataagtataatcaggcactatttttccatagtttttcctcataaacacgcaaggtttttaattaatgagatcactggcaacggttttatgcctattgtgtacactccaaccaaaactgtggacgtccaataataatactgactccttcctgatgaaggagatttaaggaaagagtggaactttttgaaaattacatctatttagttgcttcatttgacctgttgcttagtaatttaaaacaagagcaaaaaaaacataaataaaaagagcttagcctgacggcgtgtttgataagcaccataaaaggggatagataatgcacgatcaacatttttatcactcaggtttttggcacaaatgacttgggactccgtttcctattaattcatcaacaagctaccaaactatcgcgggtgctcctgaattaatcctagctccgtgttgtcttgaaaaaccaattgcatagtagtaagcatcgtgccgaattaatccttagctccatgttgtcttgaaaaaccaattgcataatagtagcgtcgtgcaagtgagagcaattgatgttgatatattttgataataataatataccaagatcagtaactagaaaaaaacctaaaggaagaaccgaaatctcacattggcagggttcatggatgggccagtgtaggcagcgccggtgaggacgaggcaaacggtggagatggagagcatccaggtcttgacgatgggattacggggccccttgacgatgatccagagcacggccaaggtgatgacgaaggtgagcaccagctcggcggcggcacccgtgtggagatccaccttgagcgatggccccccgagcatgtgcttgtactgctccggcatcagctccgagatcgccatcgccccacccaccgcacccgcggcctgccaagccaaaccaaattctcatcagcaatcgaaggagaagaaagcgagggggattgggaggagactgagtagtttatacctgggcggggaagcggagggcgagggggaagagggaggagtggcggggggaggagaggccggcggcgtggaaggcggcgagggcggtggggttgaagctggcgccgccgagggcgtcgcagaggaggttgaaggcgaagaggagcacggagaggagggagacggtgacgaggagcgcgtagtggatcccctcgtggatgcggaggtacgacgtcaccgccgccgtcgacgcccccagcgtcgacacgcacagcacccacaggaacgtcaccgccgcgtccgccgccgccgcccgcaccgccgccaccgccatcgccgcagccgccgctcgctctacttctgaatcggattggattggattggaatcggaggaggaggaggaggagcacgcgcggcgcctttctatcgatatagctacgctcctaaccacctaccccttttttcagctaaaaaaataaaataaaaactactcgaatatttttgtgcttatcattttattatcgaaaactaggaaaaagaaggtgcttggcaacggattttcttggaagtagaagagaaaaaataaattcattcattcagcatattattatagcataataagtcaatcatcagttgtaaaatgtgaactcatatacgaggtaaaacgttgggttttttaaaatagtattgacatttcctcggctcgatcgagccgaacagtgtaggctcgagctcttgtgtgctctctccgtcaaaagaaaaacttaatctaagaggggatttgatcccttctagtacaataaatctggacaactctttgcccagattcattaacctatgttgagtattttttggacggagtgaaaagtgtttatgagaatgtgttaggattgtgcttgtgagttagcgagagtgggctcaagcccatatcaaacattttcggctcaatggagatacatagtgggctcaatgaatacatggagtagtagtcattatgaaaccaagaaaaagcgatctttagataagcaccgaactaccaattgaggtgatggcagagttgtggattcataacttcactcaccatgtccaaaatcattagctattacttcctccgatcagtaatatttgatgttggacaacaaccattgattctaagtgtcaagtattatagaccggagagccgtcctagaaaaaaacaacttcgagctttttttttttctaagacggatgagggtgtatggttgagagctgcaatacacaccttttggctcacaatacaacaactccctaccataccaagttcctaaccaaatagtaccatagcaaattgtagcacacgactggtctagtggccaattgtgataggttttggctgaaaaataggcaagtgatcgatgtgattattgacatcaccaagcatgatcacaacagtctgaataggtgaatttttggggattgtatatatggctattttctcatcaattatattatgctcaacgcatgatcgaccaacttgcaaagaaacaaaaacaaaataccaatttataactcttcaagaagaaaaaaaaagaagaattaatggtaccaacataccaagatgatgagcatacgaaaagaaccgcaaaagatcagaaggctgaagattccttcctttgccttttctttaagatgacaggcatttgattttgggcacaccaagatggcttccccaagaatatatttttttgggacctttctctttcaaacaatcggttgggcagcaattatagtgtgatgccagcctcatctttcatacgcaagttgatagtatcatttttgtcaacgatttctgcgaaatttgtttttatcagatttgttatcttcttttactaatttacaacctgatttctgggaaattaaacaagagttcgaccaatgaaaagtatgtgtttcttttcatgccaaatcaatggctcggatcgcttctactgtcagtattcgatcactgtgaaaattatttcaggaaaaaatgttagatatatctcactatcagcctccttacgaaatatggagtattcgatcatgtgaaaggttatttctaaaaaaaaaattggatacctcactatcagcctcttgatgaaatactagtagtttatatggtcgatttcgcaagcattttggtacattgaaaaatgaaaaggggagtagtccaatcaacttcacatgcaagggcacatcacctaatctacaagaaacatgtttgaccaagctgggttattatacctaataacttgcattatttattgcaaattattatgtgctcactttgaattggacgagctcgttgaaaaaaaaaaactaaagaagacgcaaaactgatagtaaccatcttctggtaataaatgttagtgcatcaaactaatcagatgatcttagcaaactaatcctcatgtttataaaaatatatttttgacgttatttaggaaatgctgtctactgctgtcaaataaatttaaagcttgcctctgatcatacatatctacacagacgctttaatagctggtatgtgcaaaatttggcagatgttcataaattttgctgcaattactgatcatgcatggaagagttttttttttttttttgcggggaatcatgcatggaagagttgacatttacagatggggacagatatgatttctcacaatttttgactccaaaattgggaggaggaggaggaggagaagaaaaggagagaaattgagagaaaaagaaaatcaagaacgagaaagccaccggttttctctccgacgatcgccgccgccgccgccgccgccgctgccgtcgccgtcgtcgtcgtctacacggcgacccgctgcagcaccctcgacgggacggcgaagcgcgcggagaaggagcgcgagaggttctccggctccacccacgccgcgccgtcgtcgaagttctgcgcgtagctgtaggcgtcgtagggcaccctcgccgccgccgccgccgacgacgacgccggaacgcagccggtggcgcagagcaggatccgcttcttgttctcccgcaggatccgccgccacaggcccttcagcctcgtcccgcacccgcgccccgacgacgccgacgccgacgcaggagcccccgcgccgcgggacgccgcgccgggcttcccgtcggcgtggtggacaccgtcgaacaccccggcgccgaggtagccgtactcctcctcgtcgtcgtcgtcgtagtcgcccgcgaggtcgaagccgccgcggacgtagcggcgggacatggagatggagggggcgcaggagcaggaggcctggcgctggaagcgcgggctgtagccgccgccgccgacggcgtccatggcgagagcgatcggagtgtgagagaatgtgagggagaagaagaagaagaagggaggagtggcgtcgcggtcgtgtatttgtaggggggagggtggtttttcctttgctttgttgggaaaaaaaaccatttttgttaaccaaatcaaaggggatttattttatctactaatatttttccctccttgttgagtacataattggagggtattttctcacaccaaaagattttcccttttaaccttagaaatggttcatattccctcacaaatattcttcttttcgattacatggcagacacacgtacactattacacatctcagatcacattaaaatctacatctatgattttatcaaaatatagttaaaaacccacctatatatgcgtagtaggattgagatcctccgtagtcactgtaccgtgcctttgtactgacatgtgggcccggaggccatcgggcccacattgacaggatggtgcagttggctgcagaggatcctgatccatgcgtaatattcgtgaggcatcgagatttgaatcgtggtgaacagagtcatgcactcatgcacccatggactccggtgtttatcctgacacataagattttgttaatattgaataattactggataaaaaaagaaacgagtgacgggacaacctcagctattcaaagaaagaagaccagctgaaaggttataaacatatttttaataaacattagtttacttttgctagtcacgaaatgatacaaattttttttttcaaagcaaatgatatagagtcgagtccattgaacctgaagcatttctgtactgctcctgctcttgaagatactgttgtatactcctaagttgtaacttgtacagaacaacctaatcgttgactctcagtatgcccatcaacattttaaatgctccattgctcaacaagttttgcactttttgagactttaagtcatgttttgcaaggataaattattgtcaaaaaaagattatgctctgctataaagaaacatcatatcttcttttcagtgttactggatcgaaaattccttagtgctcctagaggtaagcgcatgaagtagtagggtaggtgatgggctcatgtcgccgtgtaaagtgaatcacaaattcacaagtggagagcccaattctaaagttgcaacaaattcacatgtgcaattcaatctttcaatctttataatatctgcttcatataccagatttcctactcttggatgctttgtagaaatttctaccccccaaacaagaaaattccccagcagaagaattttaaaaaactttatagagagacttatcacctattgttgaaggttttggagacatttataatcaaacagaatccaagattaaactatgaaggatttgaagaaaaaaaaaaggaaatacttttgggttgatttaattgggaccacagcccatatgttggaagttgacataatgtcgaagaccctacgtagtcgatgtggaagtgccaccaactgtaggatcaaaaccatctaaaaaaactgtgggaacaaaaaaaagcttttcaatttagtgttaaaggtgaaaaaaatgcattatcgcatattttcacaagaaaaatattaggctttagttgtatagtgcgaataatatcgagccgatgtaaattcatatattcatatattccaaaggagacctcatctcgcattgagtaaagatgccatatgcttaaatttgagtgtcgagatggatcaatgggtcaaattagtaagctttgcttgaaataagtttattaggagtgctcattcctatcattccagtattctttaatcttttctgttaaacaacaaaaagcacattttggcgcatgcttaggcacaattggcggtttgtcttgatgtttatcattgctaatcgagatccattactctggaatcaagacattgatcatgattgctactggctagcaccaatcctaccaaaagtgctgttgatcataaaaccaaagcctcattcattaatatatatgtttgtttatatgcggcggcagttcttaattctctggctaatctttctcttgccaaatggcatactataaccccttcggttaaccctaccatttggcagtttagccggagctattcatgtagctggagccatacatgtactaattatgcataaaatgaacatttttattattacagaatgtaacttttttgtgaaattattctgttcagaaactctgtaaatctgtcaagatttgcttactgattttgtgatattgcttgatttggatcaattcaattccatcatcttcaggggagtttgatgagatgaatcagattcaggccatgtgtgaatatgtgaagggcaccagcaggcagcagctgcacaagatagagtaacagtattaattagccatagttgttcagaacaccgaatttgactattgatatcagcatgttgcatgcagatctccaggcaagttgctgcgtacattgcatcactctctttgaaattgattctgtctctgcatgcatatccaataaatgaaagaatcagatggtcaaacaaagcgaaccaggtccatggatctgcacaaaagcctttcaaacttctttgacctgaaatttcaagaatcctataaactcatggattcacaagagaagaacccaaaaaaaaacaagaaggagaggaaagttcatggttgttcagacttcttagtcagaagaattccttttatcaaacaggacaggctaaactgctaaactggtggcaccaacctttcagtgtagtatttttctgttcagttctcgtttctaaaaaaatttgaaaagaatctgcaactcccaacaatatccatta

SEQ ID NO: 4817 - DNA, 19995 bp, Oryza sativa
gccgccgccagatctcccttcatgcatctcgatctctccgatctcgatctctctctgtcgcgccgcccgccacgagacgccgcgccacgacgacgacgcgccacgccgccgccttcgacgccgcgcaacgccgccgccgcatgccaacgccacgccgccgccgccgtcgccacgccgccgccgccttcgccgccgtgcgcgcaatgccgccgccgccacgccacgccgccgccgccacgccacaccacgccaccgccgccacgccacgccgccgccgccacggccccacaacgccacgccgccgccgccgtcgccacgccgccgcgccaaccgccgccccgatgccgccacaccgccgttaacgaacgagaacgagaacgatcgaacgaacgagagcgagaacgaacacgtcaacgtacgttgccgcgacaacgtgaacgagaacgagaacgatcgaacgaacgtgaacgagcgaacgaacgaggacgaacgttaacgtgaaatgcaatatatatatatatatatatatatatatatatatatatgttacttcgcatttatcctaatacattttttttatcttgcagaaaagacgtgttgtcggagtcgtccgtcaagcctgagtggaagagctagccctagaaggaattggagcagacaagtgacgtaataatataaatgattgttatatttgtaatgcaattaattaagattattagacctgtaattagacttatcacgtaaggttgcgtagggttctaatgtacaacatttacacttagcatacatgacttagattgttaaaacataaatgtctcgtgacttagcagatgtttcttgtatcaacagatggctgaccgcgatgaggaacagatattgtacgatacaatcgcggagggaagcagccagtactggaatgaagaagaggggaacgaggatccaaaccagtacttgaacgaggaagggaacgtggagagggatgcggaggggaaccagcaggggcacgtggaaagggatgtggaggggaaccaggaggaggaggctagtggtagtcaaccctccgttggacagaagagggcacgcgggcaacgaggtgcagcgaagaagcttgagggtcggcacatcataacggaagtggaagaagatggacgtcctagtgccccggccgaagccgccaagaactatgtacgtcacagcggttgggttgtgcgggataacgtgcctgtcagtacggtgtactggcgaagaacaagggcacgcggagatcatgagagctttgtcccagattcggagaaagagatgctgtggaccacaatgctcgagacattcacccttcctgcgggtacagaggacaaagtgaaaaggtggactctgaagaaaatggcagaacagtttcagagcttcaagggagatctgtaccagaagtatatactgaaggggcagacaccgaacttcgacacattcccaaagctaagggatcactgggacgagttcgttgcatataagacaggtgaacaagggaaggcgatgatggaaagaaacaaagaaaatgccgccaagaagaagtaccatcaccacttggggtcaggaggctatagcgtcgcgatgccgaagtgggagcagatggaggctagcttgattgacaggggtatcgaaccggcaacagccaattggccggaacgatcgaagttctggtactatgctcacggtggaacgctcaacccagctgatggctcactggtcttcggctatcagatacaagaggctgcgcgacgactaacagatgcagtggaagcctcctctcagggcacgttccgaccagacagagatagggacgagctgacactcgccctgcagactccagagcatccaggacgaactcgagggaaaggggtgattccttggaagattggtttcaaggaggacatccacacgtacaggagtcggatgaggagcaagagagataccgaggcgaagattgcagacctagagttccgggtatcgagctacgaactcaacatgcaagaggaggtggcaaggaaggttgatgaacgtatggccgcacatcggtcccatgatccccagccgaccattcctcctgcaatggtgagcccgtcaggaaaccgtagcagctgcgcctcaacggggcaggtaggatcacagagcatggacgccatgcaaacacaggacgaatcgacctgtcccgttgatgacatcactcagcggacaccatgtgagctgcatattactttcaagaacttatcaataaaggtaagatttagccattccgctagttgctgcttatatatgttgattactaataaataatctctcacaacatgaaggtggcgtcgggcatggccatcccaacggacccttcaggtacttaccactgcaggacgattccagcaggatactccaaggtcgaagttgagttggtcgaaggcgcgtacgaggacctcgagctggattaccctggaggagacggtgagacgcatctacgagacacatgccatgccattattctatggcgcaggcggtacatcatccttcctgggcgacaagcggcgtctcgtgcaccatctcctccggctccgccatctcctcctcaggatcctgcaccgtctcctcctcatgctccgccagcaccgtctccacctcaggctccagcatcgactcctcaggatcctgcaccgactcctcctcgtgctcctacacctactcccccgcaagctcctcttccggcaccttcaaagtcaagggccccccccagctccaccgcttgcccacacaagggcaacaaagaaggcgaaagttgacgccgccaagaacaaggacccggggtacgattgcacgcaagaggagcttgacgcttacgttgcatcagaagtcaagagacaattcaagcctcgaagtccagaaaagaagattcctatagaccccagtgtcaggaacttcttcaggggtatgtctgcatctgtcaaggaggccatcaagctatcggactatgagcgaacgctgaagaaagcatcttctggaaagtccaaaccagtccctcagcttggagagcaaccaaaccaggagatcgagccgttggtgaccggtaaagaaatgacgatagaacaatttattactgacaccggtctaactacggatcaattgctaggagtcgcaccaatcgaaaaggcggaagtgaaatacatgtacgaactcggtaaaccgcttgtcaagtctgagctgctgcagtccctacccacacaaatgtacaagttccatcagctgtacatggagatgagcgccaccggtagagagatgatcggagcgaggatcagggacacggacttcttgcaaggagatgacattctctggatcaatttcaggggaatctatgaactataccagctggacgccctcgacgtctctattatgagttgctggattttgtaagtatatcgttcagttagatttcttactatacgtctcctttaattaattaggtccttgtatataagtagaccatagaaaataatatacccccttttatcgttgtagaatggagattcaaagggcccgacggcggagggttttcgatactggattcatcgaccctcggaaagtaaacgtcgcaatgctcgaccaatatccacaagaaacagaggacaatctcgtccatctcctgaaggcgcagcattacaagacgttcatactgttgccatacaacacagagttagtttaattttactgtcttcctacataccaaatttcattcccgtacgaacttgctaagtgtttcatatgtaatgcatcccacgcacattgcagattccactgggtgcttttactcatcgacctggaggcctgcaccgtcaacgtatatgactcaatggataaaaaagagtctacgtttgacaaggttttcgaacttatagacaggtaccgtcataagttcctttgttaattaagaaaaatcttgttaagttaattgctactacgaatcatagctttaaactccatgtagggcttggtatcggttccgtcatttggtccgcggcaaatggagagaaagacttaggcggaagttcaaatttcctgtgagtacacatgctctacatttatatttctccgattcaaatacatacaagtgtatattaattagatctctcgttgtttgtcatttatttgtagtgcgcaaagcaaaagcagggaactaacttgtgcggctattacatgtgcgagtattgccactgccttgcagaccaaatcatcaccacaagagagctcgatgtacgtacaaataaattcaaattttcattacgtagcgatttcttgtttaattactaattaatttcatacattcatatagtttattcgcatgagggataacctgaccacacacaaggaatttatcgcggcggttcaagaacaactcatgggattcatcaacgaagaaatccttgatcccaagggtgaattctactacgacggaaacacaattcaccggtccttagcttctgagctagcagcgagtactactacgtcgaaatcgtagctagctaggacatataatggattgtaattaatacatgactacatatgtttctatatgcatgtgtacacattttctataatgtaaatatattttgttcatatatatatctatatacatatgcatttgcataacatatatatgtataaatacatatatatatgtatgcatatatatgtattgaaacatatatatgcatggtttatatatatatatatatatataaaccatgcagcaacaggggcatgcaaaaaaaaaaaggtcacgatctttagtcccggttggtaacaccaccgggactaaagattgctcagcctttcacccgagactaaagatagcgatctttagtcccggttggtactcccggtttggaaaccgggactaaaggggggttaggaaccgggactacaaagggtttctccaccagtgatatatatatatatatatatatatatatatatatatatatatatatatatatatatatatatatatatatatatatatatatatatatatatatatatatatatatatatatatatatatatatatatatatatatatatatatatatatacatatatatatatatatatacgtatatatatatacgtatatacatatatatatatatacatatatatatatatatatacatatatatatgtatggttgttttgtactcccgggagtacatacaccctcccctgacagtggatcatccaataggatccaatttaccggattgaacaaaaaaatgattaataaataaatgatgtaattaacaatcggggatgcatgcatgcaactaataatttgaaaattagtctgcctgttgcatgcaaagtagttacgtttgcattacacctttttttacttcataatattcggtatatatgtaccacgaccaacgttgaaaatgccttttcttttttagtatccggtatatactgtgtgtttatgtgtatgatttagtatgtacaccgtattacattttttgttgttggactgtatgcatttttttaatatccagtatgtatatacttgatcttttttagtatggcatatacttttttatgttagtaacagtatatacctttttaaattaggagagcagtatatactttttttaatccggtatatactggactagatcatgtactggttggttgtaggactacgtaccgctttaatttctttgtaggattcactatatattagaccaaatactgtttttttaggtacgatagctcttccttttttcagggagagtagtagtctttaagtagcagtgcatgctattttattttagtaagtcagtaggagtacatactgtttttaaacttagttgaagtatatacttgttttaacttagtataagtatataacttcttttaattagtaccagtatatgctacatacttttcaattactagtatatactttttatgagtatatactgttcttaaacttaattagtagccgtacatatgtttttatagtaagttaattagtaggagtgcacactgtttttaaacttagtagcagtatataccttttttaacttagtaacagtacatacctatttttcaacttagtaccagtatatagtttttgatgaatatattttttgaacaaacataaagatgtttgataaggaaaaaaatcaaaacaacttataatatgaaatgaagggagtagtataggtattttttttccacgtaatagtacgtaccatttttgtcttatagaatagaacaatacgtaaatttagtatgtgtagggttgctaattttgaataaactgtatcagtcaatgattgataaagaagtgtcgtcaatcattggcaaagtatcgggttgctgcattctgaataaagctaaatgaatgaaatacgctagaagtgcactgaattctgaatagacaattctacatgcaggctaacaaatcggttagcatcgatgggatcacgccaaacacgcgccggagagggaaacgagtattaatgtgccagcttgctggatcaacggaatcacggactcagcgccgtcgccagacgaccatacatgctggagtgttctgttgtcagcaccatctatgcccacgatagatgtgtctcgcatctgcatgcaccaaacaaatgcattcatcataggcttaatcattctatatatcaacgtcatacttcatgtctgcatcctcgtctgcaaacaataacagagatatacccaatagaaaaaggaagattatgtattatcattctacaggaaaaaattaatcaaacaaaactggaagaagaaagaaagggcttgccttgatcgttgcacgggcgctaaggtcaccggcgctagtttcgatcggtcagccaaggtgaagccaccgccccctccgcgtagacagcgtcaccgcacgggcagacggctagataggaagagccgatggatcgatgccgtgataccgtcgccacaagggtcggcaccgcctgggaacgccatgttgctgcagatgaatattgtcgccacatcccagcaaatcaccgatggatgttgccgccggcgtggttgctcgatccccaatggatcgtgctgtacctccgcttcgagtcgccagtagctagcgctcgatccgaatacagcggagagagcgagctgttaccatcgcggatgggatgggaaccaagggatttatacgacctgttcagaaccgattagtgcgggataattaaacattaggagaatattctttaaaaaaatggaaacgggtccggtgagtgcatccgctaacatggttgatcgtgggtggctactgatcaacggtggatgggagcaggtgtacgtactcctgggaatatagaaccattttcatatatatatatatatacacacacgtacgagttgaacatagctcaactggttaattagattcattgtggtggaacctcatcacttggacaaccggcttcaagctctaaaaaattgggcggatgcttgcattcatctaattgtcttcgttggtgcttataaagatattatgtgtatatgtttacagtggtgagtgtgcgtattttatgtgtataccgtatttgggggaaaacaccacgtatatttctatatggccataagtaaaaatttatttattgaatgtaacttcttatttaatttagctcatacagtttgcgcagataatttaatttggtttggtgaaagctgacgtctgtgacacttttgtctatgcatatatggttggcactcagctgtgctgttaagagttaaaaagtggcaggctggacctaggaacagtacattatctaacatgttttaggataattctcaccacatgtacagtgccatcgatggcaaaggctgacctgatgtaaaagacacccttttgcaaagccagacatgattccttgtcttttggacacatctgatcggttgatccccttaacttgaatcatcagtaccataatgttcacatttgttggcaaactactcgcactagaatatgcatgaatggctgcaaacttgcaaactttgtgatgatctgcaaactagaatatgcaaatcatcacgaagtatggctggatcgatcgatctgttgatcaaaattgctccaaatcttcgcaggcagcagtgtaaatggtaaatgtgcgggatgcacagatatatattagtggtgaattttcgaatcagagttttgaaataatatttaaattctaacaaggagtttggctgtacaccactactcttattttgttgtatgcacaacacatctgatattctgatgaatgaaatatctgtcaatggctcaatgggcgacaaggaaattaatttgacacatttcaagccgaaaaataggcgcacattgagtttctctattttttttcttgttttaagaaacagggacatacacatggtgacatggatgtacacaggacgcatgagtgcatgacacggttataagagcaagtttaataatatagccaaccgctggctacaaatcatctatagtcaacttaatagccaattcatacaataattacatataagcatatatactacaaaatcaatatctggtgtcatacacatgtgcgtcttggagtccgtgctgcaactggctacaaatatgtagcccgttgctcttatctctcctcttttatccacttaaaatatgtttatagctagcttatagtctgctattgtacctgctctaaagaggtaactgagacatgaagtgcttgctagcccaaagataaaacactaagggggtatcctagggacttattttttttttgagagaaggattaaagtttagtccctctctcccaaatacccccaagatgagtactcaattatggagaagacatatatacacatgggatggagaaaaagagggagagcatgtagctagagctatgtatatatacaaatacaaagtttatagctaggatttgagaatttttttaaagggagggagtacactatagcggggacatggcgtgcacgaatgcatatgcacatgcagctagctccatcccccatccgtgcagaggataacgaaacaaccatcagttagcctagcacgcatgtgcatgtgcatccatcgatcgatggatgatggatcaatcgagctactcgctagctagctagcacccactttcgtcaagcgctccgcgtccatctcgcactccttctcgcgcgcgcacgcacgcacggtcggcctagctattcaccaccaccttttccacagtagtagtgcactttgctcgatcgcgagatggagctggctagcgccatcataccattgccatgcatgatgcacatctctctctgccttttttttttcttggtgtgttggttgcatgcatggccaccgtaccaccctgcctaggctgctcgatcgatcgatcgtcatcatgaattcatgatcgatttactagctagtttgttccgttagagcaggtacaatagcaggctataagccagctataaacatattttaaagagataaaaaaattgagagaagagcagcgggctacagatctgtagccagctgcagtacggactccaaaatgtaatgtatgtatgataggtgagaccagatattaatagtatagcaagcaactattgtatgaattggctattacattggctatagatgatttggagttagtagtgggctatactattaaacttgctcttacttccatatgtttatatgttagctcaaccagtggcagagccagcagtttcgtaaatcgtgagcgattaaaagtatttttcggtggttgatcaattttttcttagggtgtgtttagttcacgccaaaattaaaaatttaattaaaattggaacgattgatgtgacggaaaagttagaagtttatgtgtgtagacaagttttaatgtgatggaaaagttagaagtttgaagaaaaagttaggaactaaaccaagccttcaacaatctacaataaaaacactagcagcgcgcgaacttcggacggttgcctgccctacccgggggctagtttttccgctaggcttaatcacccaattcaattattttcagaaacttatatgattattagtgtggattatttattttcatttaaaaatatgttttcttgacgaactttcatttattatattgcttagacattttgttttaaactactaattaagtttattataaaatattttgttaccctcaattaaatatataatatcatgcagtcattcgacaaataactaatctgttgcaaatttagaatttttttttctcccgcacttagtttcaagcatagtgcaaatacacattgcagtttgacacattgcgcgatattcattctgtgtccgaagatatataatgttaggcacacattagatgttatgtcaagatatatgtagtgacggctccatgcctagggtagctaggcctcgagtcttatgtgtaggacaataagtttccatataaatttcatattttttcttgaattttagagaactaggataaaataatacaagctggctccacccctgtcaacatgcatatgcaacggataatactgttcttaataataagctcagattacaaaacaggtgcactttagctagctaatattccttgccccagcaattattatgagtttatcaccatgcatctcggttgccattatatgcaagcagctagtagccagctatcacagcacgtgagctgatgatgcagcccggatttcactaatcatgccacccatgcacgtaaatttcgatcacaatcaccccacggccatccctgcatcttgtaactaatgataaacattgccagtatattttacatttgacaacaaaattctattttttttcttcatcatatatcatttgtgagtgtgtgagcgtgatgtgcacgtgtgcgtctttcaagcaataaaaaaaaaactaaggcttatcttttatcaacatgaaaaataccctttctttaactacaattgctttttttaaaccttacttccaacttgtttacacttagacgacttgatttgtgaaaaaaaaagcatttcactcgaaaaatatataagaaagaatgaatcgcttaatgtgagatgtactccgtattactaattacttctcatatcataaaatatactacttcctccgtttcataatgtaagtcattctaacatttcccacattcatattgatattaatgaatctagacatatatatctatttagattcattaccaccaatataaatgtgagaaatagtagaatgacttacattgtgaaacggaggaagtaataacttagaattaaattttacaatagacttagaactgaatcaaatactaggttaatgacctatccattaaatacttagaactgaattttttagaaactatttggatggatgccgcatctcatgttagttacgtcataactgcttagccccctttttgttttgcttctatagtttagcgtgtcaaagaggcagctctttgctgctttgccacatatttttgagctaaaagatatggtgagaattttgtttaccacacttttgatagatgcctaacttaaggtgtggcaacttgaaacacccaatcaaccatgcccttagtcttcgtgtttccggcatgtcgaaatggtgatgggcctaatccacacgctgaaagtcccaaaggttaagacttaggcccatcagacccaataccggtgtgcttctctcgaaaagcccaaatcgcccagttccgttcccccgatcacgtgacgccacgtgccgcgtcgcgttggcatccgatggccgcgatgccacatctcctcttctcttctcctctctcttcggtttctcttctctctgatttctccacggctttcttctacctctctcgccgtccttactcctctccctgctctgatccagccgcggcggcctcgccgcgcctcgcctcgcctcggcgcgctgccgccggcgagaagggcgcccgcaggcaccccctcctcgtcccccgagcggcggggcatcctcgtcgtcgcgtgcgcggtcggcgaggaggtgggaggcgacgcggcgggccttcgtgttctgcttgcgttatccgtctcgggttcggatcgaatcggaggtatgttcctcgttgttctctcgtactcgtagccctagctgactcggtccctcccgcgcgcgtggattccaggacttgatgagtggataatttggttgatttccatccctccaattaacctatccactttcttctgggtttcgttgatgcgtagtgtagtgctagtagcagcttgtgtttccataaatgtttgggggttctgcttatgccccatatgtgacgctcctgccaagctggattgcgttctgttttattactgtaattgtcaatggccgaatcatttttagggctgtgtgtttagttggcgagtatatgcaatagtggctagtagctattccattttatctgcaataagtaaggtcggaatatgcagtagcaagctatacaatttcctgtgcattgtagcggctagtgagctataccattttatctgcaataagtaatgtcggaatatgcagtagcaagctatacaatttcctgtgcattgtagcggctagttagctataccattttatctgcaataagtaatgtcggaatatgcagtagcacgcgatacaatttcctgtgcattgtgcagtctttctgtattatgtcaactaaagttttttttgtatgtttttattcaagcaatgttgcttggtaccattagcaggtgaacgggtgcctaccaacaatgtctacatctcgtgaagtagatgatgggcccgctgtgctacagttatatagatggaaaagctcccaaccgcatcttgaactatcgaaatttcgagaagcttttatatctcctacacggcgcctatttgggctgctctcggaccatggtgaggttttactgcttcactgttctctgccactgccatccctgttggagcccttcattgctctgctaacttactatattgttgtttccgtactgattctggttttataatccaggggatcttatcttgtcaatgaccaatgttgatcaatcacaagttgaatcaccttccctctcagatagctgtagtccagtcgtctttgattgcttctcttctattcctagagtgaagtctttagcatgggggcaatgttataatgcctctagccaacttgaggattcaatttttaatgaagttcttgttgtatctgatgatgattctatcacacttcatgggttttgtcattcttacaaaagcacactaacagacaattctaaattggacactggagatttgcatggggagtggaaagagtggcgtcctactcagtgttcagttccggaggatgatgaggcaggtacaaagaacagttttcgttcttttctgactacaatcagtggatctgtttctgatggaaaataccaagccaaatttcctctaaaatcttcacttccgcattcagcagaggtggtatcgtttagcatatacgacattactctatcttttattaagttctggtctagcaattatccttcaaagacctggatgcaaaacgatactaaatcccaacaaggttttcttggtcatgttcctacaactgaaacatcctgcaactgccagtgggaatgtttgaaggttttgcctagttcttcaggttatttgattggcttggtcttaattcgtaatgaaccagtgagctgtgaggtccatcaacgcaacatgaaggatattttggttgttgttattgagctaaatcagtggggtatacagtggaactttgtggcagaccttcagaatgtatatgatggtgctgttcctaatcaacaatgggttgatttccaattgtcagatgattttcttgcatgccttaactcgggagggtttgttgtcatttggaatgtgagaacttgtaacattgccgcctcctttagtgttcttgaacggtgcagaacagatatagatattcctatggggagcatcacccccaccgtaaaaacttctgatggagaaaatatctatattgggaatcatgcaagaagaatgtttaagaggttagttttggcatcatattctcttgttcttgctgtcgtagatgaggttggggtaatctatttgttctatgccaaggacatcttagatttcaaaaccagtatgcatggaaactttcatccgccttccatgttttatcgtggtgatagttttgctgcctgggaagctgctggtcatgatattgggagtgtaacattttgttgtcatcggtctgtacagcaattggtctatgacttctcagaaagagacaatcctggtgttgtcaggcctaggaaaagaagaaaacattgtagcagtaatgaaaatcaggtggatagctggccaagtggtttcagtactacaacaccgatgaaagatgggttagcttaccctgatacaatggcagtttccaatccattaagaagagtgatccttccaccatgcagattacaggagaatataattagcctctcaccatttgggttaacgagaatctttaaaagtcacaatgcggatggaaacaagcattttagaattgttcacacaaactttcttatggcttcattacaccttgatgagagggatattgatgctagtttccttaaaaggtcctcatttcagaaggactctacttttaccggagagtgtgtcctttgctcctttcagggatatgtgtatctgattacccaggatagcctttctgtggttcttccatcaatttctgtttcatccttttcatctcacaacaatggcatcaaattttggcaaccgacttctgctggtggtagtgcatgcgatgctctgaatttgtcctcagtaaacagacctgaaacaagatggaagccttggcaaatagaagttttggacagggcattattgtatgaaggacctgcatttgcagacaggctctgctgggagaatggtgtgttttaatacacttggcaatatctttagttttttcatattgtctgttgtcctgctattctaactgcttttagtcccgagtctctttctagatgttcggttgcctgtcccatcttgcagtcctgccgttttcttaatatttggctcatggatttatttttccttaaggttatgcttacagatttatttgcagtgtattgcaaacagaaatttgagctacactattttaatcagaaatgagctaaactatttcgatttatactaaaatatttgcgagataaatgttgtacccaagtattttgaatatggtggatttttattctatttttggtgattggtcaattgtcgttttctggaataaacactgttccaattattattcacagtagttagttcgatgggttgactaatacctgaatattaatgcgcactattaaaacattataattcattttacattattattactatcattttgtgtcaagtatccaacaagcaatgatctcattccctttttctgttagtacttatttctcatttatgtatataatgaaatatccaattctgatagatgatagcattgcctcaatgcaatgttctgttcaacacatgctgggtgttataaaagtacacgccatatgctctgaccctgctatgtgcttattgcattggcaggatgggaccttaaattctctaggttacgttggctgcaattggccttgcactacacaaagatcagtgatcttgagcagtaagatcttgtacttttcttttgtcttgacattaatatcagctttgttgtttttcttttatttcatctcttttacctatgccctagtttcttatacattaataccagtattatgtttgtggtacatgtcttatgatttcaatgaacagttacaactgtttggagagcattaaaatatttgttatacatacagagcaaactagttaaatgaactaggacatgaatgtattgcttatgtgtttggaaattgttaaaagatatggttttctaggaggaaagttgaatttatagctggaagaatatactgaataagacttacatttataccagtcacaactcacaaagaggaaacaattaatttcatgctatcatgaatctcctttcagtcatgtactcatatgcatatacttggttctcacttcatcctttatgcacattgtttctatatatacattgtttcgtgttattatgctttaatttttagctagttccatgcctacctttttctttttcttttttactttttgaatgaattatttgaatttgcattgacatgatctttttatatatgcaagaatatctaacaaaactgaattgctagatcattaaatatgctcgtggaggtcaatctcgcagaagaaggtgtcttgcaactgctattagcatctgtctaccggctattaagtagggcggaaagtgatagtgaagttgcggcgtcatccaagtatattttattccctgataaccttttttattatgagtcaacttaattagccgtattactaaactgtggtcccttgatacaaacagtttgtactttctctaaaataaggaacaagttctactttattcttggaaatatgttgctctgtctacagaactgtgatgcagaaaaacattttttaggtacatacctctgaattggttaactaagaacagaaaaaatcacgtgccttgattactacccaactaatgacattggtcccccaacatagacacaatcaagcttttaagctttgctccttctcggatcgagtacctttttaataaacaattctctagttcaaatgttgtttccacgaatagcataatttgcacactgggtacaattgtgggctgtgtattatatattttttagataatggaagcttttattgatctcagtcaattacatcaaggtgatacaactgttccgaggactctcccggtctctacataacgaggatgcacaccgactgtgtattatatagcggaaatattaagatagagcaattctatggtagtactgttacactccgtgcaacaaggttgcactatccattgacacattcatttttccaaatgggacagattattcatgttgaattaaaaatacttctgtttatcatgttctaaggttgcaaagtataattaacattttattttgtgataaacatgcttgtcaaagaaattttcagtaggtgaaaatataatggtaagacaggaaataatttgaatatagtgattggacggtcaagaataaaatttgtatggaaaatggagttaaatggaactgatatacgttcatactttgatacagtaatactgatttaacatagacatgttatgacacatcgatacatactaccattctgcaatacttaaaatggaaaatcatttgttggtcaagcacttggacaaagacctgacacctgctgatgcagatacatccaaacaatgtagcattgagccgtctttaaaactgtagtagaatttatttaggatttgctacaatccgatgttcctttctgttcttttccttgttttgaattgatgaagcctgcaatatgtcatatgctttcaacttttagcttcgtaatatgtaagcttacagtgtgaaaacaggctgatggttttagctgtgcgctttgcgacgagaatgatcaaatgctatgggctacttaagcaaaataagggtaagatcttttattttgcaccatttattttatttgtgttatgtgagacttaccctctatttctcagatgcaccagataattcagtaaaacttcatgaaatggctttccttttgggggtaattagaagtatccagagccgaatctctgcaaagaaccagaattctattcggatggtaaaatgataataattcctttttgtacacatgtagtcgtacttgtactttggatgatccttcttatttggtaatcctgtggttattttgtagcagggtgatgacaaaaactcatcgaaaataggtgcagaagtatcactgaacacttcactgccaattgttgtagtggatggtgtttcagcaggacaatcaggtggtatagaatctcgtgataggcaagagtcaacacctgcgatgtttgagttagtttctggtagcaatggacaattagctttaactccagttgaatcctctattagtgctactatgcatcatgccattgatactgatcaagttgtaataccaagtactcaaggaaatatcaaagatatgatgaaccggtgggaaacgaataatctggacttgagaactgtagtaaaagaagcactgcagtctggtagactacctttggctgtccttcaactgcaactattgcgccagagggaatcattttccaacgatccagaagatgttttctctgaagttcatgaaataggaaggtccatcatatatgacctgttaatgaaggtaatgtagtactccataccatttgcttaacacgtgtatactctctacatttcctgtcatctaatgcttttatctgcagggtgaaactggattggctgtcgcaaccctggaaagactaggagatgacatagagtcagacctcagacaacttatgcaaggtacagtcaggaggctacttaggcggcaaattgccgaggagatgaagaagcgtgggtacatgagttcaaatgagtggaagatgctggagataatatcattgattgaggtttgcttctaccccctgctttagctaattgggaaaattatgatatttcaatatattttgtttttgttcatttggttccaatttataaaagatcaaaatgctggcttgatatttgctttcatagtgatcaacttttttttttctctgtggaaaagcaattttacccaagcagcagtttctgggacacgtatcttggcagggagaatgtcattcacgatgctgcaaaaattgttactctaccaggagaagataaaccagtactagttctcgatattcataaccactgtcctattgaatgtggtgatgttgatggagctgtgatcggttcttgggcgaatgtgaatgattacactaatttgaaggagttctctgaaagcattttatctgatggttattgggcctgtgctgccatatggtctgatgcttgggatcaaagaactgtggaccgtgtaagtcacgacttaacatttttgcttgttagtattgagattgcaccttatttctgattgtggcaatgtgctgtagcttatctgaaaatgtaaaagaattttgctagtcttgttagatctgtccaatcactgtgaaatcaagtggaatttgttatgctatatatgggataattatgtatttccaactcatcgcaagatcaatttgaccatatatgttgccacagaaataatgataatgttggtctgtgttattcattttccctttcgtggaaatgtgtttggtatcaccttaaatttgttggtgtgatgctttttgtaatgagctaaattctgaactagggcctgaattaattttggtatagtcatggacttatggttcttatatgctctatagataatactggaccagccttgtcacgcacatgcgtatgctcatttctcatgggaatctcagtttgaatattttgttgctcataatgatgtgctggaagtctgcaaactcctggacagtattcctgacagtgtacttctagaagggattcttagagtgaatgtggacaattcacaagctacttacaacactctgtctgacgtagcaacccacggttataaaatgtacttatttgactcagaagagatagaacctgtttgtatggaaataccacatgtcaaagtgttcagatctttgtgtaatcatgaatcaacttcttggatgagaatgatcatgctacaggaattggcaaagaagcatatctttatgaaagagtactggcaaagcactactgaaatta

SEQ ID NO: 4818 - DNA, 28449 bp, Oryza sativa
atgattattgttagtcatacgaatatgcgatacagaaaattgcaaacacagtaacaatcaatattatcattgattattttagatgaatatggctattgttagtagcaattagcagaggtttacatgacaaaggtggtgcttttcgctaaatatttaaggaaaaatactacacaagaggcttcagatcagcaagccccctcaaaaaaaaaaagatctcctaatgaactgggaaacacatacgacgtttcaccctagttcctgatctttacaagatgtgcaatttcagttcttccatataaaagctacgcttcagaaaacagagaatttctggaatgcatccaagctgtttgcaagtaaatcgctcacacttaaactgtcggtgccactcaaaagtcttgaacaagatgctccgacttctggctccccagtcgattcagactgaaaacaagatgctcccagtcttggctccccagtagattcagactgaaaccaagtagatgacgatacataagaatcagatcagctctttaagaatcaaatagaacatatcaatgtttattagaggctctggtgagtaccactgggatgtctggcttcacattattgtcatcattggccaagagtgatgcctgagggttcggttcctctcttctatcttcagtagaacattgctgcagagacaagccgataagcaaatgcatagtgtccttggcaagaaaaaaggtattagaagagcaagtgaatggtggctaatagaggtaccttctcaccgtctgtaccagattccagaattgtgcctaggacagacaaggtactagcaccacaactgctaggagttgtaccaggtgtcctgcgtgaaattcgattctgggaaggaaatgcatggcacgtttcttctgcatcccaaagggatggagttgacaccttcggctggctacttgcttgttgccgagcaatcagggaagcaatagcagcatcaaatgaatcagcggtaagaggtatctgttggagacttgagttgttttgtggaagtaactgcttgctgtcttgagaaggcgcagcttcagctaatagtgctccaaaacttatattagatatgcagtcaatccatgaaagtggtgtctctttgctttgattatcctgtttctgaaaacatgtaatcagtgttaggtcaagtcaaaatataattgatgatattgaaagaaaactataacgtttgaacttaccatagtctttactgtgttggcctcagtggacggtgcagcaaagttactcgggaattcactcaaagcagtcatctgtttctgttccctgacaacaggatctaaaggctcgttgtcgattatattgcctgcagagtgcactaatcctaaagatactccactgttttgttccccaaaattgggtggaaaccaaccatatctaagaaaaaagatgtgatattcagccataagttttgtgctcaatatatgcatggatgcaaacaaaagtaaagtaaaccaggtctggagaagaaagcgaaccttaagcgaaatgtcgaagggctgccaacagcaacatgcacatcagctgctgtgcaagaatcactacgagtccatctctcactgccatttatgttatcaagcctagtaccgtcagggaagagcatgagttcacctcttgcacactgagaattgccccattttgtgttgagatgctgcagaactgaggatattttctttcgaggagccacagtcaattccaggtaaggattgtggtttttctgttaattatacagagcaagccacacattatggaatctgaacgaggtcgtatacaataatcacacatagaaatcttgcaaaagctgaagtaatcacctgctgcagggacttctgaaactcctcatctattgggaacagttgaagtgcgatctttccagaatggcagggtggtcgagcagacacattcttagaatcatggaacagtgcttccataaagctaccatcctttggtgcactttgtttttcagtatacaattgaggtgatgaggcaccagctcttctgtattttgtgctagcattgcctgaaaagtaaagcacatgttgagtttgagaccagttttactcgtagatgtactttacacaatggcatatgtactttactccataaataacttttatttctcttaatggaaaaaatgcgctccttgcgtattcccgaaaaaaacaatggcatatggatgggcacctaacgacatcatggaactgtcttgattcaattgtagcaacagacatttattttctacttcaaattttaattttgtttgataagtgcagcaggtacaccatacagtaaaggaaattgggaacaagattccaacacattacctgatgatttgttgatatattttccaggtttcaggctttgcatcgtactgccaccaagttttgccgccgttcctgtatcagttggtttacagcgctgctgaagaggtttcatggttttctgatattcagcagcaaaactatctggtgtgcaattttgtaatcctactcctgcaaaattgtaaaaccaacattagtttgccccacacctccatagttccattaattgtctgcaaagagcacggttatagcatcacctcaggaggacaggacctttttagcagtctgcccaaaatcacaagacagacaacttttttggtaatggaagagctaaatcttttttttttaaccaaggggaagagttaacacctagctgctacggctctgagattattccttagtttgcagcgatagtgctaatcagacaactagtacataaaaataaaaatcaaacaacagaaataaatccttttatccaattataaaaaagtcagatacatatcatatcattcaagcattagtataatggaccagcaccaaagttcctacacacaatgggaaagcccactgatctatctcttatgatgaaaacgagctatggattttaatgaaagaattatatctatgaattctagcataaattctagcaaacattagaaagattaagttctgaagtttctagggcataattgttctgatccctaattgtgaattataactataacaaaatcactcttatgcacaggaattcaatgggatgcaccgaatgtgctaaaggcagacttccagcggaagcattcattcgttcacgttcctttcagaaactggcattcgagttttgagtttctcgagtcgctcccctaaacctaatccccgaattctcccgcagcccaacatttcattcaaccacgaaatcacgccgcgcgtacccaccagtcacctcgctgtagcaagaattcatccataagaggcgtacctgatctcacaaccctagatctcctggaccccggagaacccgaggcggcgaaaccctagcccacccaccgccggcaagacccccgacctccgcaaccgcggagagagagagagagcgagcgaggagtcggaggcgagcacgaaccctcaaggccgcgaatccccacacccgcccgtcgccggagttcaccggaaggcttcgcggcgcccgcggcggaggccggcgagcagcgaatcgtcggaggcggaagagacggatttttattttttatttttttttgggaaatttttgaactctggtttgttcacttgccgcctcccctccgaaatggtacgcccgtatttatacccgtacagtatgacagacgtgttgggctacgactctaaatgggccaccatttggtggcccatgtagtttgggcctccattcctaggcccaaacagtttgggccggcccacctgcacccggtccacgggggcctcgtgcgccgctgccactgccaccaccataagacgacgccgccatcgccgcgtcacgccacgccacgccacgcgcacgccgcggcagcgccagcgcacggctcgtcctcgtctccgtgcgtcgccgacgtggggggtaacgggggtttggaagcttcctcgctagggcgggatggcggcggcggcgaagaagcggaggccggaggaggaggaggcggcgggggcggaggaggagatgcacctggcgttcaggggcgccgccaacgcgctgtcgcaggtgtacgggcaggccgtggccgcgcaggagaagtcgttccgcgccggcgagcgccgcgccatggtacgtccttggcctccgcctgcccgttcccctccccaccgatcggtggccgagtcgcctgaagaactgcgttcttggggccttgagtcttggggtccggtttagttttgggattttacgcggagatgcgaagggggatgggatcctgcttcgagttctttcgagttgctggtgcgttggggataggggaatttatgttctggacgaatttttagctgagaattatgggtgtggtttggtatggtgggattggagagtttctcggtgaaatgctgcggctgatcttgaaattagcttctgcagttgtaaattgttggaaatccatcagtctgagttcttggatgtgcttccatattgtgaacttatgattttattatcaaattgattcaatcctgtttctgaattttggcaggagaatgtctatcgatggatttgcagcaagcatcaagaaggtttggaggtgtctgttgccgatctagttgctttcctgcaggtcagtttgtctttatctttttctttagtttaatccctgtttgacatttatgctagccaatgccttgtgtcatatgcaaagattgagagtcagggtgacttactagtgttcaatttatagaatgatttttgcatgtggatcatgtcacacattgctggctaaccaataggatcaaatgtgactctactacaactgtgaattgtctgatgagtataatctttatgaatgtgtaataatgattcagtttcgagcacatctacaatttgtatagccagggtctggagattatactatgaaacaattgtactagttaagtattacgtcagatgtatgtacataagagccatgaaaatgtttagtgaagcactgaaggtgctgaaatcaaaaccacattgccttttgagaattcattcagtacaataggcaggccatagcgttcccttttctttcctttttcctttttttcccctagctctgttgttattccagtatgtgtatgcggctcaaatccttgcctgatgcttctcttctacgcacagactgagattgagcacagagcaggggaggtgccggggtcattgcagcatacaagtgcacagccagcatgtcaatttccttctgcaaatattcaaagcaattcgttctcttttgggaatgtaacggatgcacttaactcccatacagcgcaaactggccaaacacaaactgccggcgtgttaaatgctccgcccaacccattgcggcaaaatttacactcaaatcatcatccgattcattgttcagcgtatggcactatcaactccctaccagatggaattggagctcaaagcaaccatcctccccaacatcagaatttcatgcactgcaactcgtatgaaccctccatggatgagtcatgatgcttgttgaggatgtgagccatatgaaaacccgcagcttgtttgcttagttcccccggagccttcaagatctgatatcaccttaattgctggagaagtcccatcgattgccgatagatatgctcctctccatctgggtatcgcaatgcaaagcttgtaagatgtcgatatcatcttcacttttttctgacatcttgtacattacaaccaagaaagtccccttcaggtcccgcgtgttgattgaaagattgaagctgcaacctttgcttcagcgtaattgtgcttgcaatattagttcttttctgttgcttgcaaaaaccatgctctggttaacaaggatcaggaggacgaggatggtgcattagttgttgatgaatttactgctgtgttccatgtatatctgttaaagctgtattggttcagagagcctgagagcattgtttcacccttttttttttttgcactctcttttggtgtgtgaatgatttctagttaaaaggtgttgtaaccttacagatattcagaccatacattggttagaagaaagtcttgtataatagataatgtaaacagagaagtctgtgtcctttgataattgatacttttctgctagagtaagttttccatcaaatcaaattctcaaaaaaccgagcgcttggtggaaatggaacacgtatgatctcacgcttgtcaattattactcgggtctgtctgctgtgttattgcataatttaacgaatttaccgaatcaaatgcatcgtttatattcattgtttctaatttgcagcgctaccctataagcggaattttctcttcttcacattgtatttttttgaggacgaggggttatacgtaagaaacataacaccctataagtggaattttctcttcttcgcattgtatttttttgaggacgaggggttatacgtaaaaaacataacagggtgtcagacggtccgaggacctatgcgatattccgtcgaaacgcgtggagctttttgcaaaagtgcaaaacactcgtaatcaaaaaaaaaaaaaaaaggagaaagtcggaaccatattttcgtgacgaactataaacaaatgagagttacagatgatccaccgctgaacgttcacgaactacgagcaaaacggaaattgctgaatattcatttgcaagttcagcaggaaactggaaatagatacaacagcagaaaaggatatacctctgcttccccggttaccatatggaaagatttttacgttacagacatacaagttacagcacaagcagttttcatatgcttgaacatctaatgtcagcggtagcacattaaccaaaagtaaagtaaaaatcacatcttgggagcaagccccgtatcatgcttgggaacatcagctaatatcagtcttaaatcacatctcaggaaactggccggcaagtcatcctttcctactcgctgatcctacagcagctgcttgcagtgacagtcatggtgtggccttgtcagcaagtgagtgggcagccgagctccttcgccgccgcggtgaggaaggcgagcgtcagcccggtggcgcggcggctgtgggcttcccactctatgcatctctccacatcggcttgccagttgatgatgcttgctgccaagcactggtaggttgggctctggatgccattccggtgttccccttggatgagcttactggagtttatttgtccgctgttcaagatgtcgcgaaggacggacatgctgagtgcacggacatgcgcgctggggtgcgaaagacagcggatggtggttgatagacggcactgcatatcaagattcagtcaggatgatggatcatggatgatgatgagtaagtttggcatgaacgtgagtgagatcagagaagaggacatgccttcagcagattggagaggccatcagcgacggatacacctgaatctccccattcgacgatgagatggactgctctggcggttacttccaatagctgctcgtaattgatcccgagatgaaccggtcagtaagcgagatgaaccatacaaagtagaactgattattcttcactgggatttgcacctaaggacctcatgaatgaaggtgttacctctaattgtggtaaagtacaagcttcaccatcaacaagcattccatcagttgctcgaagaagaagatctgaagcactagcaaggatcaccaatgcttctgggctatcgtggttcctcataagctctgctatcagcttaactattcgctggttgactctccacatcttctgaccttgctcatcatctcgagcaatccagggctgcaagtccttctcggcctgtgaaagatacaagagtcggggaagatgactgaggaaatgggtatattttatatcggtaatgatgctgatgctttgaaaccaagaaatgagaacaaaagaagctacagtatggaactttttttttcaaaggtacatacaatatgaagcttttaaatatgataacaagtatgtaaatataacaataacaatatcttgacctgcagaacgatagcagctgaagccttggtcggtgaggctgaaacaatgtcacaaagcgcatccacaacctacccatgaaaaacaaagattatcattgtgtataagaatgctgacaaccaaggacggtcttcatagcattattctggtatcttataagcaggaatgaccatacctttctccaaccctgatgagctgatgtactttctgcagacatctgcatttcgggagatgcaatgagcttctgccagagcaatgagacaacagagaagcatagctcctgcttctctgacagtacagatcttaggagagtttgagaacctctgtaacccccatttcggtccatggtgaggaagtttgccaaatcagaagcttccacctgtaaacttgcaatggctttcccagaagtacttgcgacatcaccatttagtataacatcttctgcacatttcaagagtggtcttgcaaaaccatttttcctgtgtgatcttgaagcatcctttttttccaatgcaccaccatctgatgagttaatgttcttttcctcaatgggaggttcatccttttttactggtgtaagggtcaggtgagcttctagaggctcagctttgttcacaatggaggtcactgttttaccatgcaagtcaatcaaatggtaaagggatgatgccctggtagaaatctcagcatcccacttgcattgcttcagcgcagacagtgcatttaagcatggcctggatcgacgaaataactcagaaacatgagcagcaaccatagctgctgcaacaatctcatttgaactataactccatgaagtaccaacagatgatggcttcaaggagaacagagcttccaagatgccaagtattctacgagtatgaagaatcgctgagctaatgctattgtgtagctcgttactgataccagtggtttttccaggtatgactatctttatggagtccttcagatttgaatggttcccattcttggaaataaaagggaacagctggagctcacaagataaggcacaaacggctgctagaacgtatgagtcgaatgtagcaactggtccttgtctcttcttacatctgtttcttccattggttaatctcgaatcatttgtgacctcctcagaggaatgattatcactaccagttggccttttacttcccccaggcaaagcttgatgactgacgcaaacagttaatactacaaatagtaatctggacgcaaggtccattgaagcacaggactccacaaagagtgaatgtatcattgttcggagttcagcaacagcaaggttcttagattgacttcttggtttcctggattgttcagaggtttctgatggaaaagttcttctcagtatagcttcaactgttgccacaaaaattctcataaggcatgcttcagatggactcccacgaggtaaatactcaaatactttcaacaatggcaagtataggctccatgacaaagtaggtggctgaagtggagcagctacaacaatttcaggcaaatcaactgctgatgaactcagaggtagcaaaccatacgcagcctcccagatggtacatattctccactcaacatcgggaccatgagcacatagcatggaagcaatgccttgcgcagtggcatcaatagtggcttcagatgcaggaacttccagctttgtgcagttgaaggagcacatatgaaaatataagtcaatatgaagctaaaacatgtagggtgcatatattttacgacataatcaaattccaactttggtaggtagcaatatctatattaacttgtttgatgatacctttaaaacagttttaacataatatcctagcagtcataaaatatacaagaatacatcatagctccaaaagaactgatataaacttatcatagcatgttgacgacaagcatacagagactcctaaaaggttacaaaaaaatgaccaaaagatttaattttctattcaaaacaatagaggctagacaaatctagctttgcaatattgtagctaaactactttagtcatgatgatgtaatctggcagctaacagtacttaatgaaaaaaaaattcagaacagagtctggataatgtagccgtttagtgacaagcctattagcatatatttcgagaaaactgataaaaaggaaattgaatacatcaaatacagaataggtagcaagtaggtgcaggaaacactgcatacctgccttttctattcaaaacaatagaggctagacaaatctagctttgcaatattgtagctaaactactttagtcatgatgatgtaatctggcagctaacagtacttaatgaaaaaaaaattcagaacagagtctggataatgtagccgtttagtgacaagcctattagcatatatttcgagaaaactgataaaaaggaaattgaatacatcaaatacagaataggtagcaagtaggtgcaggaaacactgcatacctgccttttgtacgatgatacatagccacctagtggctcatgatggagttcaactccttcggcatgtctcagtggaggaaaaagtaatgtcggttgggagagtattcggaaaagtaaagcagcagacgtatcagcagcgataccagctctcattgacattgcagttccaatagcacgcaggaaatgaagatgcatccagttctttggaagctaaaacataaaacaaagctatgacaatcaataaaatattcaaaacacataatgtgctgttatgataatattgcatgatgtgtcatcttgattgatagcactgaaacaacagccagagagatgtatgatatacccgcatgccagaatcgtaatcttccgctgctctaaggagttcaacaagctgtactgctgcatcaagtgcatctggggcccatgatggtggtgcctcgagaagaccaaaaagcaacctttgggtagcacttggagtagcaattgcatagtatctgacgaaaaatagcatgttagcaatcatttggaaagtacacatggtacaacagtggacaggatcataagagcttacctatgaaacaagcgagcatatggttcaagaggagggagccccgcaaccaaatgttcgtccaatggtgtggtcggtggaggtaatagaagtgcaggaacagctgccgcagtcaaatttgctgtctcataacgagctacttcctcatcacagacacttagtataactccagctccattggcaacagcccatctgggcgtggatggcataagttgtgggtgcttcccagatcctcggctgtaagctgaatgacccaagcacatgttagtaacttgtgtttataataagcattagcatccgagttgcaagaaaaagataaaggtcccactccaatgcagaaaaacatgcatagtatgagctcataaagcccatatgcactatgttttttaagaagcaaaaaaactgaatgcaagtttcaaagtaatttacaaacttccattaaaaagtaatttgcaaacatatcacaccttttttaataatatgtactctagaatctagaaaaaatgtgctcccagtaaaataaacaatcaggctaactttaatttgtaggttatgtcttgtcgccacaggacatgttctacttgtttactttgatttacaatatacatcatttgctttgtcaccaaatgctagtagtaaacaaatataaaatgctcactttcacagcatattgccattcactcctattataatccatactcactcctgtcaaaaataaacttttggtctgatcaatctctctatggacattaagatcaaccatgcaaaaatgatgagtatatttgtccctgaatgtacattcttcacattataatttttccatgctttattaatatattacaaaagaaactgctattcaaagttttgttttgaagaatgtgtttatgcctaaagtatcactttttttttatttgagggagtaagttattgatactccagtttccctttggggatcttaagaagggaactgatctaccaaagaatgcaaaatatgcaattgtagacattgtcacatggtatctcaacagaataaaaagacatgggagtaattaatgttacaataattataaaaaattcacgatagaaaattccattgctgattttaccaaccagttgttggaggcttcaattctccaccagctgcgtattttcccatgactccaccacacctgatgcatttgaagacaaaacagggaatggtaagcgtccattagcaatagaagagtactcaagcaaatttttcatcatcagcagcaaatatatagtatgttccaacatgcttgacaaaagcaagtttacacaatgcatgcagttccattagcatacttttaaaagttgtctatttttcttgccatacttgcattggggaattatgaacatgcatgaagtttgaacttgttatgagttccaccccttgctcctgcgttctgctcacatacttctattattttccgtgttttaactttaaattatatgcgctcttccttcttgtcaatatcaccataaaattgaggttgtatttctcaagaaaggaggatttcagattttcagtccacagaacaataatatgttatcatttattatgactcaccatctaaaatagtcacttctaatacccagaggtgcagcaagcaatatgtctgtgatccaaggagatagtggcctcaatggcttccggtcaggttcatttcttggagaaccgttagcccttttctccatagactcacatgatgaggcctgatcagatgtgctgctacattccgcttcactatgttggtgatcaactttgaagattggcctgttgtagtgagttagaactctaagaatttctccacaggccaaggcccactgctccgagtactctttctgcataaaagttgcatctttatgagcaagagtagtttgataagctataagcagcacagtttagatataatattgaaatgcacagcagaggcaaaatcttatcaaacacagagaaatgaaccaataaattggaactaaccattagagtaggggccttacctcagaagtatggctaaataaagagatgaaggacatgaacgggaaaccatttctatcataactgagtgtcccatctatgatgcgtgacagaatcggatgcacaactgcatggccatgctcaggatgatgaagaacaaaagttgctggaaatatgagaaaaatatgtcaaactctttcttcaattgtttgtggaacatgtattgatcactggatcaaattacctaatacttcatctacaaggcgcttttcttttgatggatagcaactttgaattagctgcaagcatgcaagaaaaagaatgcaaaagttaacacactggagaaagattttatcacagaagatactaaacatgcttagagatacagtacctgagctatatcttcagggaattgctcactgtcagctgtaaactggccaaagtactcaacataggccagaatttgtgccttcagagaggagacgcaaccaagtttcccattgaggcaagtatgttcaacatatagaatttctaacaagaatcaaataggaataatgttacctgtttttgttgtgaatcctgtggtgggggccagaacagtgatgagaactggagcccatcaatccacttctcatttgaagctgacatacttggtagctcaagagcctgcccaagaaactgagagaattctcaaagagaaagaaagaaactacacaaactgctccagttagcaataaaagcacctgtaatcaacaccacgttgaagccgccagttagttcatccatttatgccaccaaagtccaaatcttcttataagctacttgccttggtatcaagaaacttcgagcaagaaagttataagagtgctatccacttcattcaatcaacccccataacgggggtctgcatctcacaacgtgacacgttatcatatcaaccaatgccaaccatatgagcttcagagtctctacactgtaatatatcgcacaacaaaaaccaaaaaaggaggaaaatacatgaattttaattaatgcaaaaaaaaatttactccctccgtttcatattataagccgtttgacttttttcttactgaaatttcttccaagtttgactaagtttatagaaaaatatagaagtattttcaacacaaaaaaaacatattatcaaaatatattcaatgttagatttgatgaaaccaatttaatattttagatattgctaaattttactataaactttgtcaaacttaacaaagtctgactaggaaaaaagtcaaacgacttaaaatatgaaacggagggagtagaaaaaaactgacaaatgaaaagagagggaggtaatgcaacgaaaattgcataatcttacaagcgcattattttattgtcaagtacaactaaattcataatcaaacgaaaaaatatatctaggaaaaaggtggaagctttctcgtttttaattatcgaaatgaaaaggtacatgttgcaatcatttataaggtaaagtttaccataacatttagttatggtgcaagctcacatgtcgataaatatgttaaggaaggcatcatagaaataggcaaatttatggtaatgctaatggatgtggtgtacagaaccattcacttggttcctcgtaggctcctatggcttatcacacaaaatcaatagatgtgtttttcgtgacatttatacttcatttgttattccacgtcactcatcggtctgtttttgttggtcgattataaatgtattgtctaagacagaatttaatgatgttgttctatcttgttattctttctttttttggcaagcaaagattctatttcgggtactatgacaccgaaccagaaagtatattacctaaagcatagaaatggaaaatatataggaacaaaacaggttcttcttttggtgtttaattacaggtgtctctgctcatcggttggtgtctgtattcacttccactgttaacgaaatgaggaagggatcccttgttactgtttcaggggaaaaaatattaaagcagagctagcttactgcgaattaattttcagtaattatccccgcacaaattacatccacagccgtatgcaccacatctaaacgcctccacgaagcagcaaaatccagctagaatcaacgctactcgcctaaaaaaaccacaaaaacctcctgaaattcgcagtaataagcatccatctcgcgttgatctatccgatgccacgaattattacaatactaatcagctcaacctcgccgtcaaatttcaaaactaatttccctttcacgtcttcaaaatcccaaccgcatctaccaccaaaactctctccccccaaacaaaaatcccctcaacataacaccacaaatccacccgaaccacctcgccccccatacacgacaaccttagaaaggccatcatcaaaaccagcctaaaaatagttttaaagaaaaaaccaccaagcacagcacagaaaaactaaaaccgcacgggaaaaataaaaaagcattacctcgatcagcctttcaaccaatccggacctcacgcggcgtagacggcggcggcggcgaggggatagacgcgcgcggcggcgacacgggcggtggaggaggcgcaggggaaggaggaggagagagagagggagagaaacggctcggaggaaggagaggcgagaaaaagattttttccggggatggtggtggtggtggtggtagtggccgcgctatttcccacccgcgcgcgcgcgtggggtgggggcccacgcggcggttccgggtcgccgacacgtgggggcgggtgatgtggggcccacgtgtcggtgataggcgggtggggtagctgcggggtgagatacttattcgtgagtgcggcgggggggtgggaaggctttgcttggcttggcggatcgcctcctggcgattgctgacatggccttgatattttcgggggtgcatggcatgtatgtatgtatgtatgtatgcttggtgatcgtcatgcatgaccccccatggccatggccaatgacatggattttgtggttctagtccttgtgttgtgagattattgcgaaatggtccctatgatttttgaggtactatcatggtaagcggttaaagtggaggtatatatccattttcttttgcaagtgaatgattactttttttagagagttgactaaggctcccatcggttgtcattttacccaaaatgacttatttggcttattagaaaattaaaattaatttataagtaaaacttttgtagatttgttcgtagcgacttaaaagccaacattaacaaaaattacgttaaaagcatttcaaaatcaacttcaaaatcaagttcaaaaattcaaattttggcttattctttggctgtttaggccaaacgatggggctataaaatttagcctctgtattcaaactggatctacacggttaaagtgataagagcaaatttaatagtaaagtcaacaagttgctataagctcctattccatgcgtcccaaaatacaaggttagttctattttcctctcatctctctttctctctctacaaatttaggctgagttctttctccgaatttttcaactcactttcctcgtttttcacgcgtacgttttttaaactgctaaaaacagtatgtttttttgcaaaaattttatatacaaaattgcttaaaaaatcatattaatctatttttttaaaaaaaatagtaaatggtttattaatcataagaaaatgtgtcactccattttacgtgcgtaggaggtgagtttccaatctcacctcccgaaacacaacctcaatgtttctatgttggagtatacgtagagatggctcttgttcgagaggcaacaatacacgttttcttttatttctttcctccgtatatgtttatagttggtttatatctaaatagtgtacttgctcttaaatgatagtgagattgcatgttccttgagcttctaaacaatgtgatttgtatgaaaaaatttgcatatgaactttataaaaataccattttaaaacccattttcagcattgtaaaatttaatttattcattggtgccctcgaacagttatcccaaaaatatccatccatttagcttgcaagaatagggatagtggtgataggacaatagccatttggaaaaaaaataggattattataggacattttaggactatttgaaaaaaatggctgttaggaatcttgtctcgaaaataaattgcgaccgttgttaggaattgagagaatgatacaagtaaaatgcatattctcaatggtcctttaaaatgcaacactgctatactatacttgatatatttcttctttgatttttccctgcatttagatcttcatgttggagtactagttaagaactaaaatcttaacaccacaccaacatgaagccttgattcaacttcttggctgagcgggcatgtttctcaaactagtaaataacatgtttaatttaaagaatttacataaaatgcttattcaaaatattaaataaatcatttttatattgtaataggtaattaatcactcgctaatctaagtattggacgaaacacattttagtactaaaattttggacgaatattgtccaaatttatagtagtagaatttatctcatccgttattattatgttgctatattataggatgtacgaggcttgatccttaaaaaattaccagcaataataaagcgtagccgacaaagtctagtgcttagtacaagtgcacaatactaggttctaccactatatatgtaattttactaacaccgagtcaaccaagccatcagaaagaagggcctaattataattatcgctaatgacgcgtcagacccccgaatatttgaccgattagcatgtcaaccgttggatggaaggacgtggccatcggacggcctcaacgaggaggcatccgcttcgctttaccttctcgggaacggcaatcggggtgacgtcaccgctacgaagctggacggctgtagatcacggatgggaggtcactggacggtggtgcgacgttgccattttttatattttaattgctcgctcgtcctcgtccattattgtcgtggtgggccccacccattggctaattgcgctttagatctgtgtgaattgtgattaggtcgaaatttggatgcttaatggagtaattaacaaagcagagtagtagtagtattaggtttgatgcatgcatgtgtctcactatctctctttctttctttctcgtgatgcccccaccttgtgattaggttgttttgtggaaatgcaatgggctatagctatggctgatagatccatcagatcactcgaattgatatttcctcgtgacctgcaatcatggaggcagaaatgttatcattaattcatttttcacatgtaaaccgggagcagtaatcgtatggatatatacaaagtatgctgatcaaactgtaaattacatgagtgtagtataaaaaccactgactttaggcccgactcttttttgcttaacggatgaatggacgaaaaatgcgcacactttcaagcatgcacttgttgaatgaatatatgagtttgtaattactaacatacatggctgaatggttgtagtatctaactatcttctaatcaagttaatctaattagaccactgaagaaaagccatagaaatcttataagatcccagctgtaacattgttcgatgcatcttgctcctctccacacgtttgcaaaagccaaagttgcagcaccagtggcacattaaaatattttcaaggaacaataattaaacaaacaaagcaaagacatcacaccaaaacttacgtacgctaagaatctctagtcaaatatccaagcaccttctgctttagaactctctagaaccatctagcttttagcttactcctcgtcttcgcagaaaaatatactactcctaatcaatcttagcttaattaccacggcgcaagttactaaccgggtttcgcgggcagtggacctgagagggaatatccgatccgcatcggacggcccacaggcgtccacgctcgccacgagttgacctcgcggcggtaagtgggatgcgtgggtggatggcgacggcctggggatgtgggcccgcgggggcggtgccacgtgtgaagagaaggatggcccaggtggccactgttggaacgtgggtcccaccatacctttgatttgcaaaataattatgccatatctcgtgctaatatatttgtttgttttgggataaaaaatttttatctatgtgagagagctagcctaaatcattacaggtgagttggtgagatgagaatttagaccggtccaccaaacgagatgatggtacatttagacactactctctctgtgaaatactttatctttcttttttgccttcactacataaacagaaatgcatttcggctgaactcattctggctagagcgcagccaattcaaacggccgtatttagtactccatccgtttcataatttaagacattttagcattattcatatttatatagatgttaataaatctagacacacactatgtgtctagattcattaacatctatataaatgtatagtgtgtctagattcattaacatctatataaatgtgaataatgctagaataacttacattatgaaacgaaggaagtatgtgttacagtgcaactaaactggtctatattttataacaagtgaggattatactatcttactactctgagttgtgagtaggacaagtgtctggttatgtttgcaacgatgaggcgaagttgtctacctagtgtttttgctgtgacttgtgaggccacacatgtgcaaaggctgtgtgcttataactatctcgaggattgattcggagcggcaagtaaccgacggtgtttggtgcaaggaattcaatccaagcaaaaaaaaaaaagaaaaagagaaaatctatctcagccacgcaaataattactcagcccaaatcaaagagctccatcaattagcctaataaaataaagtaaaagtcaaaatttaaatttcgaacttgattttgaagttgattttatgacattgacatttaaactgctacgaacaaatatataaaaaattatctataagttattttttattctctaataatctgtgttttggtctattggtgaatacgcacaagagatgaggctgaaaagccattgggcatagacggacaacacggggcgacgtgtccgggaggcgaaggcgcacggagcacaaatccgccttcgcttctcctcctcccgcggagaaaggggatgatggccaatgggaggggagcaaaggatattttctctctgatgacaagcccgcgtccgcgtgtcgacccggggcgcgcacgaataatttaagcaagcggggagacccaaccgagaggggaggggacggccccacctgtcagcgcatgcatggatggatggatggatatgcctagccccggatgggtagcatgggcgtggtggggcccaccagctctctcaacttgtcatgttggtccctgtgagattactgtatctccttcaccctactacttctaccctgcgatattggcatcacaccggttttttcgtgctaagactaacctgaataaaaaactgtctagattcgtattattatagtatatcagcatcagatactgggttggttttattaggaagaaggaagtttaaatgttattttcttcgtcccagaaaaaaaaaaactcaatctatgagacggaggggtactacttgcatcccctgtgatcctatgattcttcgctttgtttagttactgaaataaataaaaaaacgcattatcattacataaattggttcctaaaatctgcaatcacttaaaattgtaagatcacatactgcaagagagtatctagccaggatatgcagtttcgtggaaaacccattgagatttgtgaactggttttttgatttcgagccagctcaaaattggtcaacatcaaggaggagttcaaatggtttttgagaaattcaaatctgaaatagtagatttgattgaattcaatcaaaatttggttcgacatctggctggcagcagcagcagcagcagaagaactattacctccaaaatatactccttgaagtgaactgtccactgtcgatggaacaaaaaatgtttgtctccaacgaggtcaacttcaataacagtccaaacaaagagagaaaaacatgggcgccggcataacacaccagcaagcagattggtagtttgggagtacaatacaagcagaaagactgcaaaggtggactactggtgggccctgaacacattaaactgaatacttaagcatatgaaacgtgcagtacagtatgtagtacttgccactaaattgtgcagaaacagcatgctcaactcaggtgactggatgccaccagtggcgaagccagaataaaaattactaggcgttcttgatatgcttatatactaatttttaagtaatataatgcttaatataactaaaacacctagaaataaataagctatccggtgtccggggacaccgggtagatacatgtaggaacgcccctggatgctaccaaccgtgtgttactgctactagtaatactagtacgacataaattgtactgaatgcgatttgaacaatgatcctgtcaagtgtcaagaaattaattgaggtggtagaggacaggtttaatataatccattattaaaaaagaaattaactgaggtgctctccgtatcataaaaaacatgcatatccatattaatttcataatattaagatatgaaacatttcatattagattttttttagacgagaaaagtatttagtactctaaatcacaatactccaccataataacctgactaactatagtattactccgaggcaaacatgggtaaacctgtcaaagactcaaaggtcctgattgagagggcttccagttcctgcagcttttcccattagctccagcttcccagacaatttagattatcagaatatgtagttagaattcaaaaaataaactagaagccaaaagatagaaaaaaaacttctccaaattcttagggtccccttgaatcacaagaataaaaaaaaatagagaaatagaaaaaaatagaattatgacagtattgcaaatataaaacaaaatattacaaaacaacacagaaaacaacacaagaatgaccgtttgattggaacacaaaaaaaaaggaatttgagaagagataaagactcggggcccctttgttcgcaggataggaaaaacacatgaattgaaatagtatgtttctcaattcccatatgaatgaaaaaccataggaaatacaatgggagtaatttgatagtgccatgagaaaaataaaggaaagttcacaaagagatcacatctatcattatttttcctctgaaatgtgaagcacatgaatacaattctatgagaatttttctttctttcctatgaattaaagggacatgtaggaaaaaaaaatcatacaaatttgaatcagagtttttctccaaaacttacatgaaatgaggcattccataggaatttaatagggctccatagggtacattccttcgattcaaaggactatataggaaaaatcctataagaattaaatcctctaaaatttgtatgattttttttcaaattaaagggattttaaaaaattggttaccaaccagctgcttattataattttagtctccccaaacagggccaaagttttgctgacacctgggagatagtggtggtactgtaatgtacaatggccaatgggggatagctgcttcagattagccaacgcaaacagataggttcgctgtccgctcaaccaaaagatgataaacatgaatcacaaactgttgctggacatcatgctatccatatgtcgcgatcgacctttgcattccccaacttgattagttagtctcgcccgggtttacctttcgtcctttcccatgaactggtaacgcggatttccttaatttttactcgaattttctttttggaatacaaatttctcaaaaaaattcgattttttttatcgaaatctactttttgcccccatgtcgaaacctcaaaaatttaatcagaagataatgcttaatatatgctatccaaaggcatcgatcgcatatcggtcggtctgctgtatggcccagttggatctcaatctactcaagttgccatttctcagcccaaaagagattcagcgtggatatcaattgggcccagcccaaagctctacagatagatccccctcttttccccttcttttcttttcgtgtacaattttccctttccctgatttaagaatatggaatatatccttgaacacccccacccccccccccaaaataaagtgaatatatacaggcttaacataagataagtacactaatgcatgcatgaataacgtataatgattgtcatacagaagacagtatacttacgtgctcatgatcaactgataaaaggtccgatcagctaactgataaaatgcacgcaagaaaggaataaagggtttggacgatggaaaagagagctcaacgtacagacagatcgatcgacatagatcgagagggaaagagacatgagagaagcccgcaagttatgctgtccatccatgcgggcgtccagctttttttcatcactatttcaccggatccctaaactgctgcttgtattcatccatcacctacaaacaggacagaggtctaacttctaaatctattatataattaaaggaataggaaaaggagcctccacgttcgctcttatagcctagaaattctcacattaatcagagaaaaagaaaaaaacagagtccatatagaaatacaatttagaaatagctcaaattcggaattaaaaaataaaaaatattagaagaggagactagagtccatatagaaatacactttagaaatagttgaaattcggaattaaaaaataaggaatattagaagaggagactagagtagttattacacattagtagttttgaaaagttattgcaaaatttaaaattatgttgtcagtgtaatatattttaataatataatgagaaaacatatatgctattatatgagagaaaatataatgatgctagctgcacaatttgcacgggccaccatgctagttaaactttaattaagagtcggatttagaataaagttgtaaagtactagtgtcttgaactccgctccatcgcactagtctatttcatgagaccgctcaacctctctagtccatttcattttcatgagagaactctaacccgtttcgctctcttttttaggtttgagttgaaaccgtttgaatattgagatctacttcaagagctacaaacatttgcttaataacccaccggctacagaaaactgtactccataatattactcggctacgtacaacaagcgctatatataagtaattatcaccagcctaactaactaacataactatgataacggtgacaaattaaacaacagtaacagcaaatagtaataataataatacacacacaagcatgtgatatcgaaatgcagtcgtcgatggatatatgaccagctagctgatcatcagcttgtggatcggagtcggagaaggcgaaggacgacgacgacgacgacgacgggagagctaggtagaggaagcaagctaccagatgaaggtcatctcggcggaggcgcgggcggcgtcgtcgtcgtcgcgggagggggagtggacgtggcggccctcgtaggtggtgatcaccatgcgggggtcctccgccagccgctccacccgcttcttcacccggcagttgtcctgcgtgcaccggtaatagctcctgcatatatatatatatatatatgcaaatatatatccacaatcacacacacagttaaccacatatatacttcagtacgtgtgtgtgtatatgcgtaggagtgtgtaaatttgctttaaggttatcacttatcaacaagaaaatcgattttgattaatcttgccttttcttgcaacacaacgcacagatcaaaatatagtatagtaatacggagtagtattgaattagggactaactaatacgcgtcgctagtagcctagctagtaaatacatgttcggatgacatccaaacaactttttagtacggagtataacatactccaagtagttctgtttagcgttatggcaacggatgcttttgctagctagtagatctacgcacgtcctaaagcttagatatacctttctacccggtactgctcgtgctactctattctacctacactctacaaatatggagtatagtttttatgtagtcggatttccaggtgaaagagagattacaagtattctaggaattggtatgttaaagtacaaggagagacagatattggaaaattctcaatcatggcctgaccctgctgacacaccaactagctaggccatggagataatattccaggctacccagctggtagcatcattcctcatctcaaacctaaggggcatagatattgagaaagatgtggtaataattacagggtacaaaaatcttgggccctttgcaaagctcaaatccaccttttcatcatctcatggccctttacccaacagtaaagattctccatcagctcccacagccaacaaaaagcagatatatcacacatccaatatatattcactttaaggcaatatcataattgttttttcctagaattttcaagcaaaacatgaaaaaaaatcagcattcgaaataagaacatacccctccatctaaaaaaaagtctaatactaactatgaacctggacacatatatgtccaaattcgtagctaagggttgagttttatggaacggagtagcatatatcaccacgcttatactttcatcctctcgcagctctacataagaacttgcatgcttaattatatgttggcctcaaccgtctaaagtctctctactgcatatcaacacccacatataatacctacaattgttcgcatgaacctactaatatacttctatatgtccagattcgttgtagtaaaaagtggcacattcaatgtttgattgggttttttttgaacggaagaagtaacagcttacacatatacgtacaggttgcgatcaaattaagttgtctcataaccagatgtatttgtgagacttaatttgctcgatcgtcgttacgttgacacaatctcgacgctaattaatactgtatgatacgatacaccagattatccattactaatactaccctgcagtattagttttgacaatcaagaaagtagaagaaaaatgaggatgattgccaatcgattggaaaagtcatgggtgtgttgtagtagtggtgtgtgagccagaggaccggatgggaggagagggtttctgagtggcatcattgcaaggggctaatcagattggactggatgctgggctcatgtctgctgcggtgtgggtcaatgctttggcactacctgtcatgatcaccatcacgcatagacagatgttcacacaagcacagaggctcctaggtggtctgccaggagatgatatagatcttgtcatgtcatttccatcaattttatagtagcatgaatagtagggctgtgtcgagttccacgttaaatttagaagctcgaaaaaattagaacaatatcacgaaaaagttagaagtttgtatgcgcagaaaagtttgatgtgatggaaaagctgaaagttttaagaaaaaagttggaatataaacaaaaacctaggtgcaaactttatactccctcgttgatgtcactagctacttctgattatcctaaaataaatttaattttaagtaatcattatatcatatcagagtttataaaaatacatagagaataataaatatattaaaaataaataaaagggaaataattacattaagattcgataaagtgggagtattctagtctttatattttgtattggtatatatggaatgagtaaaaaatgaactttggtacatagagtaatttttttaattattacttcttccgtgttaaaatacttgttattgtaggcaattcagccttattaaatgatgtcaatatgattaggagtagtacttcagagtgacaaatattttagaacaaattttggaaaaaaaaaaagctactactttctccgtccgtccaaaaataagtgcagccgtaagaatctgtgtccaacatttaacgtctgtcttattttaaaatattataattttttttaaaaaaatcacacataaaatactattaatgttttatcatctaataacaataaaaatactaatcataaaaaaaaaatcaaataagataaatggaaatgaacagttcaaaacaaaataaaatgtagaataaaatgcatcctccgagtgtccatatttatagaacaaaatagaggtggtattaataaatgtagaataaaatgcactcccgagtgtccaaatttatagccatgggtaattcttttttaacgaaggaaaagtatattcatagaggtagattaggaggtttcataaattaaactgcacaaaaaaatgctttgctaattcagtatcataaaattatccgatagtaccaattaagattacaaattactaagatagtttgcttttcttctgttgcgacagttgttgtctacacatgggatgagtggacgttagtgggactgttagatggtgcaatgagcattcaacctactaagttaggatgcacgtcattctctacatgggagctcagttggtcctacgtgaaatggactagtcgatcgatcaatttcattcttgaacagaatgaaacaaatgtagcgcaatctgacccaatctagctattctggagtgatctaatcatctacctgaagcaaaatatcatttgttggtggttagttggaatattagtaatcactaaaaaccggggaaatagttgcatattatgtataaaatcaagcaatcaatgccaaagttattccacgaaacaaaggaatatagatatatatgagcgagaaagatacactggtggagaaaccatctttggtcggtccggcaaaatccacaatagtcccggatccaaaaagaaccgggactaaagattgtttttagtcccggttataaaaattttgatctttagtcccggttggtaacaccaaccaggacaaaagatgatctttagtcccggttcatccgctgtcagatgtatgtcagggggccgaggatctttagtcctggttgatgtcaataaccgagactaaagatcaccactttagacccggttggtagtaccaaccgggactaaaattaagggctgcaggaa

SEQ ID NO: 4819 - DNA, 28142 bp, Oryza sativa
tgctattatatgcgataccaatcaagaatgcaagggatgctatttcatcatagcaggagccagtgtaaaggtgcttgaacttaagccaaaagaccccacaagcttagtccaagtgggttggcctcaaggtggcttatttaaatagcataaggccacatatagcagacaaacagcttgaaccttcttcactagcattttttttaaaaaaacaacagtgcattcattccatgaagttggggttcttttctctgagttggtttggcatgctctattatagttttctagttctttccccccaaactagcaacttcgttattaccctcttcaggagaaagacttgagggtggaacatcatttgcaccgtggtcgagcactagctgctttcaggcatcttcttggtaaaagagcttcacagttaaaatcagccaatgcaagccaagtgatctcagtgcagtctagtgttcaagcagatgtacaattgatactagctcctttaagtcaaactgaacgacctattcttctatcggtatgtccatgtttcttgctttttttttttaactttaaaatacttattctgctggtattcatcagtcctttttgttgcaaatttgcaatataaatagtttaccatcatatcactgtccaaactccaaaataactgagttgccaccattgttcaaattttattcatctgaataatcagaggcctgcaaatatgaacaaatactttggacttctatagtgtaaatgtgaacggacatatggaggtattgactgttctatttagtagtatttatttggcacttgtgaggtgacaatattccaaatattttatgggagtgtgatatgctaaaattctacttctagttctgacttctgattctattatactgaaccattgaacatttaatcagcataagcttgcaaaacttcttatattaatttgtttatttaggaataggttgtcatatttctattttttaatgctttaggttgttggatgtcttttcactttcctatgccttttcaatatcaggtagctccacttgctatcacaaactttgaggactcaactcttgttgcttcgtgcacattcctgttggaactctgtggtctctgtgctaacatgcttcgtctagatattgctgcacttcaacgtatctcctcctactataagtcatttcagcaaaataaacaatgtgatctatcttcaccgaggagtcctgggctacatgtactctcccatggagctgaccttgctcctactcttgcccgaacattagcagaagattatatccagtctgatcatcttcatgttttggagcagaagcagccctctaaggctcccaagagggaacattcatcacaacctcttaaagctattctgcatcaccttgaaaaagcaagtttgccagtgttagaagaaggtagaacctgtggattttggctcttgaatggtattggtgatgcatctctttaccgaacacagcaaaatgaagccagccaacattggaatttggttacagaattctgtcaggcacaccatctgccattaagtacaaagtatcttgctttactggccaatgacaatgactgggtattcactaattattttcttctcatgttggatattgttgtttatatatgtccacacattaatttgatgcaatatttttttggcaggttggttttttaacagaagctcaggtgtcaggttttccaattgaagttgtcattgaagtggtattgtttcttattttggaaagtagacattttgattatagttcatggggaaaaaaactatattcatttgttctctctggttttgtgttcaggcagccaaagagataagggattcaagattgagaactcatatactaacaattctgaagaacatgatgtcagctagaaggaaatcctctagtaatgtatcttcaggaagtgattcctctttctttgctgttgatggtgacaactctatggaacttttctctgttcttgctgtctgtgaaaaacaaaagaatcctggggaggccctcctgaataaagcaaaacaaatgcagtggtctttattggctatgattgcttcttgtttttcagatgtgactcctctctcatgcttaagtgtttggcttgacattacagcttcaaggtagcacattgagcatgtcatctgtagaaattctgttatctaattttgcaagcttcattactatcactggtgtgtaatattattgcattggcatttatgtctgtcatcagggagatgtcattaatcaaggtggatgatatttcctcgaaaatagcaaaaaatgtgggatccgctgttgaggccacaaataaattaccaagcatgagtaggaatgttgaatatcgttacaacaggaagaatccaaaacgaaggcgattcctagaggcttctcaagaaagcttcacatcaggtttctcatcatgtggaccaagccctactgcaactcctaattttccaaattttgatgttcagcagaaaatactgaagcccatatctgaagagactaaaattccagttgatattgatgaaagatttgcatctttgtcaagtatggtagcagtgctttgtgaacagcagttgttcctaccattgcttagagcttttgaaatgtttctgccttcgtgctcccttctccccttcattcgatctcttcaggttggtatatattcattttttgaaagtactggtttattcaatttaacataatcatttgcactatctttttaatttaacattatcatttgtgccatctttttaatttaacatgatcatttgtcctatctttttaaggcattttgtcaaatgcgtctgtccgaggcttctgcacatttggcatcattttctgcaagactgaaagacgaaacatcccatgctcaattaaactcttccaaagaagagtcagctatggcaggatgggtagctgttactgttgtaaaagccgcagatgcagtactctcgacatgtccatcaatttatgagaagagatgtttgctacagctccttgcagtggttgatttttctgatggtggctcctcagcagcttactttcgccgaggttattggaaaataattttggctgaaccttctgtatgcaaagatggtgatacctacaagtggaatgattccatggatgatgcttccctcttagcatcattagaaaaggatggtcgatgggaggaagcacgaacttgggcaagacaactggagtcgagtgatgtagcttgggagtctacttttgatcatgtgacagaatcacaggtatttggtttgtaccttcatctgttacattaccaagtgtgcccttatgacttttatgctgatatgaattttttctgtgtgtgtaggcagaagctatggttgctgaatggaaggagttcctctgggatatcccacaagaacgtgcagctttgtggagccactgtcaatcgcttttcatgaaatattctttacctcctttacaggtactatcttctgaaatagcctaatatattcttcatgtggtcttttatctgtataaaatttatcggttgtttatatccattcaattgtgtttgcaggctggatcttttttcctcaagcacgctgaagcggtaggagaagagataccggcacgggagcttcatgaaatacttctgctatctttgcaatggctaagcggaactatgactaactcctctccgtaagcttctttgtaatatgtattgctgctgtacttggtctcattatctccttacagatatatatacattttttgcagggtatatccacttcatcttctccgtgacattgagactagggtttggctcctggccgtggagtcagagagtcagtgtaaagctgacggagaatatgcaccttccagtgttactcaaaatctagctactggaaacaataccaatattatagaacaaacagctgatgttatcacaaaaatagacaatagtatgagttcaccacggatgagaataacagaaaggaatggtataagggacaacaccaccccatcattccatcaacatttgcaactctttgagtctaatggcgaaggcgtacataacacaagagcaaggcgaagatcaaagacaaatacgctacttagacgggttgccaaggatagtgttgaaagtagcataaatgattctggtgataattctaactcctttaatagctcaaagattgctggacaagcaagaagtttactgtcagaagaggagtttgcaaagatggaagtgtctttatccggttgggagcaaaatgttaggcctgttgatatggagaaggctgttctctccttactggaatttggacaaataactgctgccacgcaacttcaacaaaagctgtctccatcgtatgttcctgaggaacttgtccttgttgatattgctttaagagttgccaataacagcagtaatggagagatcagtttatcatgctttgacccagaagctctttcaatacttcagtcactaggaagcaatacgactgatccatcagaggtctgtttttttccattgtacttatttctttcagaactttctattagactattacgaacattaaataacaggattgattgtttgcatgactaattgaactgtaatgatgaaattacagtaataaatattttgctcgcagtgcaaaacacaacaaaagagttagcacagaaattggtattgaatgctactgttggtattatctcagattcattcattttatgagtacaatagtgctccggtattaatgatcacatggttactgccttttccatggtcagaattacaggctatcattgtctcttgaaagttttggtaataaatgtttgagtggtgcacggtccacaaattacaacaagttgttctttcttttatgtcaggttatggagaaactagccatgaaatgtggcgagggtcgtggacgagctcttgtcaggagaatagcagcagttgttcaaactgcaaaagtactgggactcccattttctgaagcatttgagaaacagccaattgaacttcttcagttgctttctctgaaagctcaggattcttttgatgaagctaaatttctggtggagacacacaccatgcctgcatctagcattgcaagaattcttgctgattcctttctaaaggtacaccaactacaccatcctttaaacacacttcattttggaggaacagcaaaggcattctatatattgtctaatgtgcttttaatatttggcaggggcttttagctgcacatcgtggaggttatctggattcccaaaaggaagaaggccctgcacccctgttgtggaggtctagtgacttcttgaagtgggcaaagctatgtccatcagaaccagaaattggccatgctttgatgcgtttggttatgactggccatgaagtaccacatgcttgcgaggttgtatgatcttctaagttaccaagacaatactgatttgtatacatgcaaatgccatcttctaagaaatataacttatccaaacagtgttatgcaaagttcatgtttgacccttgatatattatcaaggtataatatttaattagtgtcagtatgattatgccataaatttgttaatttcaaaaaaaaaacatgcacatcagttttattccactcataaagtgactaacttatggaactcaagtaacatgcactcaacttgatgaggtgtcggtgtttaaagtggtggcttatggaattatggaacaaatcagcttaataaaaaccagttgatttggagtattgggatttcagtccttttttggttcgtgcttcttgtggcctatgggtaacaagtatctattactcttgcgcataaccttatttatttcactgcagtattggaagaaacaagttataattgtataagatctgaaactcactgactcacctgtatttgctttaaactggccagtgctggctagtgccctgttgattgtgaaagaatttgctagtttccacattctttgcatcatatattagtaggtttatactgagccactttttaagccattgcttatatagagtgaagtgaagaaccaatttcctcatttgaaaactagaagttatccatctttgtcagtcttgcgttgtatttagttcagtattcctagtgttgttaactataagttactgacatttgactgtggcctgtgggttgcttgaaagtaatcaaatttgcagaatactgatatgcatgagccttcgttggtattgatatgtttgtgttatcttatgtaaacttaatgtatccaggctacttagctaccatcagattgactatggtttggtttgaattttactgttgtatgctgttcccttgccgtctctgaactttccatttcaaatgttttgcaggttgaactcctaatactgtcctaccacttctacatgtcttcttcttgtctcgatggagtggatgttctagtcacatttgcagctaatagagtggagtcgtatgtgtcagagggggatttttcttgtttagctcgcttgatcactggagtgagcaattttcattccttgagcttcattctttccatccttatagaaaatggacaattggagttgttacttcaaaagtactctgcaactgactcagccactggggcacctgcatcagttagagggtttaggatggctgttatcacctcactgaaacattttatcccaagtgatgacgacgctctttctctggtatatatctctctctctctctccctctctctctggaaattttggtttctgaaatgtattgatgtctgagacacgttcttttaccatccaattagtctgcatacaatcaaacaaccgacataatgtgtgatccaatctaggtccaaagccaagtagtgcatggcctgaaaggagttcatttatcacaaaggagcatcactgtggatatatctgatgacctaatgctttgtcaaagcttaaaactgctgattgagcacataccatgccatcttcgcttttgtgcatacagaaaatgtgctaacaacagcttgttttaatctgctagagattatctagttgggaaatatatgaggtttgttagtaaactagagatagagatcagattagtttccgttatattcaacattagtttcttggatgtcaagtcagtccatcctatatataaagcgaccccatttatcatattatcaatcaagcaatgaatctaaagttagtcaaataaacctcagaacatctcttagctcgacagggaagccctgtcagcgcaatttgacgacgagtgccctatcctctgtctaactatcttcatgcccttatcctagccagttcataagttctatctgttgattgagcacattcaatgccatctatgcattagtatgtacagaaaattcattgagcaattttagcttatttagcatctacatgaagaataaaagaaaacctgagactttagtttccttcatagttagtcgatcctgacagcttcacttttacaatgacaagacatacctcctggctgtttctttacattcttacaacctctgtatactatgcaggtatataagcactttgacatgaagcatgaggctgcttctctccttgagtcacgtgcagaacaatacatgaacagctggttatctcgatatgacaaagaaaggaggaatgatgagctccttgaggctatgcatcaccttgttgagatggctgaggttctttcaacaattgatgctggccaaaggacacaccgggcgtgtgcgcgagcttctctcctatcacttcagatccgtatacctgaccttctgtggattggtctttcggaaaccaatgctcggcggattttcgtagaacaatctaggttccaagaggccctcattgttgctgaagcatacaacataaatcagccgatggaatgggctccagttttttggaaccaaatgctgaaaccagatctaattgagcaatttgtggctgagtttgtgttggtgctgcccctgcagccaccaatgctactcgagcttgcaagattttaccgggcggaggttgcagccaggggggaccagtcacacttctcggtctggctttcgcccggaggcttgcctgcagagtgggtgaaacatcttggcagatcgttcaggagccttctccgtcgaacgagggatatgaggctgaggctgcagttggcaactcttgcaacgggatttagtgacgttcttgacgcatgcaatagtgttttggacaaggttccggagaacgctggccctctaatcctgaggaagggccatggtggtacatacctccctctcatgtaaatccttccattttgatccatcttgttcaactttcggcagactgaatcttacaggagttcagtatatagtgaggtgagaatttttcccgtcctttctttgggcctgcgttcagcattctagttttttgatacatatggatgaagccatgggagatattcggtttgtatatatacaagcattctgagtggataagatgaacatagccgattgagagtgagtttttgcggcttcagtcggtggaagttttcgtgtgggttgtagcgccgtactcgtggtgcctgatgtctgtagtttgttgtaaattccattgacccaaccatgaaattttgtacaattttcttcacgtcacttatgcttcacaagatactcattgatatgctggttgtctggatctgaatccatcgaactgccatgaaatctgaatccttcaggaccaattgtgagttcagagttctggcagttttgagccccctagtcctgcttgagaagatatgcacttgatcagattgtgcctttgatattcttgataagattgtgctatttgattgagattgtactgttcattcccaacaaccctggcggcgatcgtccaacgccggatggataattcttctcacgtggattccaacaatccatgccacacgagacttggacttcttgctaagaaaaagaaatatagcattccagtaggccataaggaaatattcaagcctaggacggccccaatttcgtctgccaccaccaaccaaaccaaactcctcacgagcgtcgccggcgaggcgaagcagccgtagaaaaacccaagatcagcgagttgcgtccatctctcgccgtctccctcagctgctcagctttgatatgatagctcaagggcgatacgtttagtatggtcgccggcagcaaggagctcgcggcggcgatggccccggtgacccggccgcgctggtcagtgctgccggcgccgcctcgtcgcctccggtggccgcccccgccgcccgccggaatcgccgccgtctgcttcggctaccgacgtactgtaactcacctctcgcctcctctacaactctactagtacttcactgttatacgtggtgatggagagtgcgtacgagtggttaggaacagcttaatatttttcagttttccagctaatctttgtttagatttttcttttccatttgtcttctataattacttttccccgttctggaataattggcagtaacagtaataaaacttaaaactctataaagttataaaaaatactttccatttttccatcttgcttgtctctttttaaaaaatacttaaaattatgtcataattattaaaatatctgatgtcgaaaaatattacaatacggttttcattcatcacaatataattatttaaaagtaatttgtggttaaagtgagatgatcgtaagtattattgcgactattattaacaaccggcggtactataaatcaaattaggacaatgttattcatcacagtaacaattgatcaccccattctctaccatttgtgtagttttcccaaatcgaagttcaattatgcaaacatgcatttgctctgcttatatttataagccaaaatttaaatagaacttagttttgagtttgattttttttctaattgtactttactttacatcatttactaagtacatgtactttttaataaacaattcggataagtatacgagtgagcgcaacaatgcttccataattctaggggatgctttgcttcaaccatttggtcgaagcccaaaagtgagtaatgaaagcttcatttctctacttcccacgtgtcaccctgacgtgcactgctggcagctgacgtggcactcccgtaattatatatattttcccctggaagcttcctgccctgcccctccttttcccacgaatcccgattccgatccgattccgcggcgcactgtcaatcccattcccattcccattcccattccctccccccgaaacgaaaacgaagcaaaaacgtctcaacctctccgcctccgcagatcgcctccgcgccgcgccgccgccgacaatggtcgccgtcgacccgccgccgcgggaggccgcggccgccccgcccgccatgaagcggagcgcgagcttcgaccgcgtcccggaggaggcgcgccgcatcctgcaccgcctcgccggggagctctggggcggcgacgtcgaccccgccgcgctcgccgtgtcccagctcaagggcgccatgaccaacgaggtgttccggatcacctggcccggcggcggcggcggcgagggcgagggcgagggcgaccaccgcaaggtgctcgtccgcatctacggccagggcgtcgaggtcttcttcgaccgcgccgacgaggtccgcaccttcgagtgcatgtcccgccacggccagggcccccgcctcctcggccgcttccccaacggccgcatcgaggagttcatcaacgcgagggtacgcactctctctctctctctctctctctctctctctctctctctctctctctctctctctctctctcccccatcactcctctgctcccaatggcaatggctcattctcctcgtgttctgctcagacgctctccgcggcggatctgcgcgacgcggagatatcctcgctgatcgccaagaagcttcgtgaattccacgatctcgacatgcctggacccaagaacgtgtcactgtggcagaggctgaggtacgcatccccttcactatttctttatctccattaatggcgagaaccacgagcaatccccccttccagaggctaatttcactgtgcttcatgaatcaggaggtggcttgaggaagctcgtggcaggtgctcgcccgaggaggctaggcagttcagtttggagaagctaggtgatgagatcgcaatgctggacattgcattgtcaggggttgatcagagagtaggattttgccacaatgatctgcaatatggcaacattatgatatatgaagaaaccagacaagtgaccttaattgtaagcgactcagtatctccttttacaaatgctccgaaatcaggcgaacagctctgatgcttgatttaaacataaatttgcatctgggttgcataattgaactagtatgaagcatatgatgttggtaattcttggaatgggagcaattgcttaggtcatattctgttaatattttgctgtaaataactgctgtcttgggatctcttttatccttcaggactacgagtatgcgagttttaatcctgtggcatttgacattgctaatcacttctgtgagatgtctgctgattatcattcagccacacctcatgtgctggacttcacaaaataccctggtcagtactgatgatagccatatctgttaagttctacctgcgcgcatggctgtgtgcatttcactgagaaaaaaatcggcttgtttgacacctctgcatatttcaggcattgacgaacaacgcagatttgttcaaacgtacctcagctcttcaggtaagcaggatgcaccttggcaccgttggcccgatgaaagaaaagggaaaataatgcactttgggactgaatgaatactgatgctgcattttctgtaatgtgccatgagtgattttaatcttgattgttccttctgtttatcaggtgagaacccatcagatgcggaagttgaacatttacttggcctgattgcaaaatacagtcttgcaagccatatcttctggggtctttggggaataatctcagtaagctctcttaacacagcggccacgccaatggcaaatgtgtatagataatctatttagtgatcttacaaagctggttggtatctgtttcttgtctccaggggcatgtgaacaagaacatcgacttcgagtaccaggagtatgcaaggcagcggttcgatcagtactggaagacaaaagatcaaacgctgggatccaaatccaactagttgatcacacagacacacagagcattcttctttcatgtcttgtgatccttttcttttatatagctttgtctagtcttgtgaattctcaattgtgtgtgtctgtagcagcagcagcgtagctgccaagtttttactgtaaaaatctttcggctccttgcaaacatgtccttcgtttccgtatcatgcgattggagtagggcagtaggctgggtgatttttctcggaggagattttctccggtgccatgtgtgcagcggcggcggcagcgcgcctttgcagagtctccacgcactgcaactgctgctgccgtcgtcaggctcgccggccactcccactctcatcgccgatagcacggagcttctgaatctttctatggatctgaattgaaacgaacaaaatgcaaggtgccgaaacgaaatcgctggtcctagattctgcagaattgatgtctttatctgtaagaaagattcagttgaatggcaacaagggcaccagtggtctagtggtctagtggtagaatagtaacggcccaactattcattcttcaaagcccacacagaaaacttcgcctccatccatggacttagctccttactctatatgggccgaataattcggcccataaactctctcctcatctcctccccaccctaggccaatacatccgcgcgccgccgactcctcctcttgccccccctctcgccgcgccgccgccgcctctgcccgtcagacacacctcccccctcctcgaggacaagggactctcctctctcgccggcggcggccgtcggcgacgacgtactagtactccacccccactcagctgtactgacgcggcttgtgtggatccgagcttggattggtcgattccttctgttctcgtgagtcggtctttgccctcgcggttcgttttgctctgccttttttttaggttgctatctgtatattatgtgaacaatggcgcaccgaagttcactcagattcttgactgttttttgttgtttgctgttgctgttgccgctgttgaaggtaaccatggccagtgccaagcccgccgctgaacagaaggctatggaagggggcgagcaggaggctctggatgaaatggagaagaaggtgcacaagtactcgcgggggaaggctgcttaccttggggtgagactgctgctaaactacttcttcttcaaaaatctgcgtccctgtttgattcacatgtgtatgtgtggtttatgttgggtttatcagactcttcgcgacaagaaattgaaagggcagctcgccgcaagagagaagctctatggacactccgccaaagccgccgttcagaccgagaaggtgcggttgttgattcttgtaatgaatgtttctgggagcatatgcaacacaatgggagaattgagaatctgtcgtttgttgatctttatttttgcttccaattttgcagtggctcttgcctaccgagggcggctatttagagcctgatgatgatggtctggagaagacgtacagatatcagcaaacttcgctccgggaggacgtggatcttttgagttcaagaaagccatttgatatgatcttaccttgtaagtgtctaaatctgttttttttgttctttgaagctgtgatatcataggcggcttgttaaatcaagccctaattttttcccctgctacattagatcttgataaatgaaaacccctatctcaagaaaccatcatcttgcttaatttatccattactaattttggtttaaaaaaaactaaaaagaagtgtagaaggaacaccattagtgttttcaattgaattattttatttccaatacacttattttgtagccactataaaactttccctgttcctcttctgtaaattcccccttcttcacttcttctaattgtggcaggggtacactgttctatttatctggatgaatgctgatttttttttgtttaaatatatataaccatagcatttatttatcttcatttctgtatcatcatgtaacaatgtatcttttttggaataattgctagatagcacttttcatctacttgctgctattaacttttcggatgacaaccaacaagttatgagggattgactagctcttctcttatgatgcagtacttggcccttatactctaggatacacgggaaatggccggtatatggtagtaggtggacgaaaaggtcatgtcgctatgatggatatgttgaatttggaactcgtcaaggagtttcaggtcattttttcagaactcaagacttttcccagcatgcattttttttccttatatgagtcatattttttacgtcttcctactggtatttctatccatgcgtttatggcactttctgttgtagtagaggtttctggttatgaaagaacagaaccatctttatcctggtcaaattcctaccatgtcccctattctttcaagttcttttccctggctatagtaatcaacatgactgtttttaatttgcacaggtgagggaaactgtgcgcgatgtggcattcttacataatgagcaactctatgctgtcgcccagaaaaagtaatttccttaatatactcaatctttgcaatatttttccaatgctcataacataggtcaacatgttccatattctggtcttgagtcttgacaaagatgtagacaaactgagaggtcaatgaagcaaaaagtgcaagaatcaacctaggctgactatataaacaaactgagaggtcaatgaagcaaaaaatgcaagaatcaacctagtctgactatataaacaaactgagaggtcaatgaagcaaacagtgcaagaatcaaactaggctgattgctcagaggctcagagctttaaagtttaaacacacataagtacttctagcacattatggtttggtttgtggatcaattaggctatagaataatgcaagatttcctgtatgattcgttataaaaatttgctggagtggtataattctatgctacttccgtgaacaagaagcctaatttctggcagttttttgaactgctagtacatagattgaggatgagcaaattgagcaatgtgcggtaggctggggtagaattgccttctgagttctgattgccctactggagtataagtcattgatctgtccctggaaatgatgatcattcctgtacatggcagggaacctttgtttttttttttggccagcccagaggtggagccacaccaaaatttggtttttaaaatattttctatattttactttttttttcactagcgtgtaatacatagcttatctccacagttttccacgtctatttttgatgaaatttgtgggcataactccaaatattgtcaaacattttatgttacctttccatgtaatttttagacttcctcatgtgatattcttttaacaggtacccctacatatataatcgacatggcacagaaattcactgcttaaaggtaattatgatgtaaacacattggctttctgaatgaatgtgcctagctattgatgattttgagaaattgttagttttgttgttgtttcacatgttttcagttaacatgcaggaaagttaaaactttatagctatttaatttttactttatgtatgtctatgctttgatgtggtatactggtatctctcaaagttcagtaaagatttgaatgtatatcttatcttgtttaggattctgaatgttttgtgtccacaggaacatggtaaatcgttgaagctccaatttctggaaaagcactttctcttgtcatcaataaacagctttgggcagctccattaccaagatataagcactggtgagatggttgcaaattacaggacaggtctgggacgtactgatgttatgcggctaaatccttacaatgctgttattggccttgggcatgctggtggcaaagttaccatgtggaagccaaccagtgtgaaaccccttgtcacaatgctgtgccatagtggccctgtgacagccattgcatttgacaggggtggtcatcttatggcaacagcaggtgttgacaggaaggtcaagatttgggatctcaggaagtatgaggttataaattcttatgctgcacgtgcacaatccctggatttcagccagaaaggtttgttggcctgcagcaatggatctcaagtagagatattcagggataccgggggacaggattataaaatttatatgaaacatagaatggtaaagggataccagattgggaaggttttgttccgtccttacgaggatgttctggggattggtcactccatgggcctttctgccattcttgttcctggatctggtgagccaaactttgatacctttgttgacaaccccgttgagacttccaagcagagaagggagaaggaggtgcaatccctgcttaacaagctccagccagagacgataatgcttaatccgaacatgatagctaccgtaagaccttcaaggaagaaagagaagaagaccaagaaggagattgaggaggagatggaagacgccgtagaggctgccaagagcatcgagttcaagaagaagaccaagggtaggagcaaagccagcaagcgggccaagaagagggaggaagaagttttgaaagccaaaaggccgttcctggagcaacacaaggaaaacgatgggaggcctgacaagaaacagcgggtcagcgaggagattgagctgccaaaggccttgcagcggttcgcaaagagtaggcagtgacaatggagcacagaattttctttttctttttgtttgctgcaacctcatatttatcactagtgtgcattgtatcgtgtagctggcaaatgtcatatctgcttccttgtgaaccataggcttttgcacatgaggcaatggtgcacagaagtaagcacccaaattttgttctgaatcttttgtgatatgttggtcaaatgtgcatgtgaccccaacggtgtagccgtcggctgttggtgccttgttaatgtcagtgctgaagtatagagtagcactacatttacagcagtattacgtgctgagattcagttcctctggtgaccactctggggaatgctattgcttaatcatcattctggagcacggttgcataaatgcatagctactcgttcagttgtatttgcagcttgcgttttgtacaagggagcatgttggctgatggtgtttctctgtttatcactacagcaataggcatcactacctgatagttaccgaaacctttagatatttgaaagcaacacaacaaatctgtatcctgcaataaggagcaaatgcaagttatcaaactatatgaaattaccagtcagttttatttcatcaagggcgccagtggtctagtggtagaatagtaccctgccacggtacagaccctggttcgattccttgctggtgcattttttcagtattttttgcctttcatatgctgttgttaaataaattttacctttccctattgtttgcctttcatatgctgttgttaaataaattttacctttccctacactgatgttaaattgatgagattttgtttttgcgagaaaaaaaatacatgagcttacacttttcatatactgtcgttatataatttttacctttccctacactgatgttaaattgatgagatttgtttttgcgaggaaaaaaaaatacatgagcttacacgaacgtttctccgggtttactcagtatgaagcaaaatggcaaatgcaccagtggattgtgagcttgagaaagaagagaatccttcacggccatgggcgattagccgattacagtgtttacacatggagcgctacaactacaagttatccttgcagaaaccgatcctctctcgccctcaaaaaccggcgaggtggtccggcacggcgacgacggtgccggcctccacctcggcgtccgtgagcgtcagcgccctctgcagcttcctgctgctgaacacctccacctccgccgcgtacgtcgccaccaccggccggtggtccgacatcgtcagctccgccctcccgtagctcatcagcttcacccccttcccgaacgacagtatcctatcacacctgatcgatcatacacatcatccaaaattcataaacaaacaaacaaacagaaaatcgcactctcatcgcagcattacacacgcaaaatgtgcgaatttgagcaaaagaaaattgtaaaatgctgctatgtttttttatcattttaatcaaacttaaaaaaagggagaatagctactttagtccctaaagtttctctgtagaatcagtttagtccctaaccttttaaatggtccaaagaaatccttaaattttatcataaggcatagaatactccttgggtccaccaaaatcatcatatggatatgccatgtcatcattcatgcaaaatctatgacgaattgtccaatttacccttacgtatataatagaaaaataaatataagggtgaattagacatagccataggaaaaaaatactcttttttttcacccttttgaggtatatttttgctcttacatataccatgtatttttttttaactttttccttttgttttttattttcctatgcgtaagggtaaattggacaaatcatatagattttgcatgaatgatgacatggcatgtccatgtggcgattttggtgggaccaaggactatatcagtccacatgataaatttaaaggacttgtttggacaatataaaatattaaggactaaaatgatccaggagcgaaactttaaggaccatattagctattctcccttaaaaaaattaacttaagaaaatgttaaaacgacttataatatgaaatagagtgacgtgcattttgcagtgagcagctgcacgaacgtaccacgccggcgttctcctgccgccgcgctggtcgtcgccgatgtacttggccgagttgagctcgtacttgtacgtcggcgcgaactccagcaccccttccgtccacccgtcgaacgcccgacccttccttagctctcgcttcagctgatttattattcagacataataatcagagagattcagatcaaacagcaagattcagatgtgccacacagaaactttagggcccgatcgattgactatgagctaattataagctaaaatggtttattagcgacgaaaacaaaatttatagataaaacttttatacatgtagaattagtcacttaaaacccaatgctagaagaaactatttaaaatattttataatcaactttaaaattaagttttagaattgaactttttgttgtaacagacgattctatatagggcaaacgatgaggctctcatgctaattattcttgttcttcagatgtgtacctgatctttctctgccagctgagtccaatccatcgtcgaaatcagctcgtgtgctctctcgtacgcgacgtcgatgcgataattcagatcacccaaccaaaaaatcctcctgcagaaaatcacaattgacattcaaattcagatcagatatgatttggatgcactttgaatctttttttaaaaaaatgcggattagtagcttcttactcatggtcatagatgtttctcggcatgccgacgccggcgaagtgcgtccggcggtggatctcctgcacgtcggcgttccgcttgtggaggtcggcgggcttctcgccggcggcgaggtgggtgcacacgaagcagaacatggtctggtacaccgacatgctcaccgacacggcgcccttgttgccgatgtagcccatggcgccgacgccgacggtggacacccccacgttgtggacgcaccttctcagcccgcgcctcacccacaccgtcaggaagacgcccaccatctgcttgctcacgatcctcacgtacggcgaacgcctcttgcgcgccgcggcgaggtccatgacgaggtcggcgatcatggcgaggtcgtcgttcgactggtcggcggcggcggcggcgcgagacggcctgaatgagttgtaggttcggaaggatcttgacgatggcatggtggtactcgccgtcgccgtggcgtgcttggcgagcaggtccagcggctgctccggccatgccaggccgaccctgtccgacctgctcagtgtcttgagaagcgtccgctgctgatgctcgtcgccggagtcgtccatggcggcggcggcgtcggcggcggcagtgaaatggttcagcctggtcagcctcctcggggtggcggcgacgttctgctgctcggactccgccggcgagctgaagagcgagtcgtcatcggtgttggtgtccgtgtccgtatcggtgccagggaagagctcgtcgtcatcggtggcggcggcggcggccgtcgcgtccccgcgcgacggcgagggagggtggctgtagcacttgtaccggggccgactactcgccggcggccgcgcccgccgcagcgcgctgcggatgagctcctcccacgcctgcgccggccgggcgtcctccgcgccgaacacgttgccggcgttcagcggcaccacttcttggaacccgagcacgtagacgtcggcgggctcgccggcgccggcgccgagccagtcggcgatgtcgaggtcgccgggggggaccttgccggcggcgttccaggtgccgacgcagagcttgagctccttggtgttgatgtactgcgcgcgcagcgtctccgagtttcgccgccgcagcctgtacggcgcgccgccctccacattctcatctgggcatttttacaaatggttagggtgtgatgagcaactctgtacaactttttttttctccttatttttgtttgagacctcctttgaaattgagggatttttgaaggattaattttttaatcatggaataaaacattcgggtctttactcaatgagttacaaccaattattataaggttcacacaaaaataaactcgcacagtgagtatgtaaccaaagtaacaaaaccaaaatcagatacaaactaataaaaaccaaacaagataaagacctcacaacattttgaaggatttatattctattctgtaaaatccatgcgtttcaaaagagccttgagcttgaaaaaaacgccaattctgcaatggaagtttttctttaaaaaaaagagcaatggtggaatgtaacattttctcaaaaataattttttaattcagtttcctaatgttattttttggagtacaaaatgttgatttgtttggattccacattttcattggccagacaacacagagtttgtactagtagcttcttttcccttctagaaattgaaccttttttttactgccaagaagattttgggacaaaacccaactttggtactgtcagttgaatggatcccaaaatccaaaaagaaaaggtgccactttgagcaattgtaggtaagccattgttgtgattggagacaagatttgatggaagcttggtgcaaagcactaaacaacagcactatcactctgaagactctgaacagtccaaagctgcacttttctcctccccatcttttttaggataagagcaacacgcaaacatgggaatgtcatcaaaccgtcacatagacataagactcaccggcgagatcgccgtcggcccgccgccgctcctcgccgccgtcgcagccgcagttctctgcttgaaaccgaaccaatcagaaggaggaaaaaatgtgactcctgactggtaactaaattctcctcaagaacacttaaattcagatggataatttgatctgagaagaggttttttgtttttcagaaacagtatgtaccttgctcatcaacgtcgctcccgtcgtcgtcgtcttcctcgtcggcgttgaactccgaatccttgctcttgaggttgagccatttcttcagcacaaccttgggccaagaagcctacaaaaacacacaaccaattcaccaaattagccaaaattatccctgttaattaagctgccagatgaatcaccaagaacaacctgttctgaactgaaccaagcattcacctacctctcctggcttccgctgattcttctgcaccaccatcttactcctcgtgcctcaaacacaccaaaaattcagacaaaacggactagaaatccaaatctacactgcttctgtttctctctgaatcttctctccttccctctccaattctgaatcactgaatcttgatcagtctctgctcctgttctttctcgcacctttcttggatgcgttcttcaatggcctgagctagctaggtgcctgaaaatggaggggcctcttgcacgagcacccgtgagttgagcagtgatatgtttgttagatagataggcaggacaagagaacggagcacatggtggtttttaagctctgaaacaaacgcattgccatctgatggcgccaagcaaaccacaagaatagaatagaataatagaatataatattatcaatgggaaaaatgtgggcatccgacaaagcaggttgcctcccggctgcctcatttcgcctgttcactttgatgccattttcaaccttaccaaattttggtaaagttgtcaaaaagtggttacatttatttttctgtcaaattttggtatctatataagaaatcctataaaaattctggcggcaactataccaaaattttggcattagtaaggttttttttcatcaaagtgaacaggcccttcatccgagaaaattatcaaactgaccactttgttttcacgcgcacgttacagtaaacgatgtattatttaaaaaaaattctatcaaaagtaactttaaaaattgtagtaatttatttttcaaattatttttgctgatagttaattagttatgtgctaataaatcgctctattttttaaaattttccagccagctatgcctaacccaagccacgcgtgtgcattacttcttttgagttttgaccataccagtatttgatgcaactttcaccgcgcaattaccactgaatcactgatgcctacctaatcatttccataatactacagctgatgtttctggatatgaattagtaattgcttcaaagaacttgtctttttcttttttgattccgcgtgttctgcgctgtttggtcggcagtgttgacatttgttggtctgtggaactgattatcctgaattgctttatgataacatatcgattcgtagaattatattagttggagctaaatccaaagaactctgacatcaacagtagaaatggtattttgctattcagtgtggctctgacatttcgaacggtttgttataaagtttggcatcacaatcagttggttgcaagtccattagttagctccaataatgaaatgagtaacaacaattttgtcacaaatcgtggttaattaatcattctatgatctgtcagtgtgattttgagctcgccgtattacgtgcagaatccactgttaatggctcgatcagttaggtgacaacactgatggggattaataatgacaaagagatgacatattttagaacatcgtattgacacctattgtcctggggattttttgtttaatcttatgtttgctatgcgtgtttgacttgctctgctggacactggagacaagctagaactccagccatgttcttcgtaccagttgagttgattgctgccaacctcaatctatgatctatcatcatctatgcctcatcatggacagaatcaatcaggtcactaattgtgtctttttgttatgtttaaggtctaaatgaactcctaagtatatattagtttgttatttgtgtttttgttgcggttgctaactgcagcatctcatgatgcatagttcatactactagtaactctctaaagtttcttcagagaaaatgttgcgaatacgtcttcagatcagaaacttagaagtttaactgtctaaaagaattattgcaacgttctttatgctgaaattaacctataacttacttgtaaaaacagcttttggtatcatattctcttaattataatatccctgagaccatgagtgaaacatgcatgtaatgtagttggatggaaccctttttgaaatatttacaggcagcagaatctccaagaaatgatgggagggtagatatcactatcattctgcatgattttaacacgagcttaatctgtagtaattaccttttttttccctccgatcctctctctactttctatctccacgtcactttcttcttaattgcgttcacgaaaaaaactttcttcagttcttaattatttttgtctcgctcaaagtactcaataattacactcaactagtgattctcatcttggcttacatgcatgatcaaaattgccactgtttgagaaaagcaagtaatcaaacgctaaacaattattgtcccaaaatatataagacatgatctattcagatttataatagtactaaaatatgtcttattattaggaattatttagattcatagtactacgtgtgtcacattcggtaccaattataagtttttatattttgtgatgtacatgatattccatttttatactcagtgcagtagctgcttctagctcagtgccacctggcagcctactcctttcgtcccaaaaaaagataaaccttggatttccgtgtccaacgtttaattatttgtcttatatgaaatttttttttataattagtattttcattgttgttagatgataaaacatgattaatactttatgcgtgacttgtctttttaatttttttttatatatttttaaataagatgaacggtcaaatattggacatggaaacccatagtttgtcttttttttttacggagggagtagatgtcactgccacgcaacagttgactcggcaacgcacatccgcgcgcgctggactcactgatccctgggagacacgtcacctgacggctcgtttctcaaaggcgtagtaggcaatgcaagcaaccaatatagatcctctgtagtactggagcccatatgtcagtgagcagcggaccctcacttcaggcaaccacgttgctaccgttagaacacgacactggacgagccaaaatgtaacggctcgtcaattcaatcgcttttgcgtaaacacggtgcaaagttcagcgcacgtgcatgattgtttttgtttttgagggtaaatagctaggcatgtgattctatatatagtgattaaataattaaggatctgattcacatgctaatttcgaatttttaaaattcgatcggtttctaagaatggtactccctcgttccataatataagagattttgagtttttacttgcactgtttgaccactcattttattcaaaaaattttagaattattatttattttttttgacttactttattatccaaagtactttaagcacaacttttcgtttttttatatttgcacaaattttttgaataagacgagtggttaaatagagcaagcaaaaactcaaaatcccttatattatgggacgaagggagtagtattattagatattccttttctgtttccttttattagtcatgaaaaagagttagtaataaaaagtgaggacaaaaattcttttaaaaccaaattgtaaccttttaaatgagtttcggcctttgagctgaagtatagagccaaacacctctaagatcaagattgtagtcacatataaatatacttttttcactcaaaccctaaaccatatcctgagtagtagaaacacatttttctggacgtgacgagtactatatgaaatatgagcaaaatttatacagaaaaatatatctttgcaggaattctcacgtacattctatgtactcgaaacagtgtctccagaactatccataattttggagacacataactctcgtattcgatccataaataaaaccgtgtcttcaaaaccatcgtcacattgcacaccgtcaccttcctacgtgagagtttcatacgtacgtgtaacgaaatgttggttaatttccctactgccctttttgtgaacatgcaatatttccatgaattctccttacacattgttcacacccacctgtggctcgatcgtgtggtctctctccccttggtcattttcttatcttttttgtctttatgattttggtttttttcagaaacacgtaatgctatagctacagtagcagtgaagcaaaaccttctcagctaattccaaggagtctccatcacgcatcaggttcgtcaggcttggagtcgttttgcattgcagcacaatttctctgatagttacggcctcgatgtgacaataaacaggacgaaaaagacagtggggattgttgattccaaattcttgcaagattagatcagctcaaatggcagattattaatccgtgcatcacaaaactaattaattagactggagccatacacgtgtacttcaaccatattctactaatcatatttgttcctactattagaccgtgtcagcatggtttagataaacaaagggtcggtgaagcttactagtgacaaaatagtcatcaacaccctgacatttagttaaaatattgtcgttagaacaactcaacaacatatggatattgcaggcaatgccagttcacatgatctatctctcggtctctccgatatttgaaacatgaatatttattttctcgaacgcacaaaaaatttgcacgtcaatatattagcaggaaatgagtttttgttatacaaagcaatcagccagactggcttatgcctaaaaggggggacttgaagctaggaactactacgacggttaaaaacgcaactccaaacagcgggagggggcagagccacgctacactaccaagaaatcccccaaaaaaagcaacgccgactaaagaccacagctggccctccgaacggatggactccagaaccactgcgaccgaagcgagcgcagagtcgaaaaccctgaagtttcgttcctttctatatatatatatatatatatatatatatatatatatatatatatatatatatatatatatatatatatatatatatatataatcttcaagatgttgctaactactccctcctttctcaaaactttggtcactacataatgttcatatttaaattttaagcacttgtctttttctttagaactataaatactttggtgttcataaacgtctcaggggttgttcaaattaatgtcatttcaaatcataccattttttaaagttgtcgaaaattacctccatttagttttttttaccaaactctagtaaatagtaaatacataagaaatcctgtcaaaacttagcaatattgttaaattatcaaaatttggtaagatttattttggctacaatctgaacatacccttacatcctaaacttaagcactaacttttcgttcattacagtctaaccaataaaaaaacatcaaaattaattaaaacgatgccgacaactatttggaatggagttcgtagcagctagctagaacgttcgcgcgggtgcgatttaccgatcgatcgatgcccaaaacacacgttgctttccatgtatcgatcagcgaaatttacgcgcatcgaacgtcacattcggcgttgcaggtttgcatatttgcaagagagccgcgtgcatcacgcacgcatatatgcatgtgtatacgtgacacggtaacacagattattggcgaatccaaaaattgtggcgcgcgtgggaaatggcctgaccatacatgatatagggcgtgtccactttactaccattttcaatcttaccaagttttagcattgctaaattttagtaaagttgacaaaatgttaacgaggttgtcaaattttggcaagatttcatatgtgcttactaaaatttagcaacaaactaaacgtagccaaaattttgacaactttaccaaagaataatatggttgaaaatagcatcatagtgaacat

SEQ ID NO: 4820 - DNA, 41544 bp, Oryza sativa
tatatatatatatatatatatatatatatatatatatataaccttcaagatgttgctaactactccctcctttctcaaaactttgggcactacataatgtgcatatttaaattttaagcacttggctttttctttagaactataaatactttgggggtcataaacgtctcaggggttggtcaaattaatgtcatttcaaatcataccattttttaaagttgtcgaaaattacctccatttagttttttttaccaaactctagtaaatagtaaatacataagaaatcctgtcaaaacttagcaatattgttaaattatcaaaatttggtaagatttattttggctacaatctgaacatacccttacatcctaaacttaagcactaacttttcgttcattacagtctaaccaataaaaaaacatcaaaattaattaaaacgatgccgacaactatttggaatggagttcgtagcagctagctagaacgttcgcgcgggtgcgatttaccgatcgatcgatgcccaaaacacacgttgctttccatgtatcgatcagcgaaatttacgcgcatcgaacgtcacattcggcgttgcaggtttgcatatttgcaagagagccgcgtgcatcacgcacgcatatatgcatgtgtatacgtgacacggtaacacagattattggcgaatccaaaaattgtggcgcgcgtgggaaatggcctgaccatacatgatatagggcgtgtccactttactaccattttcaatcttaccaagttttagcattgctaaattttagtaaagttgacaaaatgttaacgaggttgtcaaattttggcaagatttcatatgtgcttactaaaatttagcaacaaactaaacgtagccaaaattttgacaactttaccaaagaataatatggttgaaaatagcatcatagtgaacatgcccatatactcacttggttttttaataggtgacacatttgacttttaaacatatatttgatcttctgttttattctaaaactttgtgcaaatacgtaagatataaataatgcttaaagtattttaagtgataaaacaactaacaataaagtacatgataattttaaaaaagtgaataagacgaatggtcaaacatgtatcagaaatcaatagtgttatctattactcccttcgtcctaaaatataagtatttttggacttagatacaattttttagattctactttgaccaacaataagtataaaaataagatgtcttaaataaaaagagttattatgatattttgtttaataataaatctagtaacatcaattttacatgattgatctttttaattatttttgctattaattatcaaagttaaaaaggttgacttgacagtatgttataaattttatgttttgggatggaggcagtagaaaaaaaaaggtagtatatgtacttacatgcagtatgcacattattggtaatttggtattacaagataaccgtgacaacaaataactgtaggttttgacattgggttatatatcctacattgatcaataatattttcaaaatattctaatagtttagcataaaagatgtatcattagattttatatcaaaattactatactaatatcttatatttaaatttatctgctttcctatcggttaaaaattaatagttaaagttctccggtcaaccaataaacatgcatgtatgaacgtgcagggagtaaatgtatttcacctagcttttagagcaggtttaatagtatcgccggctacaagctataaatgtgtaccatgtcatcttatagttagagagtacaataataaactgttgatacgttaaacaagtaatatctttattaattttttaatcacctcaatctctttcttctttacccttccctctctcactccgctgcaacactgacaaaaagcaatgcacagacgtctaggagctcgtgtgcgctggcgactaatttaccgtccgctcgcaccctctttcctcccttctctcgcccatatcatcatcaaatctgacgtgtagctcatatcactggctcaatctaccttattaaacctgctcttatgtggggaatatttcggatatacatcacttgtacttagttgcgaaaagcctaattcccgaacacgcgtgggcacctcacgaatgcgcccagacaatggattggtgatagtggcaggggcaaagtgagacgaaagagagggggaggagatcaactgccggggccacagtgcatgcttggtgcctttcgatgctcgcgaggctggcggttgcagtggaggaggtgagaacaccaaaggggagagaagggagttcgccagagaaaggccatctttgacacatcccgctcctatcgctgaacttgtacgctcgttcacggtcaagtttggagaatactaagatggagagagagagagagagagctggagattagggtaatgggatgctgggctgtcagtatgcgtttgtaacccataaatgctcgcctattagccccacccacttagttgtatggagttttgttcaaactctaaaaaacttcagtcttctacgataattaattactccggtgcacgtaggtcaattaggcgtacagtcaccggtgtgtatgctcttttgggaaaaaaaaacattttcctaacttgtggctaattgcacgtgcagtttatcatcaagttttacttaagtccatacggcttgctagcatgtcatttggcgttaattatacctaccacacatgcagcatgccacattgcctctgtcagaagaaaatgtagtagtagcttcgagacaacaaagacgacagttttttctccacaacaatctcgaggtcaaatcttgattaattatgctaattaacgcgatccggatatacaatctgcagatatattacttaattacactaatgatgaaacgctaattgcctttttttttctccaccaagttgatgaaatgatcgatcacctgtcttaccattaccttaccgaaagtccctttatgagatagagacgctaattaaatatagttttccatgagaaaaatgctgtcactgatcaattatgcttagagaaacagtaaccataataataaataaattcattccctgctgtagcaaggaggcacgtgacgcaagcatcaacgtcagaccgctggcccattatccgatctaagcccacggccccaggctcgaaatatccggcccatatacttacatgggccgggatctgaaacaaacatcaggcctaactacgtaatgggcccagatttaggcctcctaacgaggccttgatgggctaagcgccatcatgggcctccgctttttttcgaagcccacggcgaattcccttcccagcgccgccgtagccgcctctgcgtcggggtttgcgcgggaaaaaccgaggaatttcccgccggttcgcgccggccgcggttcatcattctttggcctctccgaaacctagatcccaaatcgacccaagccatggccgccgccgccgtcgccgacgaggtcaccgaggcgatggagcaagtcgaaggggagcgtgaggaggccgacgcggtcgctgatgaggccgccgaggtgatggagcaagccgaaggggagcgggaggaagccatcgatgcggtcgccggcgaggccggcgaggtgatgaaggaagtcgtcgaaggggagcgggaggaggcgaatgccatggccgatgaggccgatgaggcgatggagccggaaggggagcgggaggaggaggcagacgccgtcgccgacgaggccaccgagccgatggagcaagtcgaaggggagggggaggatggcgacgccgccgcgcaacggccggcgctgccgctggggagggtgaagcggatcatccgggtggaccgtgacatcaagaaggtgaccaacgaggcggcgctgctcatcgccgcggccacggagctcttcgtcggctccctcgccgcgggcgcccacagggccgcctcccggcgcggccggcgcgcggtgcgtgccgtgcacgtgcgggccgccgcgcgcgagcaccgccccaccgccgacttcctcctcgactgcctccccgccgccgaggaggcggcgcctgctcgcgcggctgccgccggtcccagccgcggcggcggaagaggagaggcaaagccgttgccacgtgggacccgccgcatcgacgcgttcttccagaagaccacctagtggtgttccctctctgtatgtgtctaatgcatccgctgctctaaatgtttggagaaaaatttcactcgcagatgaaactatgaatttttatcatttcgttagtcaagctcgtttccaatgtcttgcaatgatttggtatgacctgctcaaatcttgattccggttgccgtgaattttgcgatgcagtttcggtaggaattggtctttgtaagatgatctagctaatatatttctaggtcctggttcaaacacatgattctcaaaagaatatataatgctaatactaagattgcgacttaccttagtttcagtgatcctctgtgattcacctctctgatagattacacttattctgcaaacagtttattgttttggtcttcatgcagtgattcggtaattatatgctgacgctgtgacgcatactgtgataagaaacacaaaacaaggttgtccttagctactttgtcgctggttaggatgccgagccgtgttggtttcatctgaggaagtagcttgattccctcttgccatggaacatgttagcatcacaaaatttgcatgagtggaaccccacacttttgaaagaatcccacactttttgggtgtttacctgggaaacaagtaaggccttagtttttacaccagttttagaaacattctgctctctttcttgttcttatttgttctcaaaaaatcatgttcattttacctgtctaaacaggataaggatcagaatcagcatattaggatggttatttatgtgtaaccactaattccatatgaattgatgaataataaaattgttcttttattgcataaattcagaaatgtcaacacactgcttgcctgatgagtgacaataatctcatatcaacagataatacaaattcgttagagattttctgctggacagaactactcctggtaaaagactaataatatgattttcagatttttggcatctataacatatgaatgttgtgagtccctaaactttagggcactgacttctgatgccacaaggcatcaatgcacataggcagcttctttatatctgcacaacgaagctatgcaggaaatccaaaggtgaagcttaggctcatttgctgcatgcacctcttccctcagcagctcataacgctgcacaaccatgggccccctttggaccttcattctgctatatcctgagatcttcctagctatcatctgcttcttctggttttcactcttccgtcccatcaggcagcgccagaagagcaacctcccagtgaactggcctgtttttggtatgcttccattcctcgtgcagaatctgcactatatccatgacaaagtcgcagatgtgctccgcgaggcggggtgcaccttcatggtcagtggcccgtggttcctcaacatgaacttcttgattacctgtgacccagccacggtcaaccattgcttcaatgccaacttcaaaaactacccgaaaggcagtgagtttgctgaaatgtttgacattctaggtgatggactccttgtagcagactctgaatcatgggagtatcagcgacgcatggcaatgtacatatttgctgcccgtacctttcggtcctttgcgatgtccaccatcacgaggaagactggcagtgtcttgttaccctaccttgatcacatggctaagtttggctcagaggttgagctggagggtgtcttcatgaggttctcactagatgtgacatactctactgtgtttgcagctgaccttgactgcttgtcagtgtcttccccaatccctgtgtttggccaagctacgaaggaagctgaggaggcagtgctgttcaggcacgttataccaccaagcgtgtggaagctcttgaggctgctcaatgtcgggaccgagaagaagctgaccaatgcaaaggtggtgatcgatcaattcatctatgaggagattgccaaacggaaggcgcaggcaagcgatgggctccagggagacatcctgtccatgtacatgaaatggtccattcatgaaagtgcgcacaagcagaaggatgagcggttcctccgtgacacggcagtgggtttcatctttgctgggaaagatctcattgctgtcacactgacttggttcttctacatgatgtgcaagcacccacatgtcgaggcgcggatcctccaagagctcaagggccttcaaagctccacctggcccggggacctccatgtcttcgagtgggacacgctccggtctgccatctacctccaagccgcactccttgagacactaaggtgacacatctttgatctccccattctcccccaatctcactaacaattaatctccctctcttcatcttctgacattctgaccaactattacattgcttgaattgtgttccaggctcttccccgcaaccccgttcgaggagaaggaggcgctcgttgacgatgttctccctaacggtaccaaggtgagccggaacacgaggatcatcttctcgctgtacgccatggggaggatagaagggatctggggcaaggactgcatggagtttaagccggagcggtgggtgtcgaagagcgggcgccttcgccacgagccaagctacaagttcctgtccttcaacaccgggcccaggagctgcctcgggaaggaactcagcctcagcaacatgaagatcatcgttgcctccatcatccacaacttcaaggttgagctggtcgagggccatgaggtgatgccgcagagctctgtcatacttcacacgcagaacggcatgatggtcaggctcaagagaagggatgcagcttgataaccatgctgtcagcttagctatcctgctttcttgtgttatgtatatctgcatgagactagatgtctatatgcagagttgatgagatggaattattattagaaagtgtaaaatgtctggttggattagtgtcagaattgtaaccatgtgaaaggaacaaaaatgttgtggtgattggtatatgattgtgtgatggtctttgggttgatttattcaagtatttgtgaagaacagtgtacttaacatatcagttaagacttgagagtaagtatcgggtgattattattatctggtgaccacgtctgtatgtgatgggctttacaaacctgcatacgagaataggataattcttgtttcgttttcatgaccagttcacaagtaaaccattagactgcagaggctccatcatttcttcacttttaaaagaaacatttggctgggcccacttatatttttcgtgtaaactcagaatcgtcaagcgaattgtattggttcagctcatcgaaaagtttgatggtctcattgtcgccgagtagttggtgaaagatgccttcagcttgtggtgaaatgtgacctctggatgttttttggtgtttttgcaaatatttatccaaactataattttatttttgaaatggtctagaacaaaggaacaaaaaaaaaaacagaagtagcacatcgctgttcagtttcaaaaattgtactacaaagtaagttcaccaaaagacttcaatagcacgtttaccagagactgcaaaactggtctgctttcttaatggaaatgacgacttcagacataggtaaaccttagtgacatatatataagtgaagtaaataatatttctttgaggccattaggcaaactttcttaatcacaagaaaactcttttggtataccagcaaggcctaatgaatcatatatagagtacaggagtaccttatctgtgggcagttttaacttgttgcactagaagagaacttttggttggagaaaccagaagtttgcctaatggtggcaaaatgatcagcacaaatggtagcactactgacaatagtggattgtatgatcctcttttccaaccctgtctgaccagaaactaatggccagctaatcttgatgtgatcagtattcagtggtaacccttttatgtctactagaacgaacttgctatacattacatcaatttggttcaagcaaagaaaataaatcacatacttcctccagacacaaaaagagtgccatatttaaattcatgcagttaacataagttaactttaatcataatgattattcagaaatatgaaaatgacacgtgcaagtttattataacaaaatatctcataatatcacacttatatcgtaacacttttctatgtatttatagaaaggagaattaaatggtcaaagtcataatttgtgactagagggagtaacattcgggaaactattctaatccctcgagggaatgttccctcgtttgctcaaaaaccatctaaacggttatgaaaaattctggaaaaatttgaaaacattcatacaacacatatatacaactccacaaaatcttaagtccaaactcaactcacacgtcgagatataaaaaagacaaattcagcgtatgaatagtagcgtactgtttatatctaaatttgtcttttttgtttctcgatgtgtagatcgaatttaaacatgaattttggtggactagtaggtatcattatactctacattatcaattttttttagaatttttcacaactattttcatcgaatttggaagaaaaaggtatacgaggggatatcccctcgagggattagaatccacactcgtaacattctgtttttttatttttccaaagtaattgcaatacctacatgttcataggtggttgcatttaggtcaatgttgatggtgaatccaatataatacttcctccattttttttatatttaacatcgttgatttttttacttacgtttggccattgttctcattcaaaattttatacaaatatgtaaaatcataaatcatgcttaaagtactcgtaataacaaaacaaatatcaacaaataaatgatgattagataagttcatcgaataagataaatagtcaaacttagatccaaaagttaacggtgttaaacattttaagaaaagggaggaagtttttttttttttgaaaagggtagggactagggaggaagtaattgatgtggaagaaaagataactcatttgttttcttgattgaaatgaggtggcattgcctacttgccgtgcaccatatgactcctccctcctcatcactccctttcacctaatgacctaaacccaaaccctccacaatttttatcatctatataaccacacgaaactccatccatggcggcgagcgagctcacaagtccacagagacacacctcaccagcttgatcaagagctagccaagccaaatggagctcctgccatggcttctcggcttcgtggtcaagtacccggagatcatggcgtccgccgcttgcttcttgctgctcttctgcaggtttaggaggaggagcaagcggattccgacgaactggccggtggtcggcgcgctcccggcgatcgtggcgaacgccgggcgcgtccacgactgggtgacggagttccttcgcgcggcggcgatgtcgcacgtcgtcgagggaccgtggggctcgccgggggacgtgctcatcaccgccgacccggcgaacgtggcgcacatgttcacggcgaacttcggcaactaccccaagggggaggagttcgccgccatgttcgacgtgctcggcggcggcatcttcaacgccgacggcgagtcgtggtcgttccagcggcggaaggcgcacgcgctgctgtcggacgcgcggttccgcgccgccgtggcggcgagcacgtcgcggaagctcggcggcgggctcgtgccgctgctcgacggggtcgccgcgtcgggcgccgccgtggacctgcaggacgtgttcatgcgcctcacgttcgacctcacggcgatgttcgtgttcggcgtcgaccccggctgcctcgccgccgacttccccaccgtccccttcgccgcggccatggacgacgccgaggaggtgctcttctaccgccacgttgcgcccgtgccatggctaaggctccagagctacctcaagatcgggcactacaagaagatggccaaggctcgggaggtgctcgacgcgtccatcgccgagctcatcgctctccggcgagagcgcaaggcggccgacgccaacgccaccggcgacgccgacctgctcacggcgtacctggcatgccaggacgagatcggcatggacggcgccgcgtttgacgcgttcctgcgcgacacgacgctgaacctcatggtcgccggccgcgacacgacgagctcggccctgacatggttcttctggctgctctccaaccaccccggcgtcgaggccaggatcctcgccgagctccgcgcgcacccgccgtcacccaccggcgccgagctgaagcggctggtctacctgcacgcggcgctgtcggagtcgctccggctgtacccgccggtgccgttcgagcacaaggcggcggcgaggccggacacgctgccgagcggcgccgccgtggggccgacgcggcgggtgatcgtgtcgctctactccatggggaggatggaggcggtgtgggggaagggctgcgaggagttcaggccggagcggtggctgacgccggcggggaggttccggcacgagcgctcgtgcaagttcgccgcgttcaacgtcggcccgcgcacgtgcctcggccgcgacctcgcgttcgcgcagatgaaggccgtcgtcgccgccgtcgtgccgcggttccgtgtcgccgccgccgcggcgccgccgcggcccaagctgtccatcatcctccacatgagggatggactgaaggtgaaggtgcacaggagacaagaggattgaaccaacttcctttggacactttggaacgaaccatacagttcgaggtttcgtattgatatagcagaaaaacattgtttggtttcatattgatatagcagaaaaaatattgtttagatatgggtgctctgcaatctacaagagctattagggcatacatgcactgatgatactgtgctccattgattaattaattcgtgtatgctaattaatacaggtggtgatcgatggtacattacgttatatataggggaataagagacattagtcacagtgattataaatttacatggttagttgagcgagtggtctgtgatctgatgtgatgtacataaattctattttaaatttaaaggaattttacacatgaaatttctgtgaaattcatgcgttcaaagaggccctaaagctggtgcagtgatggatgcatgtgtagtatgcaaaaccatttttcctccttacgtaaatctatgactactgtctatatgctagataaataaacaactggtaaagatagaatatgtgctcatgtgcacgaagacatgcctatgtaacttacaagaagaagaaaaaaaagaaacaagaacacatacatatgtgcaatgtgtcactcccccgtttcgtgcatcatgtatgatctgttgcaattgtggtgtgtgaatattaactttgatgtgaagatgcatttcattcccccaagaacatatgcatttcatgagaggttgatttagtcagtaaatgaaggtttagtactggtcaatctgttttgtctcaattcaagatcaggaagggtgtagagcagagtacaagtggattatactcaacaaaaaagaaaaaaaaggtccacgtgattcaagtcagtataattttacagtggattttatcatcatgtcacaagattcagatcatgcatttggatgggagaaagaataaactctagacattaattttacatgccatttgatatctgaatatctggtcgtgacacgcaaaattggggcaggatgctgcaggggtgtataattgttccatagaaattttgacagcttgtgtaaaaatgaagccgggcgagctcagagttagtgacagcagtaacaataataataatgaacattaatacagtataaccaaaaggtagcagcagacgaagctactaccgtgtttcgatcaagtacaacgttgtggtatatgatgggttaaaattggctgcaatcactaaaatcacatgtccatcctgaatgtctcaagtctctcaatcgaggatcctccagccctgttttcgcaagcttcagatgtcatttgtatacacagattatcagcattgtggtgagggtgatgattgtcgcggttgtgaagatagccgcctacacatgtggaatggattgaagacattagagaagaatcactgtaactaaaatgctcgggtaatataccagaacaaaatgcaaaagacttatgaattgcgtagattagctgccatgccatttaataatatctcttgcatcatacaaacaatactgttcatatatagtatataccagaacaaaatgcaaaagacttatggcatatatagtcatatgggcccttaagaaaaaaatagggtacatctgaccatacctcattttctttttctatataccaaacaggcaagccccagaatgattacataattaattacagttcaacgcatcacaaaactattagtaatacatactcttaacatgggactccagatcaacacaattacatcaaccaccaaggagtttgatgtcctatacagaagaatcatggacttctttcaggaaaccgttttgatccctggattcttgctataagtaattgtagtgaactagtattataataatatgttcagggttatcgtgaaaggaatactaaccgcaaccgccgatgcagcaagaccagggcgctctcggggatctttgttgtagtacttacagcagtaaagagttgctgcatagtaccagatcaacggacacaagaaacctaaaaggaaactgcaacaagaagatatctgatactgccacatgaagaattttagtttggaaatttgaaccaaagttgatttgggcagcagagaatactcacgaggaccatcctataccacaaccaaagcaaggaagtcgtctttcaaacattgccagccgtgggttttcttcatctctgagcaatgtatacttgccaagacagccctgacaatggcaaaattgatccgagcctgctgcaagatggaaaaataggattaagctaacagaagaaatattctcaacaaaacaaagataacgccactgcatttatgatttatgttaaagctctaaatgtttgagtcaaagtataacttggaagttggaactacagtagtttatgtcatcaatgtttatatactgcaagtaagccagtatcatgacataatctcctactaaaaaaacatgtttctcaaaatgtcagattcaaggattttgtgtatagtacaaaagtgaaatgcttcccacatgtcttaagagatctagcaaggaaaagctaagcttaacttcagaaaagaatgagagagagagagagagagagagagagagagagagagagttggaaacagttaccttcccccatttaatttagagcagttcagcaaagaagcacccagtaatcttaatgcaatatctccgttgcagattcctctgtgccgtagcaagaatcagtcataacaacatgaagataaggacatcaatgatgcaggttgtctagaatggtcatgttgctgtactggagagaaaacaatatgtatcagaattctgctcaagcacacataagtagttgataaaatactttgtgcaattgcaatttgaaaaaagaaataccaaaaaaagaggaaatagcaactactgacaacaagtgccatgtctaaatttctgaacatgcacacaacacacaaatgatgaatatggtgaaaccgcaattagcattagaaagttttaactctagaaatcaatttccaagttgtaatccccatactcccaacccagaagggaaaaaaaacaactccaaaacccccaacttttaaaaatgtgggaacaatcaaaccatatgcttgagatatacccacaaagccatcggcggccgcttacagcagagtacaccctcatcttgcacgcctccgaagaagcaggagccgtgatcaacacgagcatcttgtcctgctccaccccacacagtgacgagtctagggcacgacgaaggcgcgctcctaaaccgtgggctcggggctccggccagaccggaggttcagaatgtgctgtcctaagatacgtagaagcaaatacaatccagaggcatcaaatcctgatatagctctctacctcctcagataactccggtcagtaatttcgtcgaacacttcgcgttcatcgtccgtactccctcatcgcattggcagcaaaaccaacaagaactgaccgtcctcacacagtcccaccaaaaaatcaacaacccagattcgagtattccacccacccagatcatccttccaatcgaagttgcaggaaatcaagaacggacaacacaaccatccaccaaccaagatccaagaaaccgcaagagcaagctagaaaaattcctgcagaagaatgaactcaccggagcaagacgaagcatgcgccgccgccgatcggaacagaggtggaagcaagatttgtgcgttcttggatgggcaacagagagcagcagagccctagcggtgggattccccttggttgagtggaagaaactggagaaagcgcgaggccgttttgtcctcttgctttccccttcttccccctctcaatcgatcgagagcaacagacaaatcactcccaattttttttaaaagaattgaaaaaaaattcaagagcgcacgacagttcacgtctcgcctcctcgatttctttctttacttcgtcgctcgcttcccttccaaggggagatttctctggttcccctctctggtttgttgacgtgtgatagactagtactgtgccgtttggacttgcttgtattgatcttgtccgtccatggcgttcagcatcgaccatctacgtctgagattccacgccacgcacgtgtccgcgctcccaacctaaagaccgcagagccaaataaaagatacggattcttcgtcagaaattgcacaggcatcaattagggcgggagctgaggcacggggcgagcgacgtgttgagagaggcgtgaccccgtgcaaggcggtggcggtcaccggcgaggccaccaccacgagatatgtcgctgcccccaaagcggatctggcgagctcgataaggcgacggctatggcagcggatgaggaagaggaggtggcgcctaacctcgtttttgtcaccattcagctgccgccgagctcgtcgtcgtccccgctcaaaaccacgcaacagcttgacggagagggagaggagcttatcggtgtccagccaaaggaggaagaccgccggttggaggaggaggaggggggaggggtcgccgccgatctcgccgtctcccgcggtccaagccgtcaagcttgtcggtgcaccggccaggagagtagggccgtcggtcgggggagaaaacaaggggagcgccgcccggaaggagaggggatctgccgccggtagggagactgacggagatgggtagatggcgagagagagagaacgggtgaaggggattttttttattatttttttgattctaggggttcaacacaaattctagaaatatgagaactgaacaaaaataatttcacggctaaaatataaaatcaaagtcattcctatagccactgcactgtgagaaatataaattttggatccgtgactctagcctacaaagcacttcgaggcggacgggtctaatccttgaacgttcgcatctcgcgaacaatttaataggttttgtaattattcgttctaatgactgtttatgttcgcatacagtattttattgtttcggttaagcgaccaaccaatcacttttccctattatcagattagattttatttcttgaaaaaaatccggtgatgcttagatttttttatttgtacatgcaaatataattcataatataaagtttataaataaaaaagtctaaaatataaagtgtatatacataaagtaagattatatacataaagtctatatatagaaagtttatacacataaaatctatatataaaaagtttatatatataaagcatacttgtagagaggtccatgaaaatactacatataaaaagtttccattagaatagctttaaaaatgactataaagaaaaaaagtaatttgaagaaaaaaagaatggaaaaacagaaaattgatacatacctctacaggagaattaacgtaaaaataaggacaacgggaattgaaaagaatcacataaaaaggaaaaactggaaattaggaacaaaaacggtatcgtagcgatacaccgcaccggcctgcggaaaatctaatgggtgaccgcgatcgggtagcgatcactacccctccaccctctctccctccacgtttcctttttttttttttttgcaccgtattacttttctattttagtaaatttatgcatctaaagtgtatacacctaaagtttatatagacccaaagtttataaatcaaaattttatatatccgattcaaatttaaatttgaattcaaatatttttatatatagtatttctatacatctaaagtttatacacctaaagtttatagacccaaagtttataaatcaaaagtttatatacccgattcaaatttgaatttgaaatatattcgattcaaatttgaatttaaattcaaatatttttttatatatagtatttagatacatctaaagtttatacacctaaagtttatagacccaaagtttataagtcaaaattttacatacccaattcaaatttgaatttgaatttgtatccgattcaaatttgaatttgaattatatccgattcaaatttgaatttgaattcaaatatttttatatatagtatttctatacatctaaagtttatacacctaaagtttatagacccaaagtttataagtcaaaagtatacatacccgattcaaatttgaatttgaattcaaatattagtttatagacccaaagtttataagtcaaaaatttacgtaaccgtttcaattataaatttaaatttaaatatttatggtgtagtaggaagagaaaaagggaaggaggaagcgacggtatagggaaggggcgggtgatcgctcgcgtcccccaccggtctgtcgctcattaccacgtgtctttgatcctccccagcctgatccgcttcttgtcttccgagtctcgcgcatgtttgcgtagtagacttcccgcttcgaggcttctcataagggtaatgtgtgctttttcatgaagaaatatgtctaattctcaatttctgatgaataaaaattccaaatgtaattgattaacttgccttagtacaaccaagatctgatcatgcctagccattccaaaatccaaggccgagtttagttccaaattttttctttaaacttccaactatttcatcacattaaaacttttctacacacacaaacttccaactttttcgttacatcgttccaatttcaaccaaactttcaattttggcgtgaactaaacacaccccaaattgctcaatcagtagtacgtcctagtgtatgtttagttcatgtcaaaattggaagtttgattgaaatcggaacgatgtgatggaaaagttgaaagtttgtgtgtgtaggaaagttttgatgtgatagaaaagttggaagtttgaagaaaaagttaggaactaaaccaggcccttgtacaaaagaacaagtgcgaagcatcttcccgactgctacttcccattcgggtgtgtgataaatctttgaatggctaattcctcgttcttcatgagcacgcttcataaactgttaaaggatatgttttgtgcaaaagttttatgtatataatgtttataaaaaataaataaatccattttcaaatttatataataattaatgtttgattaatcatgtgctaatgacttatctgtttcacttgctgaaaaaaacgctaccaaaccgctgatccaaacatgtcaaatacttatttgagaagctagagatgagaatataaaagctaaaattagcttctagccttctacttacttagggggtgttggccctctcccccaaacacccccttattcattttctaaattttgttactataggtggtgtttgggggggcactttatttttattctctctcactaaaattccataggaacttatattttatatcttagtgagagggtttagtccctcccacccaaacaccaccttaaaatccaattgaatctaattgtttcaggaagcttacaaattccgtgagaaaatgcaactgacaaaaactcgtcaaaacagggcgttccaccagggattggattgagcataacctgtattgatgcaaagaagccatcaaagaataacggcctcaaaataatcaattatatatccctgccacgatagactgagccaaaataaaaatgacaccggttcagatttggatgacattatatgggaacatggtgcaagtgctgggaagaacatgttgttatcttattgccatctaagttacccattgagattattaaaacagtcagattatatcaaaataactctaggaagagaatttaagaggttgtcagcattctctattcaattcaagccgaagaacgtttgtcagctgaaagtaaaagagaagtccgagagaagctaagaaagaaaggagggtactcaccaaccatatacacgaggaaaaaaattactcacatctataatatgatgtactcttatttattaataatgtaataatattattaaaattgtatatatttcaacaaaaatttgtctttaacacagtacaaggtaaaactaaaaatttgtttttgaattattctgctattcaatctttttcttgttatctcattcttctctagtttcaataataacattactagctccagccaccaaattttgcagctgaacactgctacctagttaagtgcacacgttatgtaatatatattattgataatttttatgtgagttagtaataattactgttaatgtccgattttcagattcagagagaaattcggccgaccgcaatagttcgaaggaggaagggggtaattcgtactttttccttgaaattttaagaggctgtcaggcactgttgtttataggattacaatgtccttgacagcacaagcatattaagaaaactgaaactgccaatttaaaggtgccagtttagattttactacctagtataatcgttctggtgcagtcattagatcaacggagaaagatgatcatttgtccacatggcatcacatgaacatggcttgattctcttgtgaatagttgtcaccaaatgaagacatcagaaaacaatgtttaaaattcagacatccaatatcgtgctttaatcatcagaatggcaaacaacttcgacatttccacatcatttcaaggttggcatcacaattcaatagattgtttgatctaagcaagctgaagctcttctgcagaaatagataccaattcttattccaactaaaaagtaactagtcccaatttcatgcacaaaacaagacaatactaaaattcttctgctggtacaattcagcctttcacaaggcaaaaaaaaaaaaagaagaaaagaaaagaaaagaaagaaagaaacaaatcctaatgaaactgattgtctggttcttccattccatgtcatttctgccctcttgacacaatcttgtacttgcctgtcaattgttgctgcaacaataaacacaaacaaaaatctcaaatcgcttaattagtttctgcaaatttcaaccaaaccactcctgaaacgcagcagcaatgaaaatttcaaaaatgaaaaattgtgtaccttttcccagagcttggtgtgctccaagcagaagccggcgacgacgccgccgccgccgccgccggccttggcctcctggtactcgatgcagaggccggcgtcgaggccgcaggagacgtggaaccctaggccgcacctgggctgcgagcactcgagcgcgcagccgccgccgctctcgcagacgtagcacgccgtggcgaagcggtgcgcggggacgcgggagcagtcgacgccgtcgcggccgtcggggtcgcggaagaacacctccggcaccagcagcgcgcacgcgatgtgcgcccaccgcgcgtccgtcgtgcgcttcatcgcgccgcccctcgccgggcagaggcagcagcgtggcggcggcggcggcggcttgttgcccttgctcttcttggcggcggcggcggtgcagacggagcagaaccagtcgccgtcggggatgaacgaggcgagcgggttgccgtagcaggaggcgtgcaccatgaggtcgcacccgtcgcagaacacgatggggtccgacgggtcggcgtcggtgctcccgcacaccgcgcagtgcacgccgttgttctactgttccacctcctcctccgccgccgccgccatggcctcttgcgttggctctcgcgccactctctctccatcccaggagtcttcttcccgtgctgcttcgttgagatcaatcgctttgcaagctttctcgagtgcttcgacttcagattgcttcgcactaatagcactgcaggattgattgcattcctgatctttcgattctctgcaagtgtttgatctttgtttcttcgacacttgctccttgatttcttcatgattgataggcttctccggaatcttgggcttctcttgaatcttggatgcttcagctcttgcataatcatcttccacaccatttgccacgctcgaattggtggtggcgccacgtttattggatccttgaggcttggcttctttaacagcggcgacgcgagctccatccgactccttggatggaggcggcgatggcgggagaaacggcggcatcacgcgcttattgctcggtaggcaaaccgagaccggagcggcggtgtccttcggggacggcggcgcgcgggcgctcttcttggccgggatgctcggagaaacggcggcgtctctcggcggcggcagggtgttgacgagatccttgaacgggacgcggggagaagcgtcagtagccgccgccgccgccgtcgcgctgacgcgcttcttagcagggaccgggatgctcggagaaaccgccgccttctccggcgccggcgccggcggcggttgcggcgcgtgaacacgcttcctgaccgggaccgggatgctcggagaaatagcagccttatccgccgccgccggtggcagagtgtcgacgcgcttcgtagtcgggactgagggagaagcaccactatccggcggcggcggcgccggcgcgtgaatgcgcttcttggccgaaagacacgcgggcgcgacggcatcatccaccggtggcgcataggcgcgcttcttagccgggaggcacagagcgaaaccgcccccctccaccgccgccgccgccgcataagcccgcttcttcgccgggaggcaaacggggacggccgccgccgccgccgccgccgcctccagcatcggcgggcacaaccgcttcctcgccggcaggcacggcgccatcccgagactggagccgccgacgtacttgaaccgcttggaaggcggcagatcacgcacgctcccgctgccgacggcgaactccatggacggaatcgagaccggagattttgctacacggggaagaagaagaggaggttcgcggcgggtgatttgggatcgaaacgaaccgggggtttaaatgactgaaaatttcgcggtcgaatcagcgagatggcgcgcgcgcagccgcgcagcgaagaatctgacgaaattttggctcggtgggaagcgaaatgtttgtaatttttgtttgaaatttcgaatttggggcgtgcgggctgcgggaaaattttgcgtttcgtttggatttcgcggcggcggcggtggcgccagcatttcgctcgattcgggccgtgggcttgggcctaattaggttgggccatgaaaccctaggtgggctcactttttttttcgccgatttataattataaaattattatcttctttttcgtctattgaaaaagacgagggcctagtagccatcgtcgatccccaagtctccgcggcggaggcgctcgcgtcgcgaccccgtcgccgccgccggcgatccgctccagccgaaccccgccgcaccgccgcggtagctgccgtcggcgaggtgcgtctcggcaccggactccaggaatcgtgctgctgctggaacgccgcgcccgctcagccggcggccgggcgtcccgcgtggctcgctggcatcgatcggggatccctcctacgggctcgccgtcgcggaggtttcaggggaccggcgcttggttggtaacttggtttcttttgattgtttaatttctctggttgtgatgtgtgctctagggtttaagccgagttactgggtcaggatgggtcaggatgatatatgttctgcttgttaggttcgatgtattgggtggatctagctacagaagataatcttcgatcttctgaaggggtggtatagagcacgaatcaaccccaactcatcatcatcaatggttctatagtagtgtttggtggttatcctattagtagtcctttataatgattggttggattgattcatgtgctcataattcgtgtatggatcataattttggctcttttcttttctgtaagaatcatgtgaaaatattgttaggcatctctaatataaggtgtttacgcatgggcgcttaaaataattaatcatcggacaattgaaggctcatcgaacatcaggattagtaccaattctctcacaggtggtaagaaaattgattttcttttgctacggacccatccaagcaccttaattggagatagaaagatagaggagaaggtgtctatttgatatttaccgacgagtccattcttcatgtggttcagtctgatatacttctcaggtgccttttaaaaaattgatgctctgcatgtgcattcacatttaccctgtaaacccaaacatgtaagcttggcgattgagattgttactgttctattaactgtttcatgtcatgctgtttcatttatatgttgtttcatttttgtttatgtcactaaggaatgtccacttctcacatttgtcactaattcggttcaacttctcatatatgccatcattccgttatagcacttctcatatttgccactttaaattgctcaaaggtcgaccatcattagcatatgtaagaatttccagcaaaccccaaatatccttcttgctactcacagttgcgcttccacagtgctgtcacccatgcatgcctgctgcttacaagatcagcaaaataccaagcctctttacagtaggaaggatagaggagtgtgttggagatgtcatatccttgagcactttcagattgtgcttcaggtgacagaaacagagtggccagaaagagcagagctggggtggctcagatgatggcatcgctaactgtggatgtccatgatctagcttcctccttacttcactctttccagcttcccacagctaacactgcatggatcctgcttgcaccatcccaatgctatggctatgttgcatgacaaccagtagtcggttggtggagaacaagcaggatttcaatcttttaaaacatcatgaatagggaaattgacagaatggcaagaatgaaatttggtttaacggaatgatggcacaaatgagaagccgaaagaggcataaataaatgtgcagtggggcagcctatatttcttcctttctatcctttgactaatggattgctcaaaaaaaatttgttatcccctttcccctatttaatcatttcgaccttttggcgcatttactgactctacaaatcaacaggacacgctctttcctcatcaatctgctgacgttttgaaatattggaatgcttctgtcgtcgaatttggttatctacagcatctgaattggttataacttataacttataagtggcatgtctgcgaaggttccaaggtactattatcacttagcagagttactgcagtgcatgcataatcacttggtgaaatacttaaactgtgttttaatttatagccagccagcatggttatagggcattcatgttttcattcatggtttagcactgcttttgtttaatctctacttgtgaagtaagaaagataaaattgttgggtgatataacattgtgatgggttgataaagttgccttcgtcaaacaatacttctttacgtctggcctgtagggcatcatctaacttgcttcacaaatttgaccataaggattaggcttttcataactgaaattggttgtctttcttacttctgttctcttgaccacatcccagaattaaatgaacatggcatctcatacgtttccactaggcatcatatacttatttttagatttacctatcagaaacacatgttatgcaaaatacaggttatgcaacttcataatcctgtttaagcattttcgagtacttgctgcagaaagtttatgtttttactgttttgatgcatgatgtgatcatgccgataatctgacatacagatttgctttaggcgcctagaagctaattccgttgggatggcagattgggctggtcttcagactgatatccttggtgtaattgtaaagaagcttgccgtccctgactatctgagattccgtgctgtatgcacatcttggaaccatctctgtagggatgtattcaactgtccaaggatagacccatggctgatgctccctacaaatgcgcttaatgattctaaatttttgtgtgtacctgaaaggaagaaccaaaccattcgtctcccgagcactgttacaatctttggctccacctggattcctgttggttcttcccatggttggctcatcttttacagcccatctcatggaaccatgcagctggttaatcccattagtggcatgcagttcaatcttcccccaatcggacgaagggccttctccaaggccatgttgcttgacatgaatgacacaaacttcactgttgctgtcatcttacgtgaccagaaaggatataaggtaacgcgtaaaggaagcaacagctggtcatcagtggaatcaaagcatgatctagtggatatcttcaagcacaggagacagctttacaccgttgatatatatggcacagttcagttgtgggcagaaccgccccgttcatggccagatgaagatgccccgcaggtgaatgacccgtatcataacctcattcactatccgcatcaacatggaaagcttaactgtttggtggagtccccagctggtgatctaatgagggtgaagcggcaatcaaatgataagtttgtggtctggattctggacaaggggacattttcctgggagaaggttgataacatcggggactttgcgctgtttgtcagctactacagctcggtctgttaccgggcgaaggatcatctcaacctgaagtcgaattgtgtctacttcattgactcctacagcaacctgtgcgcattcaacctggagaacaggacgaaggagctcgtcgaagctcttgagcccgcccatgcccacggtcatccagagcctcacgctgtccggcgcaggccggaaggacagaggtacatgtggttaatcccttcgctgagataaaccaatggaggatgaaagctacggtacacatccccgttgtctctgaacttactacagtatatgtgactgtcgctaatttcataaaagtattgggcatatctatagcacttctgtagataaatcaactgtctgaactttggacaactcgtggtttgtgattatcgtgtattttgtaatatatatatatatatatatatatatatatatattatataagttatccttgtccaaattgtttaaattatcatcacccggtcagaaattcagaattgtagatgtaaccgtgttcatgtattgcgggagggagggacgcggcgagagcgtcaggccgtgcactgcagcacgcggccgcgctgtttcgccgtgccttccgtgcaattgcagaggcgcgctcgtctcgcttgctcgcctcgctatatgaggctcgaacgctcgcgtcgagctcaagagcgaccaagaatcacctgactacactcactgacaccaacgctgctgccgccgccgccgtcgaagccgatcacgagctctcccgttccggcgagcagcggcgcgttctcgccgccgccgttcatggagccttcgaccgcgcagggaacatcggtggcgccggtgccatggcagaggctgggccaagagccgcgccagcgggacgggcggtggcgcgcacggtgcgcgctccagctcgccgccttcgccggcgcgaccgccgccttcgccgccgtggcgtaccgcgtgcgccaccggccccgcgacatcgcgttcctggccgtcacctactggctcgtcgcgctgctgctttgcctcgtcgagaagctcgaggccctgcggctcgacgcgtccccgccggcgagggagaccgagctgcggcgcgtcaggctcggcgtgtgggcggtcgccgtgacgctgggcaacacggtggcgtggcgcgtctgcgacgcgatgccgttcctggcgctgaagctgggcgtgtggggcgtcacgctggtggtactgggcttcgcctactacttcgtcttccgttccaaagccggcgagtgccacgacgaggagcacggccatccctcaagctgacgccggcggcagccggccgccgccggagaaagctttccgcgagttgcactggaggtctgaacttggtaggatatagtactacagaaattattgaacgtgaaggatgaaataattcttctaaacatttctaaaaattgaaatgaaatgttttgtttgattgaaatttgtaacgctactaaataatactataatgtttaggccgtcaaagcccaacgtaggtccccatagtttcgcttattcgtgaaataaacaaaacggcatatttgcaaacgaaaaataatttatgaataaaatttttgtatacgtgtttttagcgatctaaaatcaatggttgaaaaataaactttgattaaaaatttaaattttgactgataagcataagtgaaaagatggggccatgtttccctagaagaaagaaattgtaagattatccatttggaaaaaaatatgtattgacagttttcggaagctgtataaccatcgttgtctctctgcaaaagcaattgagacatggtgtctgctgatggcgatgtctcgctctcatgtactttctccgtctaaaaaaaatctaacctaaacacaaatgggacattacatagtacaacgaatgagcatgtccagattcattgtaagatggaacattacatagtacaataaatttgggcatgctcattcgttgtactatgtaatgtcccatccgtatttaggataggcttttttttacggaaggaatagtatctattttttaggaactgaaaccaaatgaattgattctactatcatattccttttcccacaatccagcttcagaggagcgagccaaactgccaaaaaggtacaaacaacgcgtcaacgcgtaatatttgcgtaagttcgttgatagatttgaatttaagaagagcacaaagcagtagctataaacattgacaaaacattcagaaattcagaaaagtcagtcccatctagagtagtacatgtcaagaacagtaaagttcctcctggcattttcgccttcaatttgacaaaacctcatcctagttgttggattattagttgaaaccacatgcagactatcctgaaaaaaaaaccatgagtaggcgagtagcagatcagtataccatagatttttcgtgaccatcacgcgtggtactgtctctacgtgtacgccaagcagatcacccggaattactcttgagttcccgcttgtgtgaataagacgacttaatcatgccggtactttttttttacccacaggttaagtcatgcccacagagactcattaatcacaaaagctataattgtatactacaaggaatgtgtttgttttcctctagaatcaaacgctccacgaacagttcatattgtactttagattcaagctgtagttgtaaaattcaaagagcgaactagaagctaaaagtttagaaaatcagtttttacgtattcttagaagttagctaccaactaatttctcagaatcttaaactcgcaaaacagactataattctcctatcggtttaaaaaaaaggagaaatgacaaaaagtcttcaaagaaaaatttttaaaagtgatttacatttcaaaaccctgatggtattatgaaagtaattttataatttaatttacatttttgctttttatgacatataatttaaatttataaggtattgatgctaaacgttttattcgacctatccccactacgctatttttaatacagaagattaagaaaaaagagagaaaaaactatgatgcctctttaaaagtggtagggataaaatttggtgaaagttaataaagaggtaattgggtgccataaatcttttccggattagtacgctgattctcatctaattcctactacatgacttgacctgctggtcaatcatatttatcgatcctttacattttcaattttttttccccagtgaaacatattctcgatctttgcacgacaatttcctcgcaaatttttttgcagagaagacgtcaagcaagagggtagtatatataacacaccttgttcattgtggatcaataacgatcgggcggaactaagcccgcccctgaacctgaacaaaagcctatcgtcgtacaaagtcgtaatacatattatccgagtgtgacgtgtccaatggacgatgacctgtcgaagaaacctcagcgggagcaggacggcgacaacgcgctgctcccgtgcgtcatcgcgggcttcctcgtcgccggccacgtcgccgcgtgcacctaccgcgcggcggcggaaccgcgtgacctcgccttcgtcgccgccgcgtacaccatgctcgcgctgctcctctactgcgtcggcaggttcgaggcgctcgccgccgacggctcctctccggccgccgccgtggcgagggagcggctgaggctgcccgtctgggcgctctcgacggcgctgaccgtcctcttctcgtcgcgcgtcgcgccgatgatgccgccgccgctgaacgcgctcgtcgtggccatgtcggtggtcgtcaccgtcggtggcttctgcttgctgttcctcggcaatgcaggggaagacgacgacgacgaggacgaggcagcttctgatcaggatgaggaagtctgattcaaccacattttcgaactgtcctttgtaattacaggaagaaacgatcgaataatcaatatcaacgtttgacaaccgtgtgtgtataagaatctgaacaactaattaagttcgcgttgcagtagctgtttgctagtagtttctatgtgtaaatttttttctagtttaggcgtgcaagcactttggttactgcggtagaaagttatttacatatgtataaaggctgttttccccctctgaaatcaaacgaaattttatggtagaccacttcatcgtgccgctgtgaatcttaggagtaacttttagttttacatatttcccttctcctctttaagcaaagacttgcacgcctagattccgattatctagaaaattgtctcccgcctatcacaacatcatagaatctaagtaattcaaaatttgatcaacaaagtaactatataaaaggtacatatttccctcgtaactttaatatttgctagacaagcctgaaatagttataccccctctgttctctataagcatttctagaattcaaaattatacaacataaacattttgggtcagtcaccctgatacacggaaatccatactttcaaatcatacaaatttatattgtggtataaattttagatcatagtataaatttgaaacagatggagtaatacatttgatacattttaagaaggtttcatacatttgatctaaacattaaaaatatatatcgatgctttttattatataattccacttgaaacatgtcagaacaatacgttttcgtgaggacctatcatgtccgagtgaaggaaacatgacacggagagatggacgacacaagcttgctgacgtcataccaaatcggtgttgtgacgttgtcaacctgtttgctgaactgaaggtttgctgttcgcctagcgagaaggtttgttgttcgattgaaggggagtaatacaacataggagtagcatttttgtggcactaatttcaacaaatggattttcgtcctagatttgacacgggtgtttgcatttacggctaattattctttcagtggtaggcgacgtacccgccgacagcgaggcgcctgtggtgacttcgtcaatctcaaaatatgccggtccagtcttccggaggtgctcatagggatagggtgtgcgtgtgtacgttcgtaggggtgagtgtgtgcacgttatgagcgcctgcgtttgtactgtgtttctcaaaaaaaaaaagaatcagaactagaaatgtttatatcatgatacaaattttaaactctagaaatatctacacttcagaaatggaaggactaatacatttcataaggtattcacacatttgttctaagtactaaaaagatgtatcaatgttttattattttttagatttcgacttgagtcatgttcagaataatactcccttcgtcctaggttgagtttcgtatataaaagttaatttattttaaaatgaaagtagtatgttttcatgaagaaatatcatgtctgagtgaaagaaccaaggtttaaattcatgtatagaaaattgtttatttgaagacggagagaatacgttttcttgaagacgtatcatgtccgagcgaaaggaacaggccgtgcatgtcacgatgagagatggatggcgcaagcttgctgatgtcgtaacagatcggcgctgtgactttgtcaacccgtttgttgaactgaataagcagacgaattgcacaatgcacatgtcacatgcttatgctcccacagagaaggcacgcagattgctaaaatgcagccttgtaaaatactacaagtcttcaagagtcaagaccatctttcgtttacttcactttgttgggacactagacttggtcggatcaggatttatgactcgggtcatgtctttgcctatgcatttcccatacccatagctttcaggttccaaccaaacggcttttagttgatctaataagttctccctttttctcttttccgtcaggcatcagctatataaacagagatccaacgtaagtgctaggaggactcgagtctcctctatccctttggatcaccattgataaaatgagagggacggaagaataaggagagaaggaagagtagggggttgaaggagatgagtcccctttaatcatattctatatctgcctaactgagggcatgttctaaagtgcgatagatgatgaatgatgagtcggtgactgaaaacttagtttatggcaactatttagagtacaaacgcttcaattcaatactagaaaactaccaccttcagtagtttgactattcaatatccatcttattaaaaatttagtataaatatgaaaaagtatatgtcatacctaaaatatttttaataataaaataagtcacaacaaagtaaacaatacttttaggatcaaatgtcaaccacgtcaaatattttaatcggaggagtaaaaactttatttagaaaaaatattgctccctccatccaaaaatatgagcatttctattcgttttcgtggtaaggaagtatatggaattgagtgatgtgagattgtggttggttgaaaagagaaagtaggtgtagggactaaaagaagttaattataattaattgtgataagaggatagataaaaaaataattactacattttaagataaattaaactctagaaatagatacattatcgggatggagggaacagtgtttagaagcggctgtgtttggagtagccgattggaagaaaatcggtaatttttcgtgcacgcattcctgaactgttaaaaggtacatcgttttgccaaaaaaagaagtaaactataagaaagttgttttaaaataaaaccgtattaatcatatgcatgtaactcaacttgttttacatatcctctcaatcctctattttcccgtccttccaaacacattcttagggcctattttttggaagaaaaatcaaatgatctggatttcctaaggattaactcctataagtataagtatcattcggttcataggaatgtaggtccggaaaaaccaaaggaacattttctttcctaaaagttgcagagagaagagaaaacataggaaattttccatccatccaagtctcttgaaaattcctatggattgaagtgtgtaagcattcttattctttcaattatttctattctattggtggaatttctcccaaaggacattctcttgtgactacatgtgggctcacagcccagtcatagccccataggttgtccacgaggcccattggatgatagctggattgagagccgtcggatcgaatccaacggatcagattgagtccaggaagagagacacgcgggtttgcacgggcgagctcgccgtctctctcgccgccaccgtcgcctgcttcgctcgcgagagaggagccatggctggagcctcgccgtcggcgcgcgccgaggtggtcgtcccgccggaatgggcggcggctaccgccaccgccgccgccgcctcctccgagcccgcgccaccggtcgtcgtcgtctgcgggcccaagaacgccggcaagtccaccttctcccgcctcctcctcaactcgctgctccccaggtaaaaaccccactctaccccccaaagccctagctctgcttcgtcggcgaggagctttgttcgctgacttggagtggtgctccgctccggtgagtgtttgtaggtatgggagggtggggtatctggacacggatgtcgggcagccggagttctcgccgccgggatgcctctcgttccacgtcgtcgacgaagctctcacaggtgacgagatgagatggcatctgtgtgcggggatttgagtgttaaactggagatgtttctcttgagtgattggttaattgggtggtttgagtttctcacagacgtgttgttggcttttgtgcagatttgctcaacccaactctgcgtgagtgtgaaaggtgcgtgattttcccccttttgtgactgtatgaattgcgaagtttgctgttccttgcggagtggtcataccgcttgattgcttcggtttagtaatcttcccttattgtgttcttgttttgagccgaacaacattattattcctattcaatgctgcaataagttcaagaagttacttagtgaaaccatttgctattttccttgctaggcagttttttagactgtggatgtaaagttcttccttgggtatttcgaaactattatgttcagacaactttttacctaacgccagtgtttcttttctttaaaaaaaatccaccaggtgttgcttcttcggtgatatttcttcaaagcgagatccagaaacatatctgaattgtctatttcatttgtatgactattttgttgaaaaatatcgatctggtgccagtgaacctctacctttaattgtcaacactcctggatgggtgaaaggtatatattatgaattggtcttttatgacaggatgccacacgtttttttttagtttgttcactaggccctcctttatttgttttacataggtgctggttttgatatgctggtagagatgctaaggtatatctgccccacaattgttgttcagatacgcatctctgcgcagagcaagaatctccctgatggaatgttttggttagattgtgggcaaacaggaccaaacatgatcaatattgatgctccatttcatgatgctttgaatagatcgtgagtaacatttcatttgtctcagtttgaagttcaagttgatgtcaaaagatatttccaatcgattagttgaagcccagtgaaatagcctccttaatactttgatgaatatttttatccattgtatgcttgtaggttagagcataaactgtgggtcttgtatgacttgattgctactgaaacttgaattggcaaacagtaatgaaattatcatccaaagcattcaggaatctacgagttctcttctgtgtggaatggggaaaaatagtaccacaattagcgcctcttttctgcctatcaatctcttctccatgcaataagagattagggatccatctacctgaattgataatgaaagaatgcttcaagttctttttgttaaaatgtgcatacgttggtaattatgatagtgcatttcaaatcatctgaagctattaactaaattatatgctatttgcttggtgcaaaaatagcaatgaacgttcttttcctgcagtgctctaatttcacactactctgatgtacccgtttcaagtaccacacctgctgcaattgtcgaattaatacttgcagtcatgtattctacacatagtagcagcaactgctttaatgcatggcaattggcaagtactaatgttgtttatgtatttactaggttgttaatccagaaagattcttatggaatgcgtgagcgccggcttatagagtacttcaagcaatgttttccaagtgacatatcactgacaacaaataaggagcttgcctatggcctaacttcacttccaccctatgaagtatcaatttcagatgttatggttatacatcttcattgccaggtcttttggctccacaattcttttttttttctttcgaattataagctgaggttggaattatgtatgtgagatctcaaatctaggtctttgtatgccctgaatggtaacaagaatccactcacgcttattattttgtccctgttcaggtacctcctagtgaggtatggcatagtctaaatgctaccatagttggtttggccattagctgtggcacgatcgaggcaggccgttcaatcccttggtgtgctggtcttggtacttcctcgctcttctcacatgcatattctcattactatgcatattctatgatttttcagcaacctagtcatgtttcattacacccatgatcaattagtgtagatattgcaaattattacgacaatggcatccagcccttatattgaacttggtcacttgtctgaactttcttatccaggtattatcagaggcatcgatgtgcaaagaggcattttatatgtaataactcctgttcctctagagcatcttcaaagagttgatcttttgcttcagggactcattgagatcccaaagtctcttctgcaggtgacatttccgttttcttccatgtcccctgcttggtttaacgagtgtagaatccatccgtagtatccatgcacagagattcagtaggacaacccttggttccaatatataagcttgtccagatgcatagccagaaatgcttacattttggaatggagtacatgtgtagtcgcatttggaaatgttgcttgatactcaattttctccttggccctaactttgttctgctgcatctgaaacgcctcatgtttgtaacgagagagaagcaaatttgcttccccattactaattaatttgcctgcgcaggtccgaggatgcgtctcaccatacatgccaacgaatgtgctgcacaggatttcggagagggacataaacacctgagttgacgtcgaacgcccttctcctttgccaccaccgttcggggagatgatcctgaacctgttcagaacagagcagagcagttctgacccacagatggagacttgtaacctgtgcagtactgccatgcttgtttgtagcccttgctggtggaaacgatgatatatcattatctgcaattcgttggagacatcggaaaatcaaaattttgaccttttcttgtcctctgcaaaaattgaccgtcaaaatttagtaatgtcaaatattggcgcatgttagattaccaaaatttcgtagtgttggaatgtgtaggtgtagccttatcaaatgttcacatagggttgggttggtttgagatctaaattgaccttttcaatttttggcaatgccaaaatttagcaagttgtggcatgactaattttgggaaggcaatgttgtgtttggattgaagttaaaataagttaactattgaaatggcctaagaaaaggcctattttcttaggcatgttaagatttggcttcaaactaaatagacaataaatactattgaaattgacaaatattggtaagccgtatttagacctcaaaccaaaccagcccatagttcttactccctccgtcccaaaataagtgtagttttgtactattcatgttcaacgtttgaccgttcgtcttatttgaaaattttttaaaatttttttatgattagtatttttattgctattagatgataaaacatgaatagtactttatgtgtgactaaatattttcaaatttttcacaattttttcaaataagacggactgttaaacgttgggcacggatatccacggctgcacttattttggaacggaggtagtatttggttcggttgccttaacaaaattatcaaaatttgatagtgccaaaaggtatttagaccaacaggacatctgcatcttcggtaccaaacatcaaaggaacaatcacactgcttatgcatacagaccatggcaaaacgatctcacacgtactactagtctactgcccgctccaccccagctcactcaagaacatttgcatatccacaaacgcagatccaaaaatacagaataacttgcctgttcgtttaatctctcggcccaaaaactcggaactcggcttagaacgaggatttaagggaaatttgaagggattaaacgaacaacgcataatttgcaggcgagacaagagatttcaaaagatgcagagtatatttattcagataagcagcagaacatccccatttccattaccaaacatcaaaccatccatcatcatcacatcgcatacggcatacagaccaccatgtcctcacattctcacgtagcaaacgataaagatgaacactctactcatactactagtcacaactcactcaactcaagcttcgattctttgatccacgcagcgacgcagatgcagagagatgcggaatctcatcacgcgaccttgacctcgatggtcttgggcttcttgggctccggcggcgggagcttctcgacggtgacggtgagcacgccgtcctggcacacggcggagatcttgtcgacgtcggcgttgtcggggagcacgaacttgcgcatgaacttgcccatccgccgctccatccgcaggtacttgcacgactcctccttctcctcctccccgccgccgcgccgccgctccccgctgatcaccagcagcctctcctcctccacctgcaccttgatgtcggaggacttgagcccaggcatgtccaccacgaacgcgtacgccccgggcagatccttcacgtcggcgggggtcgccgccatggcgcgggcgtcgcgcacgtacgcacgcgtcgggccaccggtcgcgccctgcttcccggcggcgccgccctcgccgtcggggatgtcgagcaggtgctgcagcgccgtcatcagcggcgtctccagcccgaacatggcgctctccatctctcgatcgcctcttcttcttcttcttcttcttcttcttctacctcggatcgcgctggggtttgtggcttctcgatcttgtcgcttgattgctcggtgggaggaggggtttaaataggggtgacgtgggggtggagtctggaagggagtggaaggttcggaaaggtggtggaatgggcgcggcgaggcgggggcggaagggcgtttgcgacgagaaagatctagagaggtggatattttcggagcgaggggggagcgggtttgggtgggggggccgtacggttggttcgagtgggacccacttgtcatagggtggtgtttgacaggtttcctcctttattatttttcttttttcctttgagaggtttgccttgttcgctccttttctgctgcgatctctggattctggaagcttctcaagtcttcggcttacattttctttgagtggagcgaaggtgctacacttataccccggtttaacttttcgactagaaaatcagcgcgccaaaaggcgcgctgttaatttatatcctgtacatgtaacaggaaaacggtataattttacatgagttagtttattttcaataaaagtttaattttccaaaatgatcttttaatggattttagtattttctttaaaaatgatgagatggatcaaagtagattagtaatttatatttgtcattaatttggatgtgttgtttcactctgacaaatgattttatatatgctacttcctccgtcccaaaaatataacaacttatagcatttataatttgtcccaaaatataacaacttctccaccaacattctcttctcaaccaatcataacccttcactatttaatttttctacctaccttcacttcttctccaatcacaatactcccccatttaatcataccaactttcttagggtgtgtttaggtggtggagaagttgggaagttgaaagaaatttggtagtttggagaaaaaattggtagtttatgtgtgtagaaaagttttcgatgtgatgtgatgaaaagttgggaatgtgggtggaactaaacacggccttaataactgtgtcgaactctaaaaatgcttatattctaatacatgaggattagggagaaaaaacaatctaatagttttattcttaaaattgcagcgaatttataaaacctgaaagttttgcaaataaatccacaaaatttatagtattagtggaaaatgattttaagaaaaaatatgaggcttataatgtttgatcgaatcgtttatattatttctatcaattaatttttctattttttaggagtattttatagacatacgtgatatcgatgtagtaagatatacttgcttccattcaatgtacgtgatatcatactcctaataatttcacaaaactatttgtgtttctttcttttttaactcttttcttcttcgtatgcctgctcctgcacgtgtgatactgtgattagccgctggcaaggcctgagcatgcgtgagtgcctagctagatgccagcccgtgcgtgcaccgatagcacttcgacctttaccttttctttcaagcggtgcgtcctatggatttatctagaactagcagggatcccgcggcgttgccgcggacgccaaaaagcaaacatcaataaaaatatctatcacaacaattactcaaacattaaaagaaatctatcacattaatctcaatttcaggtgatggaatattgaattgattacatggtgtatgaatagatactatggaaaatattggtatatgaagatatttattggtgtaacttttattgatgtcagcttaaatcaatcataggtatatgagcacatggtacaatttgatagccaaaagtaagatagaccaaaccttctatacaggcaacgttgccactagcagcttcattgattcagtcaccaatttctttcttccaaaccaaagtggctgggcagaatcacagacaacccctaataagatacaaaacaaaaccaaatgtattctaatgttaccaatagactgatttgctaaaactgtaagtttgtaatccaagggagtaagaccatgggcatatctgtggtgacgcaagatgaaaacatatcatattaacgtaaaccaacctctttctttgccacctaagaagttagagcaatgcaggtaccttcgttgaacctgtagaaaacaaaagaaaaaacaaaaatcatttagaagtgaatgttcagtacatgccaaaacagcgcgagacttttttgtgttacgtattgcatagatataactcagaaaatggtggtaatgaactgctaggaaaaaaacaactctattttatatgttatgtcacacttctcacttgctacctccgtccctaaaagatgaaagcaacttgtaggttgatcactaatgcatctggagatggtccagtttcacataatgatgtgtgacatttttatctgtaaagagagacaaaaatcacttgcaaataagaatggtaaatcacatgtatcagaagccaacaggccaggggaagaattaatttcttgctaaggaaaaaacaatacatacagtcgtaaacaatattaacttaaactgaaaatcaataaaatttgtaataacatattatcaatataattgcccgatataagcagggatcaactttgaattaacccgtacaaccactgcacttaattccaaatagcacctgtatataaacaaatatgacaatctagtttgatccattaagggatatccaaacaacctataagcagcaacccgtacaatgcgtgttccatatccaaactgattgatttgcaccatggaacggttgcaagccagataacggtcaattcattcctgaagatcatatactgaaagctgaaatgttctgaaaatgaaaaccatgcaaaagaaggatggacatcgatcagatatcgtatgcatgagaatgtatagaagcaaagaatttcagagataatatttttaccatgtttgttgggaacagctatatattggttggttggtattaaaataggcaacaacttgtgcatgcactgtaaagcaatctgaaagtacaataagcagtcacagtctcacagagacaaatctgtaatgctactgattagagaagcagggaaagctgtagcaaattaaaagatcgaagcatagatttggcatcgcagatcgatgaatgagaataaacatatgttttggacgaaaactgattggtaccttggttgggtggtcaatgctcatcaactgaatgcatgtctaataggtgtaactgctgcaacaataatcagtggcgaagccaagatttagagatggagggtgccatctacgagacatggcaactcacttaaggtttagtgaacagtgattttgtagcgttgatgtatgatcggtaactcgatatcatacatattatagcgattagctacaagagagaacaagaacccatatatcatgatttgccaatttaaaattcagtaatatttttaatatatggatgattgaacagtttgtttcattaattggagtcttgcaatcacttctaaaatgataaatcatttagctaagtcatttcataagtcctatatatatatagctaggcaggtgtgtcgtgtcctatatagttagtctcatcctgcaactaatgatataattaatagctagattata

SEQ ID NO: 4821 - DNA, 2899 bp, Oryza sativa
  unsure (1)..(2899): unsure at all n locations
caatagtcaagaactccctctgttccaaaatataagcagttctagtattcaaaatttgtaccacaatataagcatttctggggcactgattcaaatgcacggaaatctatatacattttcagccaatgagatgcttgggaagagaatctaaacaattcaaattttgaccactgtgactaaaagagattttttttccatctaccttagtttttgctaaaaaaacgtacagatgtttatattttggagcggagggagtacatataaaatttgagtgagctgataattaagtaaaaataaaagtaaaatttagacttctttgttcttacaggtttagttccagggcaagtgaatccaagggagataaagtgccagatgttaatataatcgagcgcacacccaacttgagaaactcttccatagcaagccctgggttaaaacaccaccaactaagagtccttgataccttacctgcaatataagaaaatctagagaattaagtatataagtaaacaattactgactcaaatgttaacttttaaatatttcgggttacagggaattgtatcaggagtcgagttaagcgtatggaaatagagaagaacgaatacaaacaatggaagttaaagagcaattaactcttgctcatggattatacatataatattgatgcaagtatgcaactaaatgctgcaggcttggagacaaatcttaaaagcagatcttgtaaattccaccattaagagatagttgtacaatattgatgcaactaaatgaggtcagcttggacacaactcctgaaggcagatcttgcagcttctgccaccattaattggatacaaatctataaaaaaatatgcttacactacggatatgaaaaaaacaattgtcaggtgacagcatgagagcatttggatgaatattattagataagtatgaattattagtaccaaaagaagatatgggcatcagctacagagccatgcaaacattgaaccagatttaaataacgagtgaccataatacgagtgaacttacccaaaactttaagagcatctccagaattttgttggcattcattcacatgaaactggaatgaaaagaatgagtgcaattgtaaaagcataaaattccagcagagtatgcaagcttatacagtaaagtgtgaaaagaggtaggatgaaataggggtgcaagtgggtttacccgcgaacccgcttataggcaaaaatagtgtgtaacccgccggtttgactagcaggttaactatgaatttgacttataaatgggtttataaattgatccacttgtatatttagatgcggcaagccgggccgcgacgcgaaaacccataaattattatttatttaaactcgcgggtcggcccgcttgcacccctaggatgaaaaaactgaagccctacttggaacacaggaattttggaggtaacagttcaagaaattgagaaaatttcctgtcttctaaacagggacaatggaagtcaggaagagggggggggagagagagagagagatgtatatatcatatattattgtgcatggttgctgcaaacattaaatgacagaagaaagcagcagaacttatctaaggtagagaaacttacacgataatactttgcatggctttgaccaccacctctaaaaattatgtcaagaatgtccctgattgtttccaatctacagacagtagccttcgccttcatcccaggtccagtttcagcagaatttcctaagtgtgcaggaaaaatacagacactcaactgctttgcatgaaccggcaaacaattatcaatagttatcagaaattcaatatgttcaactaaggtaacacttagagctagaaaaataatgaaagcttaaagtaactattcagatcgagaaaatggaatagtacatttcagtggaaagaagaaacctggaaaaattgattaccttcctcaagtaatagagaagcaccatcaattgtgtcaattagctttttggatgtttcagaagtaatattcagttcagagaggaactcatatatgtaattgccaggttttgtatggcccagctccttggaatcaatcaccacctcactaattttcttttcaagtgccattaaaagggctggggaaaaagttcgattattagtctattacagtacgaaatctcacagtccgaatcattaacataggtaaacactttctaactaagaatatggatacaggtatgatttgctgctgtaagaagaaatatggttcacctttgagaatagcataattttcagggtcaaattgtttatcagcagaattttcaaaggtcctctttgctgaacacaattggatgcattcctgagcttccgcaatgcaagaagagaggttattgggaagcaagtcaaaagatgcagcatctgcacatatactctcctgcataaaagggtaatggtaaattcaaaacaaacagaactataaccagacatatattgaatgaaacttatgtatataatattgagattggttcatttaactcaagtcttaagcataaagagagttttaacactaaagcaaacagatattcagatagttgtagattgaacaaaggactggagcatgtatttccataccaagttgtgtgcttcatcaaatataagtactgcattatcccatggtattccatttaaagaacgtcgatttcctggatcaataagatagttgtatggagcaaaaagaatatcaaccgacttggaaagttcccgggagatgtaatatggacacctaaaatggaaaataaaacaattgtagtcagcaaaatctgtaggcgttctgttgtgtgcatgtggtgtgcaagttagggcagnnnnnnnnnnnnnnnnnnnnnnnnagtagcataatgngcccaca

SEQ ID NO: 4822 - DNA, 2544 bp, Oryza sativa
catcatgagatgtcaagaagctttttttattcaaaaggccgagattcagaaaaataatgacttgtagcttttctacccacatgatgtttgacatcaacaagccactggaggtaaccacgtgatccttaaaatcttatatgttaggttgatatagcacaaaagcgcaaagcgtatcttgagattttcaaagtgactttcttcttaagtgcttcgatgaaatacgatatggaatgcaaatacagagagattgactaagaaaggctaaatcagctcacatgtagaacagaagacataaatgttaaaagcattcattctgcagctagtccagttgaagcagaaaactaatgataatttgattccttgcttagaaggttatgattagttttgaacctttcatcacaataaataattgctccatagtcatggcgatgtctaatgacacgtccaacagcctgattgacagctcttgccgcttgttgtacataccattcctcccctgtcaaagcctacaaaaagatcacaaacttgtttctaaataattatcaggaattcaggatataaagcatatgaataggattgcactatgtgcatacagtatttttgtttctagttcctgatataactgcttgaagttaataagaacataactccgactaagaaatactttttctgtgcgcattaagctttgcactaaaaagtatatgatctgtcttaaggatgttagttaatgtattgagcctattgcttgcactcactaccaatacaatgttgagaggccgaaggcttcatgaactctgtataaaaccgaatgtcctccaaacagcttcagttcaatcttaaagttttactacaatctagagaggctttaagcttttgactccatctgtgtggctgcagcagttatttgttttataatgtaatttgtccaaacaaactgtcatttgatactttaccatcagagctatgatggtgcagaaaattgatgctccatgatacagcacggtaatttatcatgtcataatatttttggagttgcaccatgtaattagaggaaaattgatgtactttacttaatgagttatgataagttcgagcttaatataaagaatcattgaacaatgaagtatggaaaacaacttaacctttgagttcttgttagatgctgaacccagcttatccaaataatcacgcttgagccgaacctggaacaatcacataaaggaaattgcaaattttattgaaggaaaatggagcaaataattatgaggcttgatagttgttagtttgtactttgcgtcataaaacaatgaatattctagcattgtatcacacggtatttgagctttgtacgaatggagctgagcagctggaagtcacacaaggaggtcaaatttcataagcttataatgtgcacaggatagttgttactttgaatgtgcaaggaactcaaaagcttttttcccaaccaaataggtcccgttaactatattgggagaaaagggtgagcaagaaaatagggaagaccttaggatcagttggggtagcgaagggcattccagtaactattacagctcttccagcacggtcagcaaaatcaagaccctcactaacctgcataagtataaaatgcataagtagtagaactaatatttgaggttagtcaaaatgcaacaatctgaaaatgaaaagcctaccttgttaatactcaaggcatctatccttccaataatatgtgattattatgctttgtttgattatagcacttagtttttttttagcagaattatagcactatagttgaatggctactatgtttattagaattctatgttcagtcctgcttttagtagtgtgttccatcattcataagattgtagctgtacctattaacatcattattagcattacaatactctctttatagactcattgaatgttgtcgaacatgttttaacacaaaagaaaggactaaacatcagagcaaatgaattatatagatccaacaaccaaccagagtcatagaagaatataaactcaagagtatcgaagctttaacaaaaagaagaaagttaacattgaacttcaccagaagttaaaatagaaagtaaaaggagatatgagaatattagatggacaggaacaaactttgccccgacaaactgcaaaaaatattgccccggttgtagaagaatcacgtagcttggctgcataatcctgcaaatccaatgccatgcagttctatgagaaaatagagtttaaagttcaaaccgtgacttataaaatatcccacaacctcgattgcatttggaaagttcgatgactgcctaggctctataactggctgcttgtgcttgcagattcgttgccaaattgtgtgctcatcacttgaattttcatggttctgtaaaatccaatcctcatttcctcaaggccaaatacctcaataaattggaataactcattgaaattacacataccctatctttccagcagttgatacactgatctgatacgatgcgtgcatcaaaagcatcaaaatgccat

SEQ ID NO: 4823 - DNA, 5229 bp, Oryza sativa
cactggcattgtttagcttcttctgcaagtagttcatcacacaaataaaataaataataatttcaaaaaaatttgaataagacgagtggtcaaacgttgcaagcaaaatctcaaaatcccttatattctgggacggagggagtactaaccgtggcagctatagaaagcattacattttgacctttccattgttcattccaaacatttaccagggcctggactacccaattactcatccaaccatgtggttggaatacatctacaaatgcatcttcagtaaacttaaatgtgcctaaatccactaccacccttttgctgctttcatctttgtttatcttggacaagataaacttgcatagaatttatctagtttatttacagtattacgggcttcaagtccaaataattcctccaattcttgggcacaatgcctcatttctttcgaggttatgtcttcaacagcatttctccacgacaactgatatttttctataatgtggtcgactttgatagccatatcagttggaaggtccaggtcatccaaatgagaagcaagcatatttctcatgttaggaacacgcacaaatgagtcattttgttcctcgaaggggcacttctccttcttgccgagcttcccaatcttatacctctttgcattgggcgccttatgcttgtgcttcttcttaagctgaaaaggggcacaagcgtaagggtgaacaagtgcactgcggtttctttcaatggcatgatccggtttttcctcaatatatcacatatttgatcggggacttgcaacataaagtagatgaattgaacgataaagtagatgaatttaacgaggagcttgctgcatgcaagaaggaagctggaaacacttatacttacatctggaatgaatgaatagtcaatcttgtcaagttgaacatctgggatgccattttttccatacactgtgtgtgcccaaggttttacctaaaaaggggcaaggaagggaaatgtatagttagatgttagtgggtagtgtagttggtagcagcactcaagtatgcctgtactagatagttgacatttgcttctataaagtaggagagcagctgcagctcaaattagttcagcagcaccaagtgtttgtgctctctgttctctcatcttcttccacctctcatgtgtgagctgtgtgcgtgagtgtgagtgtgagtttgagggacctggtgatcaggagtgaggtagtgctagcatgcatatgcatacatttttacataccttgatgtcttcaccaagacgagtaaaaacatcatccaccattgatgaagtatagtactgcagtcttggggtcttcatggctgcattgccagtttcatggcaatcaaggttgtccaaacaaaaaacctgctagttacttttagtcgtacaacatttgcttttgtaaaaaaagaaaagatttcaaagatgcttacaagaaaggtcaccgggctccaaatggtatatgattcaacgaagttttgaaaacctgccttcaaatgatccattaattgcttacaccaatcaattgtagccactgtctttaggtccaagactgatcccaaacattcgcgaatgacataattagaagaacttgtgaaggaagaaaagctgaacactgccgctaaaaaaagcctgacttccagcatagtgttgctagcattcctagcagttgcacatgctttgtcaacatcaaaaacagtaatagaattggctgggcgagttttcgcatcaggattggactctttttccatcaaaagagcatctagaaggtcatccacttcaacattttgacctacatcaatgtcctggggcatctctctagcccttggaagcccatgtatgattttcaacacctctagtggctagattttgtctttagataacccactctatgcatctcttattcctgatcattgtttgatgtgtcatctgctactgtgtctcattggctagttgagcataacactatgctactctctctttttgtttacttaagatcataccttgtcctcataggctcatacgctacacggctgttagttatctcatttagttactgaacaccatgttacttttcattcagcaagcttttaatttaaagaattttctgatgctaaaagacaaaaccaagaaattttagctacttatatcgaatgaaacaagcgagcccacttcttacttcttgcaggtttttgggaggcggctaagctacagaacttgtagttcaagtttacgagccagattggacggaaggagtataagattcagatttggagctaacaagcctagcaacagcttagttcttttgtaggtaatcgatcgaatctgcctagaccggggaagatttctaagaatgcaggtctagcattttaaacaacatttgccaatgcacaaagtatggtaagtaaggtaggcttagctgactgatgcttactaaatcgaaactttgacttctatattcaactcagtctttcaattaaaatctctgctgttggagatagggtgggctttcttatcggttcactgaagtcagcttgctaaatccactttgtggatcatgaatattcttgctgcttgctgggtcatgaatcctcgtgctactgtatttcattttcatctgcagaaacagttctactaggatttgcaggcgtaagaacatcattcaatgcacttatgttttaatatagttgaccatatgcagccccgtttctaatagcggcttatatttcatatgtttcagtccaagatgttgatgaaggaagggctgaaggtccatacttcacttacctttatatgtttctagttttctatcagcattgctgagattcttttttcataaataggagggttattctatgagtgcgactacgactgccccgactgctgtgagccaggctgtgagtacatcatgtatcatgtaagtgcatacagttggcatacattgcttcatatactgcaatttctaatgaacttttgttttttttcagccaaggtcacctcaatgaactgcgcctgccttcctgcaactgaagctaatgaactgtgtgtagagtacgggtgtagaggactaatgaactgttatgttttagcagaacaaaggatccttctatgaaactgtcccataaattgtctttggatttggtgatgtttacttttgttacatcgtgttatgaacccaaaactttttgtgtttctcacttctgtttatagtttaatgtaaactgaattattgaatgaatattatcatttcaatagtgcatctgtttttactcaattttttgttttcttgcgaaattagctatatgtgcataggttgagcagtgcaaccatctaagcttaacatgagatgagtttgatcccatccttcaagagcagtgtaaatttctagaaagaggtaacacattttaaaattatatgttatgttagtatttctagatttatcaatatatctagatttatcaatatatcttttaatttgtttgctatgtattccagctaaagtagaaatatatatactccatgatttattagagtatgttgagatgttggcccttgtcttttcaaacattttctctgaatatagatttctttgtttggtttattcaggaatgacagaggtgacgactgggtggtctggtttgctcatgatctagtgccccaaatgcagaaaagaacgcgttatagagcagactagcaaaaagtgaaatccaagaaatgatggaaatgcgttcttcaagtgtatggtgaacgaatgttagtcaagattgatttttttgatactatgttgattacatttttgctattccatatgctgcagtcttgtcagaaattcatgtgggaagatgagtatagaaaagagttgcttaaagcttgtaaagagctggagatcctacgatctgagaatgctcaactgaggagcatttttgccaatcaacaagtttagatagaggcattggttgtcaacgaaggtcagctttattagattctcgccctctcttaccctccagtcctctcttcctctctccggtcctcgcgtttcttgttctacaaatggccgggaattgagatctgcagcgttgctggatatgatcttggttagttttttcttgtagtgtagtggacgatctggtcacgattcagttattggtttttttggatttcagttattagtttttttggatttctcatatttcttcggcttttgttgcctaaacctaaccaacacttgggacggatgctgactggctcagtggggctctgccgctctgatattacaattatacatgtttaaacttgctgatcaaacactaaagcaatcactatagatagatggactatagtgaacaatgatcccgaatgctaattaggaactaaccaagaagtaattctctctaagcaaatcttaattacttagaatgatatttctattaaagcagagtgataaacaaagttcaagagataagagaggattatcgatactccggaattcttccgacttcttctacttaagtctcttcctattctaatatacaataaagtacactagagtctcttgtaattcagctcatgctttggtgtgtgtgaatgaggaaaagaagaggggtatttataggtgaagagttgccttgggagagtggagatgctccaagcatcctatgagcatattccctctagcttcatgtcctcttgacaagtgtcctcactatgacggtttccaccggtagaaatggccacaaccgtcattgggatgaggagtacaaccgtcataccgaaaatgggctggactgggccagctaggggttcggccgaatcctggttggcttccctggcccacatctttcttcaggatgctgacatatgggccccacttcatgatgctccatgttttggctccaaatgattgcacattttatatattgtagctcaaaaccatgtgagttcatcagagcaaaatatatttccattctttatgctcattctctcccaactttggtggttgatcacctgcatacaaatatacaccaacactcgtggaaattgttagaaataaatcataccactatgttggatgtttcacatttatggttttatcaggtattgacggcgttattttggcacttaacagccgttaacaataggctcatacgctacatggctattagttgtctcatttagttactgaacaccatgttacttttcattcaa

SEQ ID NO: 4824 - DNA, 18621 bp, Oryza sativa
  unsure (1)..(18621): unsure at all n locations
ccactttattgtcatgatggaacttaaccttaatttcctcctgccttgcctcctttagtactacaaattactttatggttctgctgatgtgggattttaattattatattatctgtagttacaggctagtgttataatcacccaaatagtaatttgttttggtaccaaaatcattaaacacccacagcttactatgcagactagtaggcattcaatcataggagtttttattagacatgcccccccccccccccctgggcatgaatcacttcacagacctctgccactataccgccctcaataaatctagctaacatttttttatttggggtacaaaccatctccaatacttaccaaacatcagccgaatgggcttttacccttcattcttttgactgcctgtcaacaattgttcaggaaacaatcatgtttattaatgactctatgagtttaaggtgaactttgaagcacctcttttccaccctttctaacctgcttctgaactattcaggaaagtacttgcctgtgttgtgtgtggccgtctaaaaagtgcattccagatagcctcccgaagtggaagtgttgctgatgttcaatatgttgctcatcaggtcagccaccttcacaggtctacaaatgtttcatgcttgatgacagaataggtttatggttgttcctttgcaagtgttcactataaccagagatcagttaaagccccatgggccaaaatctggtttggtagataatgggcatatgccaattggatcccttctttttaagatcagttctgtactgttttattggataaatggtggaggaaaactgaactagaagtctaatattaaatgattattcaggccttaattttaagatcaggtctatactgtttttatggataaatggtagaggaaaacccaactggaagtctaatattaatgactattcaggtctatgttaggccctgaattttgaggttacttatttggcacgtttgtattaagcgtattaccacagtcacgttaggaaatggtggagttcattgcattttcaagatattaacaggagcctacctatcagttagcccctttgtcttgttttgaattttagatctgttctcaggactccagttggcaatagcatggttcaaaatgttagggaaaatcgaaactaaaagtttagagactaaaaaaaggaaggctttttttcccactagtaatgttttagggaaaagatacaagtaaatgaagcaatatgtagctgaatatcccctcatcctctattcaccgtattttgttctaactgatgtttcatgtttggtaggcattacatgcaaatgcgttacccgttcttgatatgtgcaagcaatggttagctcagtacatgtaattccatgtgctgtgccaccccataaatgctggagtgctcagaactacacaaaagaatggtaacatcaggagacatactccgtagttctttggtgaatgataacatcaggggacatactacgtagttctttggtgaaactgccctgagaatgctgagagcaagatcaaagaccatggtgtacagttttccttcctcatgtaaagcatgcgtgcacacccatgcctctatatatatttgttcttgcaagtggccttttttgtggctcatttgcaaagggaggtgcttgtggcttcctctgtggcttaaaattttgtagttaactagtagtacaaagggaggtgcttgtggcttcctctgtggcttaaaattttgtagttaattagtagtagttccgttgcctcttattaaagttggaaaatgtggcgttttttttttgtataatgaaaataattttttttggcagtacaaaaccacagcccatgtgtacttttggtgtatctgggtttgcctgtgcacagtctgccaatctaaattgaataaatattgttggttaaagttaactttcgtatatcaaaaaactgaggtagtaactcagtcagctcctgattcatctttattgcacgagaaatatggagcctttgccagtccagttgatagtttctgtttccaaagagaatatgttcatctgaggtctcttaattttacaccgaatccgatttacgcccttgaaccctaaaaccagatacaaccggtccctaaattgttaaaaccggtgcaaaggaggtccgtcggtggttttggctgacgtggcgtcgacgtagctggtttgactaggtctccgtcccacgtggcattgatgtggcaattatgtctaggaaaataataaaaattatggatccatatgtcagctaaacaaaaaaaaaatttaaaaatgatgggtcccacatgtcatgttagctacacaataaaaaataaatatggtggggcccacgtgagcaccatatgtcattcttaaattattaaatgaccaaatccaatcctcttcctcctctctccggctctctcccctctactccctcttctcgccggcggagataaggacagcgtggagaggcgcggcctcctccactcccgcccccatgggcttaacgccagcggccgccgcccctctcctcatcgctcgccgtgcctgcctccgcctccaccgccgcacacaccaccaacaccatcacacctctccccattgatgacgagcacccgtttcggtgggagaggcggccagctacgagcggccgttcgagcgggagaggctagcggaggtcggcgggagaggcacgcggtggatgggggctcgacggcggcgggcagcgggcgctcgttgtttggccttgtttggcctagcagctttcgatgatagtgtgtgtgaccagtgtggaggctttcgatgatatcctcgtctccgcaaaccacctggatggcacaccacggacaagaattgtgtctggccttttcgctatcttcctcacaggattccctgaacaaagcaagcatcaatccaaactccacctaggaagaatcacaactaagagcagcattttcattttaaaaaatgaattccatactgctactgaggagctcggaggcgtagaaattctcccaagacttcttcattgccctgaagtcatcggagggcgggatttcgacgctcatccgaaacttaaccctctcgaggttgagctcgatcccggccagcttctcgaccagggagctcctccactgcaagtacttctcctcctgctcacgggtcatctcctcggtctcctcatcatcatccccgttgtggctgcgggggcggaggaatgagaggtcgcggacgtggaggatgcccgaagtgacgggctcattgcggcgaagcttatgcaggtcggggagggacacggagaggtcggagttgggaaggacggggagggagaggggcgggtcgcggagggaaggcgaggtgcgcggacttgagctgccagatggcaacaagtgcatacccattgggtttccttgccccatactcacacccatgatggttaaataaatacccacacctatcacgggtacaaaatcatccccatacccacacccacgcgggtaacgtgtacccatacccatataattgacttgtatcatttatagttttgtaccacaattagctatattagaactgtaaaccctcaatattttctcttgtaacaatgctattaacattagcgttcaaaggcgagtaaaaaaattctacaactacattatatgatcaagaaatcaaataataatttcatataactagactagaacaatgattaagatgtgaaaggagttttatgttatgatttagtagtcgttttgacttatgttacttatagttttaggctcaatctacaggtttttttaccacgggtgggtaaagaacatacccatacccacgtacctaatgggtaagagttttcacccatcaatagacccatgggtataagagttagaacgtgaataactcctaatagagtaaaaacccgtcgggcatcgggtcatgggtccccattgccatctctagctgccactcgtcgacggggcggacagataggtcggcgcggaagaaggtgaggagaagcttgaggcgcagccatgtggggcccaccatattttttggctgacacgtggacccaccatttttaattttttttgctaacatgtgggacccaccgtttttaaattttttgtgtggctgacatgtgggcccataatttttattattttttcgagatataattgccacgtcatcaccacgtcaatgtcacgtgagacggagacctagtcaaaccagccatgtaggcgccacgtcaaccaaaaccgccttcaaaaccacttaggggcctcctttgcaccggttttaacagttctgggaccagttatatctggttttagggtttaaggatgaaaatcggattcggtgtaaaattaagggacctcaaatgaacttattcctttccaaagggctcgtttagatatggatattaatcttagcccatcttatatttattcttattttgatttctccggcctatatacctggttggacttgattgaaatccatctttcgagtttttttccagcaagcactgcattggccgagaattgggccactgttcatcatgtacagagtacagactacagcggcgtcgttcattggatcttcctcttttttctaacaggacgtcttgtggaaaaacttttttggcctacccgttgtatcgcctgtactatgtgtgtacgatttgaggtcgcattcatagccgaaggaaaaggtcctgcgcataacctgtctttttccctggtccattccgggctcatctttttgcttgtgttttagtggcggttaaaaaaagggtttgtgtcgagtactacactgatacatcactgcctcaaatgttacgtttcccttgcaacccgagccaggtgagaatcgattctcaacctgccaaatttcactggccggccggcactgtgataatatatctgcagcgtatggtttggagtttggactatttatgtgaggtctggtttaggtaccaactttttcttcaaacttttaacttttccatcgcatcaaagttagtttggagaaaaaattagtagtttatgtgtgtagaaagttttcgatgtgatgtgatggaaagttggaaatttgggaggaactaaacacagccaaaactttcctacacacataaacttttaacttttccgtcacatcatttcaatttcaattaaactttcaattttagcgtgaactaaacacacacaccctgaatcctcaagatttcttcgtgcggcatgttccccacaaattgtccaaaagagactcgaatcgaacagtgatcaaactttcattaagcgaaagggctgtacagtatttctcgtcggtgcctcgtactgggatttgggctcgacttgaatagacgagctcatgcgacaatctatataatatccgacaacttatataatatccgatgtgacaacctatataattaactgacggattctgtaattagtttttttattagtgcctaaacacctcatgcgataacctatataatatccgatgtgacacgtcaaaattttacacaatgaatctaaacatcccctcagtcatcttgcaaattcctttctgggtggagcgacttatgaaatggatgccttacgttgcgtgcgcggagaaaagctttggtttggatttcgccgcagcgcagtgcgcctcaccgaatgatggcacggtgcacctcactcacctctcaaagccactttctttacccttcctctctctcaaaaaaaaaaaaaccgttttctgatgcccttttttgccatctccgtggacatatttctcctgcaaagatgaacccgtcaaggttgggtccagccggagtagcaccgaccgagcagcttcgagtttccacggcgggcgggcgggcttgtggtgtggtggttcgtggtgcaaaaattcacggatgtcatgtgaaggttggttgggacttgggacttgggacagcgagcgtactacgccctacctgtacctgcctggtggtggacgtggttggttgaatggttggcgtgtatcttgtccagtaccgtatgttcccgtctcgagacgagacgagacgacaccgtcggtggaccacgaatcccatcagttttttctcttgtcaccacggcgcgacacaaataaaaacacaacacggagtggcttgcgacaccggcaggtgagtatttagtaatccctccgtttcacaatgtaagattttctagcattatatatatgttaaaaaatctaaacacatatatatctagatttattaatattaaaatgaatatagaaaatgctaaaaaatcgtacattgtgaaagaggaagtagaaaagtgtgatcgccaagccggagggagggcttgtgcttctctgatgcaccgtctcgtctcgtcggcgtcctacctgatgcaccgtgatccccagtgaccataccagcgtcgtcgtactatggtacaggtcgcacaggctgagcagcgagtacagacgcagacacgccacctgcttgctttgctgctacttccagggggtaggaatagttactccgtaaagaccgtaatactctctctttgtaaaaaaaaaaactaacctagatgaaaatgagatactccacattggctgtgttcgggaaccgtcactccctcgcacgaaaaatgaagcagcgattagcgtttgattaattaagtatttactattttttatcaaaaatagattaatatgattttttaaacaactttcgttacagaaacttttttaaaaaaacacaccgtttagcaatttgaaaaacgtatgtgtgaaaaactagaaataggggtcgcagcctgacggaggaaatacatctatatcatgtacagacttactctctttaaaaaaaaatctcaacccaagtaaaaataggacaacataaaacaatgaatttagatagcccttaaatttgaacagatgactatccagatttattgtcttaggttaggttatgtttcatcctcatctatattaaatatttttaagacagagagagtaagtttatactagtatacgataaaagacgtactattttcataaaaaaaagtaaatctgagattgagtttaacacagtatggtattagtacaatcaatctaaacaagttgatgggagtatgggacggatggagtactgtgtaagggtgtgtttagttggggaaaagaaaatttttgggtgtcacatcggacgtttgaccggatgtcggaaggggtttttgggcacgaatgaaaaaactaatttcagaactctccggaaaaccgcgagacgaatcttttgagcctaattaagccgtcattagcacatattggttactgtaccacttatggctaattacggactaattaggctcaaaagattcgtctcgctatttcttctataactgtgcaattagtttttttttatttatatttaatacttcatacatgtgtttaaagatttgatgtgatgtttttgggaaaaactttttggaactaaacgggcccttaaagtgcatcgcttccttttaagaaaaaatagagggagtagagtggagtatatcattaccaaccaaccagtccggtcctctgcggctctgactccttaacgtatagatcgtaaagagcggccaccgacaggcacgggccgccgcgtgtgcggtgccgtgcgtctacagtctgcggacgcgactcgacgccactctctgcgtcggttgatcgtcccgtttgtgatcgcctcgccgcaggcaagtactacaaaagtcagctataaacccacattaatatatagtcagctgtaatacaaagtcttaaacgttaggtgtatgagatatgggtctatatattaatactaatgatatagtatatatttatattacatgtatagataagctattaaattgattatagataatttgaagttagtagttagctacactgctaaacttgttctaaaaagcattttttaggtgcccaaccaaacaccgtaccgagccaccgggcgcatgggcgagagcgacacgctgaggaggcggaggcgcgccgcgccgttggttcggatggacgggcgcgtcacgggctcacggctgcaagcaccgcaccaagttaaaaccagaggccggtcgccatcgcggaaaatctgtcacgactcagcgtcgcgtccacccaacgatctcgctcgctttctccgcctccttcgctttttaatctctcatctcaggatgaggagtactactgtacagcaagcaggtcagcctcccctccaacgaccaccactcttgtgtctcctccctccccatttttttttcttaaatccacacaccatcgccaataatactactaccgttttgtatcgtcttaaatcaccggcagcgagtttcaaaaaaaaaaaatcaccggcagcataggttaacacattgttcctggttcatcgcaccgcgaacaaactgcaagtcatccatcaataataataaaaagaagctgattttctttttgagaacaaatacaaagctgattagtagttgattgatcgaacagatataaaccagttggatacttggattgatgtctctacattgctcctttgctttctttttctccagcgatgatgacggtgatgataatgatgatgatgatagctagatgcttcggttgggatcgtaacaaacagtggtcgctcacaaggcaaacaagacctcatcaaaatttgtttttatcaatcaaaagttattagtactgctcctatccatcatcacattgctttctctgttaaaataatcaatcgtcattattatattgctatcagagcaagtttaatagtatagcccactactagtttcaaatcatctatagccaatgtaatagccaattcatacaatacttgcttactatactattaatacttggtcccacatgtcatacacacattacatcctggagttcgtgttgtagctggctacagatctgtagcccgctgcttttctcttcctttttttatctctttaaaatatgtttatagcaggcttatagcctgctattgtacgtactcttacttgtcaaattattgcttaagccatggatggcagtatggcactagtactaccacagtaccactacaagtaatagtactcgaaggtaagcaaaaggcagtgctgattccacgcagggaggccggcagcagaggcggattcgtggattggagctcacgtcttcctcccctaacccggatggggaaaaacaacctaatccttcggttttttgggggctgggcggtccttgttccacgccacaacttttttaggttttccaccccgctgtgctgcgtccagaaaggagaaaagctggcttttaatagcagaaaaacatcgtgacattttacaccactacctattgtgatctcgtcgcttacgtagcacgtctaaactgtgcaaccaattttgtactagcggttactgaagtacacattccttctcacgaaaaaccaacttctacaacaatacgttcggattcataaccaaaggttatttttttatgtgacagaagtagtacttaatacttatcgtctttttttctctatgtgttgtatttatcttgaaacaaattctagtttgttgctgagttattcttaatccgtttcatgcctacgaggttttttctgtttttttagagctatcagctgcttcatgcttcttaaaaacacgttttctaaataaaatcttttactctattacttagataacttattctgagctatacgttaattttatttcttaaaatatttaatttatttttatagtaaagtagttaatcagtaagaataatcgggtgaaataatccgcattgtatgcctaaacttcggccttgttcgtttcttcaataaaattttaaattcttgtggcacgcttttcaaagtgctaaacggtgtatttcgtgcaaaaactttttatatgagagttgctctaaaatatcaatatcagattaatccatttttcaagtttgtaataattaaaacttaattaatcacacgttattaccactttattttgcgtgaaacacttaatcttcatatcttcatcttcaggagattcaaacaccaccttcgttcctaattttgtaacaatttaccttgcctaaactttgttctagtagatattttgtcacagaagtgtatttctttatacatacatgcagcgaatacccgcagcatttcaacacagaaaattacctgtgcgcacatactgtatcacagtaacattacacaaagaatatacaactactttattatcgcgaatcttttcagatactactcctacatacaatgttttaacttgcaattaatcaagcctcgtgacctgcaagttaatgccgagctgccccgagtaaattgaggtcatgactcatgactcatgagtacccccagccacctaacagggaagcatgaagccacgatgaacacacaaaataccagcaataaatcataaatgtactatcaactgctagtaaattcactacattctccgtgactaaagattgagcttctaactgaagattatcaccgacacgtagcgagacaaatcatcagcatataattaatttaatacaactattataacttgaaaattagatttgtttaaattctcaaagaaacttttatatagaaaagttttgtataaaacacatcgcttcacattttagaaaacgtgctaataaaaagctggagaaaatctcggcctagaaggtgaattgaaattaggccgaacttctaacttttatatcacagtaaaacttttctatacacataaatttctaacttttttctttaaacttctaattttagtcaaacttccaattttggcgtagaactaaacacacccttagcctttttgtggtgaagctggaaatcatcatagatttttgtggtgtatggttccatgtatcattgaatacgccatcatttactagtgctggtacactgattttcaacataggatgctttttttttcaccttccacagtcaaattttttgacttcagtaacaggtttgtttatgacatcaggaaaccagtaattcaaaagcatgtgaaacacaagtgattctgaaaaccttaataaggctactaattttcaacattggagtagtatttaactaggaccaataagcatatttacaagaagagctttcaagtatactgctaattattctgtctctcaagcaaagaaatttagggccctcaatgtaccagacttctgaatgtatagtaatcttcaatttatagaagaattaatttgataagcagtaaaagagcatattcaatttatatgaatatattactcttaattaacttcaagtttaaatgtatagtaatcttttctttcaagggatatactaactccgtctagaaaaataatactataattattaactttgcacctagacaacctggacagtgtccatgtacatagccaaaattgtcttattttaagaacaggttgatacaagttttctaatgttagcgcatatttttttcttataaaaaatatatttaaattacacgtcttttttttgggtgggggagatatacgcgttttctaatgatggcactaatttctttcttctactaacttgcatgttttgttaggaaaactctgaatgacttcctaacaaattctctttttacctctgcaaaaataattctttttttatttctcaaaagaaaaagaagaaaagagattatgcggatatgcccttgcaaaccggggcagtggacgaaaatttctctggcaagtggactggcgagcacactctccaccagtagaaaaaaatgccaacctcaaaccaggtcaaaaaagcagatttgacagcatgcttctttggtgcctccaccgcctgcatgataaaaaaaattcctccagctaaagataaaaacaatttaaaaaatttactgtatatcacaacaacaaaaaaagtcacaaataatatccactttccctttttttttttccaaattctctctctctacagtctaacacacatgctgacaaaggagatctccacatcaaagaaacatgacatcataatcttggcaaacttccaaaccctacaacaacctttctccctcaaaaaaaaatcattttaatatattttaatcaaccaccaaaagtaaaaaaaaaacaaatcagcaccagcatagctgccacttgtcctgcacctgcaaaatctactaccccattattctcaatcaaatcagtgcatgatcagtagggacaggccccccttgagagagaaagtagagagagaaggagaaaagtgtgcactcctagagagagaaagagagaaaagtgtgtactgctggacctactagtagggtccaacaactaccattttagagagagaaaaagagttctctctcccataaaccttctccctctctctctctaaattctctctcctcctccactatttcttcctcccctttatctttccggggcgctgccggcctcaagtctcctcttccacccctccacttgctggtgcggtgctgcgggccgacgaggccgagaagggtaggctgcttctcgatccttcacgcgtcctggtgattgatttttcttttcgttggggaatttttttttggacctgcattccgtaggagggagggatagattggaagagggagttcttgattggggttttaatctgtgtgttggttcttggattcttttttttttctttttgttctggtctgggttttctgatcggttctatatctgggttttcttttcgatctcgttttcgattttttttttgtttttgcgatttatagggtttaatctccgctcgtttctgtgttcttgagggcagaaaattcctcgagttttctttttgttcgttgtaactgaccttccgcgttggtggttttcagaattttggactttgatgagggagctgctgattgtgagtcaagaacagttgtgaagaggtgagaatgggggtgataattgattaatcagtaaaggcatatctttttcttgtttttgtttagattctctgtatggtgttgcttttattatgttttaataatcacttctcaatatagctaggcgtacaagctaaggaatctataaaaaaaagatcatatgttgccttgcacttgaatctttagaacgcttctattttggttcatgatgaattatataacaacagtatagcatctatttgtttcttgatgaatactggaattgtgttccatatcaaatccatctgattgctctgttcttgactccatggagtttcttgatactgacactagaataaacccacttcccaagtcgtcgtagtgttaaagaaaaggtggaattatagaatttaagttattgacacaataaaatctgcagtgagaagaaagctagagaagatcaaatggcagctgaatcctccctggttccacaaacctcctctgaatcgattgcgcagaagatgggcttcttcagggtccctgaccttcttgtcaaactgagcagcaaatgtttgattgagctggatgcagtccgcagcccaacatcgcccctagacctcatattcttcccaggcctcggtgccaaatcgccgaggtcgtctttccttggcgacagggttgggcttggactggtggattcacttactgatgatagctccactcccttgggcagcaggaaggttcttcttggatctgagatgaggattactgataatgtaacttccaagaacagcttcactgctcctgtcgaagctggggtggttgatcagaaggatgagagtatgtgtgatgacctgaagggtagtttcatgtctctggatgacattgtcaattcagaggattacacccgtgttgtttgtcgtggtcctaaccctaggacaacccacttctttggagatcatgttttagaatttgaaggtgagcagctgatgcctgatgagagtaagagtgaggagagtttgccccctcgtctggaagagggtatgatgagcttctgttatttttgcggtgagaaactcgaagaagggaaagacatctacgtctatcagtaagtgatccagtattatagtagatgcatcatcgttgtggatatttttgttgttgtattcaagaaccctgtagttgtttcgagggttatccttgtttcgatcctttctttatgtttggtattctatctttcaatcataggggtgacaaagccttttgcagcatggagtgccgggagaatttcatggaagatgagatggaagaaggcgaacccgatctctctgcacctcctagcagcccagtcgccaacgatggttgtattttccaactgatccagtgaacgagcatcagtaaacaacttgatatggtcttatctgaagtgctgtccgaggttaataagttgcagccatggatgtgatcatatttcattgagttgttgcctgaagattttgtctgccgcggcactgatgaatttacctattgatttcttaattttacttacccggatcctcgaatttttggaggagcctgaacggtaactttgcttccggtcatattattattttggtcggaaagggcgtgcgtctgagtttgaatttgtgtttgcttgaacctcatcttcaatcggctgtcatgttgacaccattgatcactatcatgtatctgaatatatgtgcttctgctctttctggcagaaaggaagtgctaatcttcaagtttactaataaatgataatcatgatgtatctgtcatgatgatgatgtttgattctcataaaatccatgatgctcgattcttatgtggcaatcactcctggattgttggcaggatgtaagagcatttatctgcaatcttgcatgatgattttctgtcaaaaaaaaatattgcatgatgatgcgcatatcaatcaggaaatgttagcagtagttttcatgttgctgctaagttagcatttcacgctacttatcagtgccaaatgatgttattcatgtcaattggttcaggggttaccaatcttaaaaggctgggtcgctgttttcatcggctcaggagtatctgtcccttaaaacttcacagtgtggatgttgttttcttttcaggttttgaagtcagttttgttgtgaagtgagcttagtttaacttggtaggtttcttgtaatagaaccagcctatttatttaggttcaagttctagagttaacacgagtactcgtatttataactaattattcttttagtagtaagtgaggcgtccgtgataacgaattcatcaatctcgagatgcatagggatagggagcatatgtactgtgtttctttagaaaagtcacttttgttcgtccatatggccaatagtgccagatttgcttctgtaacatgtaacatttgcttctttaagatcctccctaatgatgattgcaaaatttgtgaacctctcatctcaaattccaaaacctcccaaaacgaatttgaatttcagacagaggagagagagagagagaaagagtgtgtgtgtcaagtccaaattaaatccaaattgcctgatagactgatatcgttaagaaactgatctgaagctcgttcataaccgaatctctctttctttctttttgattgagaggataataatagtataaaaagcgttcgtaaattgctcacgcgggccatctttatatgggccgaaaaagaaaaaaatccggcccaactccaacgccgcttcggctcccttcgactataccttcgccttcacgcgacgcgagactcgccgccgcaaggttctcctcctcgtcggcggcggatcgtctcctctcctcatctctctagcagccgccgccgaggccggcggatggggggagctccacggggagcgggggggcctcgacgccgccatcgccgaacagggctccggctgcgtcggcggcggcgggggtggcnaggtggagaagctcaggcgggagctccaggccttcgcgagggcaaacccgttcctgttcgtcgacggccgcgtccccagagacgacgcgcgacatggtcaagctggacatcgaggaccacgagcgccgccacccttgcatcgacgtctcgggcttgctcgcgcgctacgacgagcgggaggagaggaggcttcgcgccgggaacaagcgggctaagctcctcgccaagtttgtgttaggaaccctaacgaggaatctctcaattaactggaattacgagtacgcatacaatctctcaatccgaagaattgagccgccgccgccgcctgcgccaccgcgcggttccagttcatcgctgccttcttcatcgttctctgtttcacgtactcacttcgaattaaaaatatttatgtcatgattaaagaatatttcatcataaatcaagtcacaataaaatataattatataattttttttaataaaataatggttaaatgtatcttaaaaagttaataacgtcattcgttaaaatacagagggagtatattacaacaagatttgacagcacacactctctcacacgccaaccaccctgccagctggctactaggctcacttggcccattggtccctggtgtatcgagagttgggcttcctccgtcttggcccaagtggagcgaaaggttcctgtagcttgtccggcacgcctcctcccttacgatttgcagcttctagcttgaagtccagcttccctccttggtcctccatgatctcagcttcttcttcttgggttccaccatcttgttcttgtttgtctggttccttggagtggtcgtgtccccccttgagtcctccaggccgccttggtgaaggcctgacaagcacccactcttgaaaccagcttgcccccaagacggtgcatgcggaaatcttgtctgcagatcaaccatgtcctcccaagttgcatcacccgctgcaattcctgtcgaatgggttaacaattgaatagtagtggttttacttttcttagtcaagtgataatcaaggaattggtggggtatctgcaagtggtctagagtggcaggtaattcagtttgaacagggtgagaaaaaccctttgctcccttcagctgtgagacatggaacacatgatggatctgacatgatggtggtaattgcaaacgataagcaactgcttccactgcagaaactggaaagggtccaaaataacgaaacgataacttgtgacttgctttggtggccacatatgattgcacataagggtgcaatttgagatagacccactcccctagctggaattcttcgaaacttcttttatgtcagcaagatgtttcatgtgttgttgagcccggttcaagtgatgttgcaacaattgttgcatcaatcctctttgcttcagcccgtgatttaaagcaggcacaacacggtcattcatattgatgccaaagtggcttgggctatacccatagaaaactttaaatgtggttttacccaatgtggaatgggtaatgtttatgtaccataactctactaaatacaatcaagatgaccatttagtgggtgtagcatgaacaaaacatctcaaataaattttcaggcattaatttactctttctgtttggccatctgtttgagggtgatatgaagagctcaaatgtaattttgtaccaaatctaatgaaaagttgttcccagaattggctagtgaatattttatctctatcgatatgatgattttaggcaagccatggaatttgtaaacatgttgcagaaactgaatggctacactgctagcggtaaaaggatggtccaagggaataaaatgtgcataatttgaaattttgtacaccactacgaggatatatttataatggttagattttggtagtccctctatgaaatccaatgatatggtctgccattcaccttcatgcactggtaagggttgaagtaataccgggtatttagccttgtcttgtttagcctatagacaaatttgacaagtttgtaatctgctctggatcatttttttcatgctagactaagcaaacattcccttaattcttctgtaggtggtaggaaacccagagtggccacctataggtgtggcatgcaaagcatcaattacttgtgctgaagttctgcatcttgccccaaccagattttgttctcgtatttcaaaatgccctgctacagggtaaaacctagtttagctgaaggatcaatgatcaaatctacagccaggtgtgtggcatgagcatctttttcataactttgcatgacttcttgcaaccacagagttacacattttgatatggacactaactcagctttgtcatcatgctccttcctggatagtgtatctgctgtagagttactcaccccctttctatagcatatgcggtattgtagacccattaatttagtataggccttttgttgccatggcgtgtgtaatctttgttcagagagatgtttcaaactatggtggtcagtcaaaattaggaacttcccatgttgtaggtaagtcctctagtgttctatagccagcaaaatggccatgtactcctttccgtatgtggataaccctcttgattttggacctaaggctctgctaagaaatgcatatgatggtgttctgtgaagtacttgcccagtccta

SEQ ID NO: 4825 - DNA, 7264 bp, Oryza sativa
tcatcatgaaaagaaaacggaaaagagagagaaggggttttggagtgggagaggggggagagtgaggcgtgtgaacggcaacagcgttgggcagttgggctgaatggcggtttgggccgccagggatgcttttcagctggatgagtggaacaggcccgtataaggctaaggagcagctatatttatgggaataagttcactttaggtctctctacttgttggtcagtccaattttcgtcccttaaccacaaaacttggtacgacccatcccccaacttacgaaaaccggacatatgaggtccctcgacagtatggaggacgtttttggctgacgtgacgtctaagtggcttctttgactaggtctctgtctcacgcactgacatggcgcttacatggcaatttaacccattgggcccacatgtcagttacacgcaataataataaacggcgggcccgtatggccccacatgtcattttcaatatcatctctatcctttatctctcaccccttcgttggagcagttggagcaaaggtaggcggccgccgaagcaacccgcgaagctaaatgaggtgggcagtggcgactgttccctactcctctctcacttcccctttttggcatgtgggcggcggagggtgcgactgcagagcagcggggcggggcaaagcggatgaccggcggagcggggcatgcggcggaaggaacggcggggaccagagcatgctggcggtgcggagcggaatgggtggtgagcgctccctactcctctctcccttccccttttcggcatgtgggcaatggagggcgcggcacaaagcacgcggggcgaaccggccggccggcggagcggggtgtgtggcggaaggagcggcggggactggagcatgctagcagtgcagagcggaacgagcggcgggtactccctactcctctctcccttccccttttcggcacgcggctggcggagagcggagcggccgaccgatagagtggggcgtgcggcgggcggagcggcaatggccatcggatgactgtgacaggcggggaaaagggcggcgcgcggcggccacagccgtatgaggaatcagcttggcggcggcggcgtgaacccgttgcgcgcgcgaaaggcgaccacggccgtgatcgtgccgtggctgttcgctgccctccgctcctctcaacttgacacctgtgatggctgccactgcttttcctcgttgtcgctcgatccaccgccaccagagaagggagggaaagacagggggagggagaggccgccgctggagatgggggaagccgacgaggcgagaggagaagggcagcctcgacagaggaggggtggatctgtcggcccatcccttgctcccatgctgccgccactgcttcatgggaggagaggaagagtggatctggccaccccgccgccatcgcctgccgttttatttgcgatggggaaaggaggaaaggagagaaaaagagaaagagagataaaaagtcaaaaagattatactaatatgacccactatagataacttgcacggtaaagtatgtggctaatgaggttcttcatttagttggtacgcgaagttcgctaaaatcgcaaggcgcgctgcccttagagcatccacaatggtaaagtaaggtgctctctataaaacatgtacatctcagcaatagattagattaatagtaaaccacctcaatagcatgtctacatgggtatctctagctatctaatctattgcctcgtttttctctagagactatctccaggttagtagatagctttgttctctctcttcatttaatctcttttaagtagaaaaatatattgacattgatatcttataaagagcctatagataaccattgcgggtgcccttagatcatcaggtgtcacggccaaatcacagagctctgtccttatatagatcacacgtgctgttctcagaacgatcacaaattaacggcccggattggcccaactggcgtctagcataagatccaacgacagagatccgtcgatcacgtttccctgaaaaaaaaaaaacgatgacacgaaacgcccccaccacggccgcatctctccactctccagactggccttctcgcgaactcgccttcttcttcctcccccaaggccccaagccgcgcgacccagagcaaaagccaaaagcccgagctccacaccccccaccgcccatccgccgcgaaggcgcgaagccccgtcaccgcgcgcgcgcgcgcgcacagccatgttcgccgccgcctcgtgatcccgaaggctccccgcatccacccacccactcacccctccctcgggggggagggattcttcggccatggcggcatcggagcgggaggccgcgctcctggcccgtgtggccgcgaaccacctctacctcgggcagttcgaggccctgcgagcggcgctcctcagcctacgccgccgcgccgacccgggcctcgccgcgggattcctccgcgccgtcgtcgccgcgggcggccgcgtccccggggtgctctggtccgccccacccgcgtgcccttccccgtcccacctcgcctggctcaccgcgctcgagctcgccgccctcccgtccacccccaaccccgaggcgctccgcctcaaggccgaattcctcgtcctcctccagcacgtcgcggacgaccccgctgccaccggcgccgaggcgcgggggaccctctctaggctgctggatttgggggtggcgaggctcaagcgcgaggtggagggtggaggggaggcgggcgtcggtgctgaggaggtcgcggtctcccaggaagatctgacggggctctggggggtgttcctagacaaggccgagctgtttgacgcgctgtgttctggcgtctcgaggcaggtcgcattggacagtggtttaggcacggatgtgctcctgtggctgcggcggagcgtgcagcttgcacacctggacgcaatgaaatcacttgtagcggcaggagatctcgagggtgccactgggcatcttcgattcctttgcctcgatcatggagtggaggaggatgagtataagtaagctctattgcatatagttggaacctaaatataaatcaagttgatatttattgtggaacatctcatcatctgataggagcgaaaaattagcttcgaggtgcaaattgtgaatttagtggacatcataagttctcagcacatgcgtgaaacggtaggatcggtggtagttttagttacaatcagcatttattgtaagaataccatttgtttaacactaacatatgaatgatgtaacatgtttggttaactccattcaatatcttacagctcgattaggaaatgcatgtttgttggtgcacatctaaacatttgcatgtaaatgacttattggagtgacagtggagatgtaaatatttttagcatggtagttagtatattaaaagatatttgacttgggactatactccctccgtcccataagaaaacaacctagtaccagatgtgacacatcttagaactacaaatctagacatacctgtgttcagattcgtagtattaggatgtgtcacatccggtactaggttggttttttatgggatagagggagtacttcatgttgacagtgagctgttttggagttattgtgtaatctctgtctgattcaatggtcttgctacattattccagttgggtttgtaaactcccaccgtacacctgtcctttaacttcagttgtagcctatgtttgtattgcaaagtacactactgacggctgctttctagtcactgctgccattccattgtaatggacatgggggatttagataatataagtgtgatccataattttgcagtgcggctaactaaaaccgcaatcactaggtgctatctacttatggcaaaaaaatttttctgcaatttgtttttaatatttggtcttaacgccatcatattcatgtttgcagtttaaggttagacataaaacctgtataagtggtttcagattacatttgttcaactagtagtatactatgtacaatggtcacagtttggtggcaaatatggataccttccataaatttttagtttctttatacaggattgcactaggagatcttgtcagaaggggttggccaaaaccatcgaattatggtggaacatggtttgagtcacacgatagaataattaaaatgtttggatcagctcttcagtctagcactccccagcttgttcaactgattcaggtagcaaacataatttttcttttatcatttctactggcatgcttctatttgctttccctttaatggacaaccaagggggaacttggagtcaaataattaagaagaaagggtgagcatgttgagaaccaaacacgggaccacacacccctgccactaggctagcaagtgcaactcatccttttcattttcaaccagccttttcttttgttgtaataacctaaaactgttatgatttatattaccattccttttctttcatgcaacgaatctgacctacctaggtcattcaacatttagttcttaatattatctcattgctaaagcttttcttgcgtttcaggtaaaagaaaacattgtaggtccttgaaatcccatgttcctcatgatcccaccactgtttccctctccactctatttaatatattaatgttaatttatctttttttggaatgtactcttgctgatttatagctaggtggtgcttatttctgttctttgttctttggttctagctcatcttggatgacattctttctgaagaaatcgaagaccatggtgcctctgatgctaattggatgccccttcctttcaaaaagtttatggaaacattgtccttggagaggggtgcttatttggatgacaaaaccatgctgaatagggctataacatcctgcaagaaagatctgtatcattattcccgaatttctggaaaacatgtccttgaagtcgttatggaaactgttctttctttgattaagagggagcagcttcaagaagcagctaacgtatgcattttttttatgggatatactgccttctttttgctactatgagcattgcaggacaatttccactagttatatgcctcactgataccttctggcaaatggctttctgcaggccatttcaatgtttcccctactccaaccattggttgctgtcttggggtgggatattctgaagggtaagacagcactgcggagaaagctactgcagttattttggacgagcaaatcccaagccctacgactacaagaatatccacattaccgtacagagacagatgaggtacttctgtgcttcttggctctcttcatttctcaggtagcatgcataaaaaacttgtgaacgattgtgacagcttctattggcagacatcctgcgaggagtacttgtgtgatcttctatgctttcatctggatgttgcatgcttcgtttccagtgttaattctgggcgccaatggaatttgaggaattcactgttgtttacccaacaagagcaagattctgatgttaacagtacagaaatattagacccttttgttgagaacttgatacttgaacggctagctgtgcagacccccattagggtgagttctaatttatcttaaaatccgattactctgatattatttctccaccaagcattcacatggctacatttttactacacctttccatattttacattttctcttttgtcttattcatttcgtgttgagtgcagagcctttggttttgcagttgatggctcaatattcttgtgaaaccttttcttcttgtaacttccatataggtgctatttgatgttgtcccaggaataaagtttcaagatgcaattgagcttgttggtatgcagccactttcttcaacaactgcaatttggaagaggttcataaccatctctgtaatggcatttcaccaactactccatccgtttcatattataagtcgtttggctttttttctagtaaaacttctttaagtttcaccaagtttatagtaaaatatactagtattttcaacacaaaacaagcatattatcaaaatatattccatgttaggtttaatgaaactaatttgatattttagatgttgctaaatttctattaattttatcaaacttaacaaagtttgactaggaacaagtcaaacgacttcagagggagtaatatttatccttttgatttacatattcaatattgcattcttaacttctcacttattgtgttttggtccattaagatctcaccatctctgtgactctgacctgccttttgcttatctcgataatgccttaacttgtttagaagatttcttaacattattatgcaaataaggaggaggaacttaatcttatttacgtattgttcactcataaatgggcaggatgcatgacattgagctgatgcacatgcgatatgcgcttcagtcagccgccctttctctaggagagatggaaaagagtgcaattgatgggaatgaacaccattatcagatagccttgtcatatttgagggagatgcaaagttttatggaggctatcaaaagtactccacgaaaggttggctttgctgcacatcttttttgtttggccctttgtccttaaatgaagtgatggtttatgtgaagcatgcaatacttctgtgctaattctaaacgttgtttctgaaatataaatatagaaaatcatgggatcgtaaattctaccaaattcttgttatctgaacacatgtatattactacttttacacctctttgtttgttaatgttaaagtcatcagttacatcatgttatttatataaactttttttttgttacatgcacttattttgatgaggataattcataaagggaaaacaagtcaacaaaacaacaacctgattctagattctttctccattctccatagcaccagattcctatcaacaactacctacttttgtctattagcacctcatcatttgaaaataacatacaccagagaatagtcccttgtatgtcccctgtgacttcatccatcacaaatgctaaaaatcattagggctcaggggtaacccgtcatgtagtcctatcttaattgggaagttagcatcctcgctgtcacatttttgaaactttatgatttttcagtgcctaccacagtgaccatttttggtgttctgtaatatccgatctccaaattgatgaataccaagtccagattcttctgctccagtcaaccttacattttgag

SEQ ID NO: 4826 - DNA, 21139 bp, Oryza sativa
  unsure (1)..(21139): unsure at all n locations
accagcctctgttatttatacaagaagaagtgccctgtctgagtctgaatctcaaatagatataatagcaaatgctcgtgctcccaaagcggcttctgcgtcaagccattctatccctattaagactagaatagtagtcagcatcagcataaatgttgaggtgcatctcgctcacccattgtaaggcattggctcgcctgccattttgctgatagaaccaaccgtgtcttattgtgtgagaatgcaagggcaagggatatatatatatatatatatatatatatatatatatatatatatatatatatatgaaccaaggttcatatgcacccacctcgtatggctgacacatatgcacattgcactatggatgagtctagttcattgtgtactaatgcagctataatatatacctactccactctgttcctatacaaggctgcgtatgcatgcttgtttgcttggtacaagttgacttgcttctatgcttcccaaagccccccgcacctgcatgccacacctatattctgacaccaatgtcatgtcatcatcactacaagctaaaaatctcattcataaaatactttcggctctttttgttagttgtcatgtctactgggtatatgatttgggggtatatcgcttattcgcttgccacggattgaaaataaaaaaacatgtggttaatattttacagatatatgttacattctaaaatatgatttagttacaatctacataaaaaaatcaaaataaacgtccactcaccaccaaaatatgatatttgcatagaaatgttattttgcaacgtgatgtataaatgatattgcaaaatgatatatcacttggcatttattataaacttaaaaaagtaaatgactggtgttcctacgaatatatgccattgcatcataaaatctattttttttccaattgtaattaacatagtaatgtaatataagccaatacatcataatatctaagtttatgagaatatatataacttttccaattgtcattaacatggtaatgtaatctgaccaagttgaccacggtaaagagctaattttgagatttgataatagcacttgacatgtgaaatcgaatagatctattgcaaatttgataatagctctagagcaactaactagcaacaattgctcacttaaatatacaaataaatgtaaaattaattttccagagtgaatgtcagatcctttgtccgagctatctttcgaaaggctttcaaaattatctccacagttttgtgcgccgaggtgagttggagtattgatatacaatcaagtaaataaaaaacaaattaaactagcacacagactaaaccctgatcacatccactgagcatgccatgtccttatttatggaggaatcagtgcaatgtcctgttggtcaaagatatcagtgacaagacaaaacacggcatgcatgcccagtccaggcttttagtagggtgaaaagaaatgtgagaaaaaaatatgtttggttttattggaacataatatcaaagttgaatgtccactcaccatgaaaatacaatatatttgcaaaaaaaataacatttcaaaaatgtcattatgcaaaactgatttccaaaaatgacaccgtaaaaagcataaatcacttggcatacagtgaaataaaaaacatgtgattgttatttttacatatatatgctacacccagacataattttttctataatttatggcctatatagttaatttttttataatttatggcctatataatttgttgctggaaacacaacataatgaaaatatcatttgcaaagtgatgtcaagaataaaatgatgttgcaaaatgatagtatataacttgacatgtattgtgaattaaaatatcgcatgagtgaagtttctaaaatggaaattatgctacattctgtgaatatcaagagaaaagaaagagaaagaaagaatattcaaatggaggaataaatgctacgattagcttcctttgacttgctcttactcagggagtacatggcctacgtcagacctacactagcattgactgtgcgccgtgccggtgtactactgtgaaacaacgtgtttaacccccacagtgagcttcatgagggcaagtacaacgggtcggcgatacccgtcgacatgcacttttttttttgcgaaacccccctccccacggtgctcgcttcggcccatctgtcgtctcgttcgtcgacgaggccagcgcgtgctcccaggcaacgcgacggcgatgaagcccgttgtacgacgcgatgcggggaggcgacggaagcgcgggatcagctctctcgcgcgcggaacaggttcgcgccttcctcgcccgccaaaatctctctcgcgcgcgttgaaatagcccccccccccctgcggccccatccaaccatatttcgatctggccaccatgtcgcggcaggcacggaaggaggcggcggcggcggcgcaagatatgctgaagttggatgcggcttggatgcgcaagccagctgcatcgcaatcttgaaagggtgcgatggcactgatgcggaaggcccagggaggagctcgggcggtgtcgatggtgccggagcagagcagttcagggttggcggcgcatgtgccagagcaccggagttcgggatatggcgcggctagtccaccaccaagctccttcaccgactgcagctacttcttctaagatcatttcatatataaatatatataattattatatacatgtttattttacaagtcatgcggaatatttaaatgtactgtgcattgtcttatgtatgcaacaaaatgactacaaagatcaattatacactagatcatcatgatttgtgtgtcaaaggatgaattaaacactctacagacagccaaaccaacaacccattgtataagctgtctgtttaagctgtctatttgtgtaaaaagacagcaagctgtctacacggttgtacttgccctgaatatttagtgcatactaacccatgtactagccgcacgcatcatgagaacgatggatggctaggattcatggagcatatggaccaaggttcacatctgagttgcataatatgaaccaaggtgcatatgcacctatatgcatagtttgacagatgtacctacctgattggttcccttcatagtggcggtaaggaatggtacatgttatgatttttatggtccaaaatggccctcaagtagtactacagtagttcgaatgaattttttttgtggttttcctttttttttcaaagtaatgtcctaagtttatttaatatgttgataaaaacatgacattatatttctaaaaaatatataatgtagattcattacaacatattgtgagataattttgttatttttttacaactttagatatgtaattgatattttattcaagaataatgtatttccattttccccctcaacggtggtattatctttctatgggcggactttgtgttctctttggtttgcacttgcaagaatttttttctcacagttttctagtcaatgcaagttttgggtttagatataaattatttttaaaatgctatttagagatgtgtcatttgcaggttttattttcagagaaatatcattagtatgaacattaggagaccatttgcacattttatttagagatataaaatcattttctaaatgctatttagagaaatgtcattaacaaatcatttgcaaattttatatttcatacaaaagaagatatatgatatatcagtatgaacatattcaataaatcttaatatatattactcagctacaaagtcaagagagataaaaataataatagttttttatatgtacgagtacaaaataaaaatttgctttgaatcaatgaacgtctcgtgtagtgacatactagtgcaaaaggacaatttgggacaaactcaaaatgtgacagtggcattgtgtaccttccccgggtgtacatacacctcctctcatccaccgtccatcccaaccagcagcgatcggatattccatctgcgaataacgggtatggccgtataggatccgctaaatattctaaaattattgttgaattagcgatggataattaactaactattaccgcttatatatatagttgatgtaattcagcatgcgtgcagtgatgaatcgtcagtgtgcttagtttgatcatggctagctagcttattagaaagagatcaaaccactgatgaatcggtcaatctgtttgggtcggccgagattgactagggtgttaacaacatgttaaggtgttcgatctctctctctctgcgttctgaacctacgtacggtcgtacatactttggaactacgttctgaatatgtatatttcacccgagttgaagttatagtggtcgtttaattgagagcagaagttgaacggagcaatgctgaccaagccattgtggccactactgccgtcctgtgcgggttgatcgatcgagcacgttgagtaaatcataggtatgatgccatttgacacgactcaaatgcgttatcactttatcaggatgagcatattgcagccgccaccgtagactcatcaagcacaactatatagaaacgattttttttacgagaaccctataggttggttatagttaaacttctcgcccttgcaaaaatcgttttccaagaaaaggttcacgggccttttcgcatacggccccataagagatccgtctctgaaaatagacttatttttttagacgagccttttaagagaccacatgtaaaaatttattttttttaggagggggctcttaagagactgcatgcgaaaatagattttcatgttttctcctgttctctccactgcatctttcctctcccactgttcttatccactcatcctactcctcttatcttcctctcctactccctctcctcccttcctctccccttcccactccagcggctgaggcggggacggcgggaaagagcgagcggcgtcagcggcgacgactactgcgacgaccgagccgaatccaccgccgccaagcctcaggcgtgtggatccgtcaccgccaggccttgggtaagcgggatctgccatagccgggcctcgggggactttgaccacgatggcagcggccttaagcgacaactacgacgatggatcccggcacgacggcagcagcgaatttgacacggtggcggcggattagggtttatgtattgtggatctagggttttttgttttgatttttctttttgccaaattatttttgcgtgcggacggctcaagtgtccacctgtgaaaattggattttcgcatgcggctgcgttgacggcatgcaaaattccgattttcttcgcagacctttaggcacaggcgggtcgcccgtccatatgcaaaaaaataacttttggccgcatggagaaaatatttggtagtagtgaacattgtgaatcatttgagaaagtttacggcatttgaggacgtaacatattttctaatgtgcagtttagtttcataatacttttttattctagcatttattttatttagaatacttgtcattctcacatttcaaagaacttctctccctgccctccttcatcaatgcagccatatatcaatgaagtcatagctctcattattagctcatctcaatcaacttattagatcgactggtttggaaaaatagttataatgtacttaatgaggatataaatataattttctatatctcttaattagttagagagtacctcatgaggatatcatttttttcctgaaaaacaaaattaatggattggagattttcctttctatattacgacctaatcacttttcctttttgtctgtttcttttcaccgattgtgttttttttcaggcgcgcagcaaccctttttttttttacttctgttttgtttttctctagccatttttttttggaacatgcacgtgaggggaaggaggatgactccgctttttgagtagtagagatgtactccctccgtattatgacgctgttgatttttttataaacatttgacctttcgtcttattaaaaaatttatgtaattatcatttattttatattgacttgatttatcatcaaatgttctttaagtatgacataagtatttttatatttgcataaaaaatttgaataagacgaatggtcaaacgttggttaaaaagtcaatggcgtcatatattaaaatatggagggagtaaaaaaattagtacaacgtaagaacactgctagcatagatcatttttcagtattccggattgcagctcttgcttcctaaaaaattttcagtacccaaccataggttataagagcatcaccaacagattatctataattttctcctaaaaatttgttttttggtttcctaaaccgaaaataggaagtgaaaaaactcctccatccaacagatagcctaaattcaatccccaaaacttaaaagtaggcccttctgttaaactaccaacagaaaattccgtttttttttctttcacgcgcagaaagatcgctatctcccacacgcgggaacgaaggagagaggcgggattgcgtgattgggagcgccttccgcgcccacatataaacggagcgaggaaccaggagaagggaacttcaaaactcgggtaggagagtaggggatctgttggagctgatttttggactaaaatccctcaaaatcagttttgggaatcatatagggagactgttggtgatgctctaagagatttttgagtttccacccatattatgaaatatactcaagagagttttacttatgaaaagaaagaaagaaaatgttacagacttactagcttaaagtaaatacacacatatataatagtattcattattcaaacaaatttacaaagaaacttaattataagaattatctgctactgctacatgaacagatacagaacaccatgaccctcttctactcacttgagagttagaggcatatgcttctaaagaaaagataaaaagactttttttctagacttgaccttatgcaattatgcattcttacaacacccaaacaaatcgataacaaaattacaaaacgctataaaaacaataaccatacttgaaggaacagagaccagaaccagaaccatggcactctcgttctcttagcgatcgacattctcgtttttttttttcagaccgtccacagtagtgctaccgtagaaaagaacttcagtgagaaaagtaggtgacgaacagcgccgcgaacatgagcaggtaggcgatcgcctgatcgatggccttggcgtcgatcaccctcgtcgccggcgccgccgccgcgccttgcgccatggacagctgcatgaggccggagaggaagaaggcggtgaacagcagcaggtacaccttcagggtggccatcttgatgtgtgttactgcaaagctacctgaaagcctgaaactgtcttgagtttttaagatcttggaagcagctagagatgatcaggctggattgccaacacttttcttctgatgtgtttgtttgtggcaaatgcagacgggttggtaggtatatatatatatagatgcagacatttaaatatatttgtaaatctccattcaaagttgatcaggaccttgagattcaggaattatgcagagatgcatggtgaatcggtcaatctgtttttctgtctgtttgggtcggccgagattgacctgagagtgttgttgaggaggtgttctctctctatgttctgaactttggagctatgtacatgcttgccggctggtgtacatttttttaaggtaatgtttctttctaaaagataactagccaaatacccatacattgtaatggattattgaaaatagctaaaattaagttctcgttgaaaaaactgtcttttacttggttgaaacgagatctttcatcttgaaaacgaaataaaaaaaataccatgcttaggattgcatttctaatgtgagaaatagacgtttggttttcgatcagcacttaaatatagatcgatcacatgctaataagtttgtgagattttttcttaatcgagataaagcgacagaaatatgcagtatatatacaaacaagcatcatggccacttgtcaatattggtggtggtggcaaactcactaccaccaccaagaattacaatctttttaaacctatggctcatttagtataatttacataattatgcttttatcttataatttttaatcttcatagttcaatttcaatagatatttagggttaacataaacttacggtgcaaacactaatattttgacactaaaggagacaatgcatttatttaagtatatttctaaatattcattcgaagttgataaaaatctacatgtccgttaagtctgagtttccggcacgtggtatatattagttggcaaaaatctatatatatatgctcagtttacttacaggcaaagatcgatcgatccgtccgaacatgtgcagttcacacgagatggggtgtgtttagttcacgctaaaattggaacgatgggacggaaaagttggaagtttgtgtgggtaggaaagttttgatgtgatggaaaagttggaagtttgaagaaaaagtttggaactaaactcggccatgaagttagagcatctccaacagcctccttatccccctctctaagttaaattttagcaattttggctcaatttcacactccaacagactggctatcgagctggccaagccatccggctggccaaagtcctccttccactagccaaatttgaccaaccaaaatagcctagccaatcgtgggccccacgccgacagcatccctctcccctttctctctccgccaaccgtcgtcgtcgagatgccatcgctggtgctgtcgaggtcgtcgttgccagacgccgccgtcaccagccgtcgtcggcgctgtcgccgtcgccagccgtcgtcgtgccgttgccagatccgcgaggtcgtcattgagccgtcgccagccgtcatcggcgccgtcgtcaaccgtcgtctccgaggtcgtcgttgacggacgccgtgccgtcgctagctgtcatcgacgtcgtcgccaaccgaggtcgtcgtcccgtcgtctccgaggtcgtcgtcgcctgccatcgtcatcgccatgccccggcggattcggccggtgcggcatgtagtagaggacgccgccatctcgctcctgccgtcgtgttcaccgcccacgccgattggccgccccgcgtccacgcgagctcggcccgagcggcggcggcggcacctactgcaagctgagcagagtgggtttggggaaaagggggagagatgaggaagaagaaagggttgtagagaccaacacgtgcgtcccactgtcataggctcataatagagagtatgaatggagaggctgttggagtaaataagagtttgactgactaaataagatggagagttgaccaaatagacatttggagagttagggggtgtttgggaaagaggggctaaacacccccttagatttagagagacggttggagatgctcttagttgtttgagagtagaagttgagcagagcaatgctgaccaagccgttgtatgtgtgtggccatttgtcgtcctgaacgggttgagcacgttgagtaagcattggttacagtgtcatttggcagttgacacgacttaaatgcgttatcgcgcgctttgttggatgagcattgcaagccaccatcgtagactcatcaacattgtaaaccctttaagaaattttacgaggtagcacatatatattttttatataaaatttagttcctcaaatactaggatacgagaaggatgtcattgtttttttaaaaaaaaatgttacctcctaaaatatttcttcaagagaaaatcactcaaatccttttaacattttacacagcgggatcaggtgggtagattccaccgtgaggacacgagccaattaacataaatttggttttgctagtgattttttgacgatgtttcggaatagacgatgtacagctcatgccgtcgacgtcatgcgtaccatgaacatatatgcggccttagttaaaatgacgaaggagtcttccccgcaaaaaaaaatgatgaaggagtcgaagaatcaatgaatcatgaaaagctgaaaatatgctcggtcgattaattacattttttgcactaatattttgttgactcttgtgattcccccttttcaacttaattatactctttcgtatcctacgtgcagtttcccgagctactaaacagtactcgctccattccaaattgatctatatatttcatgggtacaccaagaccaaaaaaagttaataactctctcatactatatttactctatcaacaaactcaatgcatgcactatccccactatttcctagccaatagcaaatcaagatattgtatgtgggttataaatgcttgtgtgcatggatgcatgcatcaatatccatttactccaatgcacaaataacgaatagacctaatgaatgaacacaaatatgtagatcatttagaaataaactaaaaaaactatatgtagatcaatttggaatggagggaatatgttttttattaaaaaaatttctatggaaaagttgtttgaaaaatcatattaatttatttttaatttttttagctaatatttaatcaatcatgatataacgagtcattctgtttttcgtgtggaaagtataagttcccaacacatgtacaatagaacacagccctaagcctaaccctgaaggtactgtcctccttaagcgtatatgacttaagagcaagtttaatagtggagtagctaattattggctattagcacatattaaagctaacatgtataatatgttaacacatattaaagataggatttattttttttctatcttatctatttctcttactatgaatttaatgtaaatatctaggagcatgtgtatagctagctcttgcataaaagccaacactcctcacttttatttatctctcttttccatataagcttatagttagcttataactcagtattatccttactctaagttttactatagaaaatgactacatgaaatttaaccaaaaaaaacaattacttgcatgaggagtatggagagttaccacgttttatagtgttaatccataggagtagtacatttttggttatatatagtacattttgtatctcgttgaggaccataaaaacactcttaataatttaaacatatgtaacaacattttagtatgtacaaacactgcttgcatagatcgttttcgatcagtattttggattgtagttcttgctttgtacaacatgttcagcatccaaccctagaccataagcagatttttgagtttccacccatagtacgaaatgtactcaagagatgtttttctatgcaaagaaaagatgcttcaggctttccaggaaacagtatatgcacatacattattcaaacaggtttacaaataaactcaaactatatgagatatctgcttaattacattaagatatatcatatatctgttcctgttttgaaagaaaatgtttcagacttaccatcttagagtaagtggactgtctaaaaatcattcgacacattttgcttagaaaatctgtcagattttcaagtcacccaaatagctacgtacggctgagatgagaacgggcgttaatcacgtgaagccataagttgatggaacaaatatagtagtattcaaacaaatttacaaagaaacttaaattataagtatctgctattgttacatcaacagatacagaaccatgaccttctttaactcacttcagagctagaggcatgcatgcttctaaagaaatgatagacttttatctagacttgaccatgcaattatgcattcttacaacacccaatcaaatcacaacaaaattacaaaacgctaaaaaaaaaagtaagaaccatacttgaacagagaccagaaccatggcgctctcgttctcttagcgacaatctcatctttttttttccagaccgtccacagtaatgcttcagtgcgaaaagtaggtgacgaacagcgccgcgaacatgagcaggtaggcgatcgcctgatcaatggccttggcgtcgatcaccctcgccggagccgccgccggcgccggcgccgtctgcgtcgccgtggacagctgcatgaggccggagaggaagaaggcggtgaacagcagcaggtacaccttcagggtggccatcttataacctgtaattactgcaaaatcgatctaactgaaagcctgatgaaactgtcttaattcagttcttgagatcttggaagtagagatgagtctggactctggatgatgagtttgctaacactttgtgaattgtgaatgtgtgttggttgtggcaatgcagacggattggtatgtgtatatatagctgcagaagaagcagctagagtcagctaccactctgatcaacctgccagtgtgctttgtttgatcatgacttgagagattcaggaattctggtgaatcggtcaatctgcttgtctgcctgtctggatcgtcaggattgacttggagtttgagacctctctgtcacacgagatacgttacatgtgtgtgacatttaattttcagttcttgacgtgtcattgctgcgttagctgggccggctacgatcttagcaggacgagtgagtactgagtggatgattaatttttggggattcagtttcaacttcgatgggctggaaaaaacggaaacaccacttttgccgtttctgtcaccactaacgactaatctgcatggttttctctgtctctgcggctcagaattagagttggtgtcgtgtgatttcaagtgaaatgagaagtcaaaaaatattctgggttggacgatgtgcatgggaagtcgtgattggtgaccggcaattgcacggttttggaggaataacgcatgaaaggacggcgttagaaaacggcacaacaacgttgaccttgggcctaaacagtagtagtgcggttgatttgggaaaacgaatcggtttggccggctgcatggcaaagtgcatgtgagtgtggatgaaaaaaattcactgcaaagtgcaaaagccttgagaagtaggtatatatcgttaaaaaaaaagcatctctgatttaacccatttttgtggggttgcacattgcactgtgttattcatttcagattgaataaataagaaaaaaagggcttaagtgaatttctttggtggtggacaacatgcacaattgaattactgcacgtgaagctcgataagaaatatttaaagtttaccacaaaatttaattaaaattttgaaactttgaccgtcaataacttcttaattgtgtatttaaaaatatataaattgtgttgatggtatacaaacttgttaggtggtgtaatttactacataaatttatgaaataatcattatggtgcacggacttatctagtgcttctgaactaaatctaaaacgatttattgtgactaattatgtttcttcacctgagagggataaggatgtagtgagagattggattttgttgctgtaattgtgcttgtaacttatttatttttaataaaatctatttaacagtaggggcctcccctgctatgttcttgtttaaaaaaagttcgagtttgattaggatgtcacacgcataattgaggacatgagacatatcttaagtgtaaataacctttatatatatactttatatttattttgtttttattcattatttgtatccattgcattttccttttatatgtttttttctctgtttatatacctttttctctgtacactcaacacaacttattcaatgcttgatttggtatatgtttctttaaaacaagtaggagctctgctattttaattgatagaagggaaaaaagcacatagcattactaatctcataagaaaaatggaaggcaacaaccaaaaacacgaacctgcgtttattttactgaactacgtacaaagccagagccattttactaactgatcatatacataatatcctactcagcgtgcaatttagtgaaattagttataacatatttttttctttctttagtttgcatacactacacaagtttttcaccgaaacgagcaatttacaagttcacgtattaccttcgatttatattataagtcgctttgaattttttttatagttaaattttgttaggtttgactgaagttatagaaaaatatagtgacattttcaactaaaacaaacatactagaaaagtatatccaatgttacatttaatgaaacttattggtgtcatagatgttactaattttgtataaacttagtcaaacataacaaaatttgattagaaaaaagttaaaagggcttataatataaaacggagaaattactaaattgcacactagtctaataaagtttgtgtaccgacagtacaatttattcttaaaggattcttatgcgttgatttaccttgaaaagcttatttgaaaattgatttacttattttaatataaaattgattatgataagcttattaaggtttattaaggctctgtttgctggccatggttgggaaccttaccctcccgcacggaaaacgaagcagtccattagcatatgattaattaagtattagctaaatttttttttcaaaaatggatcaatatatttttttaaacaactttcgtataaaaactttttacaaaaattgcaccgtttaaccgtttgaatagcgtgcgcacggaaaacgaggtaaagtggttgggaaccctcatgaaagaactcagccttaactttatcatcgtactgttttatgactcgaagcccaagggagtatttgtgaagtcatctgctatgatgggctttctggccatgtgaaaataaaggaataagttcactttgtgaccctcaaaagtgattaaaatctaatccgtgaccctaaaccacaaaaccggatatcttgacccccaaacttctaaaaccggtgcaatttgactccctcggtggttttggagggcggtttcactgacgtggcgccacgtggcgcctacgtggtgatattgaccgagtcttcattccacgtggcgttgacgtggcagcgaaattaaaaaatatgcgtgggacccattagtcattcaaaaaaagaaatgtgggcccactgacatgtggccttccttcttcctcccccctctctcccttctctctctttctctccccttcttccccttctgtcgacacgcgggatggcaacaagagcgagcagcggcgggcggcgaggccggagctgcggcggtgggcgggagggcggcgagatcgagcggcggcgcgctgcgacggcgagggagctgcgctcggcgggagagcaagcggcgaaggaaaaggacccccaccctagacaccgcccagcctggagctgcgctcggcggcgagagcgagcggcggcgacaagtgtaagcacacgttcggtttgttttttttcttgtttctttgattcgtagccgaagttcataactgaattttccttgtttcaggacgacgtttaagaggatcctgaaggccaaatcgaccgagcgattcgatgggctcccttacctgttctcgctgctgaactgcctcatctgcctgtggtatggacttccctgggtcgccaatggcaggctgctcgtcaccaccgtcaacggcaccggagcggtgttccagctcgcctacatttgtctcttcatcttctacgcggacagcaagaagacgagcgtaattcttcccatcctgcacctaattttgtcttagaaaaatgtacttgtagactgcagtactagattgctactgtagtagcctagtgctgtacattttcagttttgtctgatggcaatatgccatcaagaaaggaaaaggatggtggagctctgcgcgctgccgccgccgctctcaccgccgagcgcagctccaggctgggcggtgtctagggtgggggtccttttccttcgccgctcgctctcgccaccgagcgcagctccctcgccgtcgccgcgcgccgccgctcgatctcgccgccctcccgccgcagctccggcctcgctgcccgtcgctgctcgctcttgccgccatcccgcgcgtcgggcgaaggggaagaaggggggaggaagaaggaaggactgacatgtgggccccacatgtcggtgggcccacatttctttttgtgtgaatgactaatgggtcccacgcatatttattaattccgctgccacatcaatgccacgtggaatgaagactcggtcaatatcaccacgtaggcgccacgtggcgccacgtcagcgaaaccgccctccaaaaccgccgagggagtcaaattgcaccggttttagaagtttgagggtcgagatatccggttttgtggtttagggtcacgtattagattttgatcacttttgagggttatcaagtgaacttattccgaaaataaatggaataagttcgctttttgtcccttatcctgatatcgagtttaaatctagtctctgaatattatcggatataacacatccctcatctttcaaaacagatacaaatatagtcctatgataatattgaatgtggttttaggtgatgtggcactgacgtgacacaagaaacaaaattaaaaaataaaaaaccatgcaggatccacatgtaagtaaaacaacaatcttctttcctatcaccctctcattcaatcaggtgaaggtggtagagcaaggagcaaccttggccccgacaatggctgcgacctcaatgtcatcggcgactcattccggcggtacggttcgcggagggcaatgttcgctagctacgaggcgaaggggaacgtggtcaccgactcactgtcaacctcacctcctaccaaagtttaacgatgtaggacgaaaccacctccaaaaccatctgagaagtcgatttgcaatggttctagaagttagggaacgggttatacccggttttgcacttgagggatgcaatccaacagggacatgacttgtggaggcaaaatagacttattcctaaaatattctcactggcttagtttggagtgttaaacttttctcgcaggccaaattattaaacattttacgtggccaagttttcacgggccacacatggcctattaatgtatactggcagtctaaacttcagcctttaaaattttcgcatggcctatttacgataagaattttcacacctccatcctcatattccaaacctctcttgcaggaaaatttttccaaagacaggaatcctcaaatattcccaatgaggccttgattgcagttgcatatatcatgccttaatttgcaaaccatggtttttagctttttggtctcaacttcataaaaagcagcccttaatgctcccagatcaactccttttccatttaaacccaccataaatcccctgccggtaactcccattaccgcaatataataaataaaacaagaacaccaccattcactcatctccttcagtttccacattcttgacaccctctggctcacaatcccattcagccatgcaagaagataacatcagtaagaaagccaagctgcgaaaatccatacagctcttcctctcaagaaacctcaagaagatcccaccgattcacatccccagctcagccatccctgcgaagatcaccagcaaccgcctcctctccacctgcaggttccccagaaccccatcgctgcacggcggcggcggtggcggcggcgaccaccgcaccaccgacgacgacgacggcagcaacggcagagaccaggcggcgacgctctccgacgtcgaccgcttcctcttcgacaacttccggtccctctacatccacgacggcgacaaccatcagcagcggcgacaaccaccaccatctccggggaaattcacacagccagcagcggcagagacatcatcatcaaggtcagagtcggttgcagaagacgcaagaggaacaagctcgggtgatgaagacgacaacaacagtagtacggccataatgctgttctccgtggatccttacacggacttccggagatccatgcagaacataatagagatgcaccatggtgaggaacctcagccgttggactgggacttcttggaggagctgctcttttattacctgcagctcaatgaacaaagtgtgcacaagtacattctgaaggcgttcgccgaccttactgctggagcccatgtcagctgcccagcccgtgggaaaccgcaatgggctgataagagtgtccggagtaggaaacactattagggcacaagattgtaatgtatttgcttaaattttttcactcgaaagtactgagaataataatgcacaaaatacaaatccatatcgtgcgaagccatgtaaactcatgatgtaaggtacactgcacataaaattagttttacaactcccaacatttttaaatatgtgatgtcataactttttaacatccgtatgaaacaaaaatataaaaaatataagtcatgttcaaagtacctttaatgataaataaatcacaacaaaatattgataattatttttttaataaaatgaatggttaataatatgtgtagaagccaatagcgtcagattttttaaaaagagggtgcggaatgctggttaaacagtcagaaactcagaataacctgaaacacatcatctcaacagaaaccataaggtaggttgggaatgattattgaatcaatttctgccataacgaagtattccaaatgtgtattaagctcaggtttcccataaaaaatatcaaaagataattacattcaagttattgatttagtaatttacacggacctatatatagagacgcgtgggcaattcccgtcaatccactctagtttagctaataatgcagtttcactcgcgatgaagaaaatacatgttttagttaacctagtagggtacacatactccactatctgcaacgcactggctggcatgatacctagtggaatcggataatgtatattagttaacaaaactgccagggcattagtcacttagaaaactatgacatcagttaactctaaaggctttacatttcttcttcaatgccccccctgtcccagatgatgggaacaaattcaacagaactatttgaattgaccattaaagcctcgagggcacaattatgatatgagaagcacgggttgcattttaccacagaagtttccagaaattgatctgcaaatgcaaacggtggtcagaaactcaaataatcctaccatcctaatgaagctgatcaataatgaaaggggccattcagtacatatgggagataaaaggaaatctagtcaatttatcttacaaacatttgtagggcatcaatgcaacggaagctcatcctattccaggcttaataagtgtgtaaagatattctatcctactctttcttgctccacatgttaaaagaaaagatatagtttgcatggcccagataaggaacatatgaaccaaataaatacaaattcttgatatctgctgtattacagagtcaacaaaataccactggataagtagccgatattaaacagtcaataaataataccattgaataaatagtacaaagcttgaaaatcagcccaaataaaacctgaaatttattcaggttggccctgaaccatgaatcaagggtgcagaatcattctgaatgttggcctaatgacatctaagcatacacagtgtaacaaaatactgcctccggttcatattataactcgttttgactttttttttctagtcaaacttctttaagtttaccaagtttatagaaaaatatagtagtattttcaacataaaacaaacatactatcagaatatattaaatattagttttaatgaaacaaatttggtattgtagatgttgctaaatttttctataaacatggtcaagcttaaaaattttttactagtaaaaaagttaaagcgacttataatatgaaacggagggagtatgtataaaagaccagtaattatggacaaccccaaaaacattcgaggtgtttttgcatttggaaggtcaaagaatcttttgctgaagcttaatgttctcacaatatccacttctccttggaagtcaaaaacaatatcacattcaaaaacacaatgatgtgcacatcacagtgttttcaagtcatccgattagtcgcgactaatcacgattagccgtccttatctctaccctgacctcaatcaggaacttcaaagcaattagttcaaccagaaaacttatcgtccgactaatcacgactagtcacgattagtcgatcaaattagtcgtggacgactagtctgttagtgctaaaaatgtgttggactttacacttcagtggcaggccttttgcccagcccaagaaggcatgtacccctcatctaaccctaaccagccatctagatctagtcacgagagacgggagaaaagatgaaggacttattgcaactaggataggtaaatgatttaactttaagaccttaagtcaagtgtgaactgtaaactctgaaaatctgattatccttaatatttataagcatctatacattatcctgggtacccctagcctatagtcaccgactaatctacgactagtcacgactaattgcgattagtcgactagtcggagcccttacgactagtcccgactagacaacttggaatcactggcacctcaataatgatataagaacattccgttgacaaattatgaaataattccatatagatgataattagtagtgacatcatcatgtaataaaaatatactccatgtatagaaactttaaacagtgaggaattattaggcatagtatagcttaatgttcatgtaattagaatgagagtgttacctttaaatagtgcagcaaatcatgtatttggcacagtatagctttgaacaagctgctcatataatgaaagatgattcttaggaacaaaaaccctaaacctgtacgcacaaaaccataaatcaggcatagtaaaggtgtgagtttactttcagctagtagagaaacagatgtaggtttacccttcaagaagtgggagtcgctctggagacgaaaacagttttgcacaagattngtnggtccaccattgtcataccg

SEQ ID NO: 4827 - DNA, 20140 bp, Oryza sativa
cgcccggccagagggcggcaaggggccgcctgcaaaatggccggccccgattggcttttttgcattcgggccccttgctgccccaccagaggacggcaagggttttcctgcaaaaaaaaccctccctccgtcatcgcccgttcctcccccgtttgccacgtcagcttgccgccccagaggtgggcgacagggtctatttttgtaatttttttggccgatagattatttctgtaaatattttaaaaaaaaatctaaaaccgaaaaaaattcgtgccatgtctgggccaccattttgggccgtgcaaggagcaccagaggctggctggattgggggcaacgctacgaccgtcaggcaagggctatattatcttcgttgccttgcacaggctcttggtagtaacctacacccagaggcttattttagacatgactgtcacgtcgattggcgtataggttcccaaatgtgctagggtttagcgcattctcttggtagtttcagccttttttaaccagaatacctgacaaaaatatcaacaagcaattttgcaagcattaggtggtttcttccataatctcagggaactttccatcccagggaactggggaggctcagagaaggcccccatcggttggctttttttctaataagccaaaacggcttattaagaaataaaaataaatttataggtaaaatttatatatatatatatatatatatatatatatatatatatatatgttctttgtaatttaaaagccaatgctgaaaaagaaactacgttgaaaatatctcaaaatcaatctcaaaattaagtttaaaaatttaaaatttagcttattctttggtttattggaccatccgatgggagcctagctgtgctcagctctatggtatgcttcgtccgcaattctcaagttcagtttctcagcattctgtgcaaagttcattttcagtgggtgcaatggaagacccattctctaaaagagctgcactgaagtacactgaagaaattaaagactaggtaagctacctagcttgtgatcatccgttgatcacttgctgaaattaagctgctactctttgatcatcatcagacatcagctgtgggtagcttaattaagatcgacgataatggcgagcttgaagcttagggcgtgcgtgcttctgtccaccgtgttcttcttctccgggctcatgcagctgtccatggcgcaagctggctcgccggcggcggcgacggcgacggcgacgacggcgcgggtgatcgacgtgaaggcggtggatcaggcggtcgcctacctgctcatgctcgcggcgctgttcgtcacctacctagcgcactaactaactaattactccgtattatttattttaagttcgctagaaaggggcatgccaaatcgtgtccttgttgatttgagcactgtaaacatgctgtataattgcataattatttcactgtaagcatgcataattgcacatggcttatataattatatggagataagttttcaagttgttcctatttgaattagaaaaatgtttcatgtatgtttgacagttcgagttgtcaaaacttgtaaagagagagatacgattctatgcacggagacagctcccgggtaggtatgttggacagtcatctaggatccatcgctgctgtctcgtactacggacagccttcgacatgctatagtcatccgggcttgatggtggttggctccgctatattgtgttcctgttattttctaagaaattgttcttctatttgaatttgaatgtttgtacgctcacaagatgtttgaagtgccttttcccttggagaaaatttttttatgtttaaaaatacaagtatatataacttgccaggcatattaaatcttcgtttggaagtgcattcccttaacttttctacggcatgtaaaaagagacaaacgattaacgcatgattaatcgaatatttattattataaacataaaaaatgagtctatttgacttttaaagaaacttctatataaaacgtttttttaaaaaaatgccatttagccgtttgggagatatgctaatggaaaaggaagttgcatgtcggaaacgatgaaatgaatggggcctaaaccatatatatactccctccatttgtttttgtttgataggatggggtagtattatattaatgatcttagggttgaatgttgcaacatgcatatatatagtgtatatgtcttttgggttgcaattcatcacttgcatcaattgcaattcttctcgttcaaattaagatgcctgtggttttgtcggaaacttggaagaattgattctggggtcaaggattgcatgaagaccatacattccgatttccgagtcagccgtcaaggtactaaaaattgacgttaatttaacggaccaactattctgacctcacctggtttatcagctctaataaaaaagaggacagaaatgcaacccaacttacctaaccgtcaaggtacctttcttgcttgtatatcatatatatcagagaaaaatctaccccaccatctgtcttaaacactagcctaaagcccgtgcgtcgcaacagaaaacaaattaaggtttttgcttattaaattaattaataatcacttatttagtctaagtaatattatgatttttcttattgaacaagtgattttgaaatttaggaatctaatggtgaaataggggaggacttgttgaaaggtggtgtaataatatagattatagggcccagttttaatattgtggaaataaacaccatcgctagtcgcaatagtataaatatgaatcttagagggcatatagttaaacctcaaggtgcaaaggccgaaaaatattccatcatcttaaaaataaaaggttaaacctcaaaatctaaaaccactaatacagtttaaccttaaaaacggattcagaatgcagagccaaaatacagagattcacgtatcccttaattaagaaatggttgcttttttggacttataatcatacatgtgacctaatcaaagaattaatcttatggtaagactattgtacctacttctaattttagcgacccaaaagtcaaaacttgaaatattaggaaaaaaaatcccttaaataaatctaaaattaaatactaaaactcaagtttgctatggcatataagcagcaaaatccttaacgccaatgcaaatgctgtcgaatattaccaggcatactcaaattaattcgatgacttttttttactttacttaactaggtaataaaataaatactgttggtcaaatttttaagaaaatgttaactactactccacccgtcccataatataagaaattttaggtttttgcttgtactgtttgatcactcgtcttattcaaaaaaatttggaattatttttttttttgacttactttattatccaaagtattttaagcacaacttttcgttttttatatttgcacaaattttttgaataagatgagtggtcaaacaatgtaaacaaaaactcaaaattctttatattatgggatagagggagtacaacgtatacttacaaacggaggtaatattttacaatgtcggtaatcacattattgggcgtgcctgccctgcgttgcagtacggaaatataggacagaacagcacgacaatggcccggtcagaattgttctgctgctctcttattaacgctgttccttctgaaaattctgcaataaatttctgtctcattgtatgatagagtctgtatccaactatcaaatacaaaaacaaaaaaacatccgagtatctgcctcgtgcgagaattaattaaaccagacgtggctatcattaattaattgtagtcattagagcacagttagtggccggcttgcaagtagtacgtacgtagtggagtagctccaaattagttgatgaaataccttctagctagtcaatctcgccgagccagactctcacagactgaccggttcaatatatcatctcctcattcagtttctctcctcgagtcctgatcaaaccaagcacactactgacaattcatcgatcgatcactgcgtgctactccgaaagtccgaattgcatgtagaaatatatatatatatatatatccatattccttcccctcgcactgtgggagatcgagtcagacacgtactactgcactagagcaaaatccattcgtcttgaaactattattattattattattattattattcacttaatcagaagatggcatgctgttcttcttcggtccaggctcgtcgatggctatgggccaaataggagatcgcatagggcctcctttatgtggcccatataaacatgaaggcccacttccaattgctcaaccatagcatgcaacaaccaatagctcaataggcagatcgattaacaaggccaagccagggggtggggcactactaggctgtgcgatcgtctaattttttttggccctagtgctggctgctgtgcaatcctaattccacgccacactaactgccgagatgtcgatcccaattccacgtgtggcgaccggcgacacagcttgttgcttgcgactctgaggctgcagctacctcgcctcggttagctcttggctcctgctttccccctcctcgtccgctcgtcatcctcgacttgaccctcgacagttcatcctcagactggtaagattagacttcataatatgcatcaaattaccactagtttatgatagattaaatcaaattatcatgttatgggtatagcccatcaacatcgtgtccaaccctaaaactgtttatattttgaggcaatattattttctcttgctaatcgagtgtgtgcataacttagaaatgaatatggtatgttttgatttacagaaatgaatgccaaaccaataagatgatttctgtgcaacaaaagttattgtacaaaattcctactttggtttttcttcttcttctttcggaaaaaaaaaacatggctcggcaaaacaggacatggaattttcatctgactaatggaaaccaaaagttcggtagcatatcacgatgccctgaaatgcgtggcaaatattttaagaagtttcctgttgtttctatgagtgcttatatatctgcctatatcatccgttttcaacttgagaccgtcatgcattcgtcctaatggtattgctcagtattcattcttgcatctggctctggccatttatcagagaacacaattaaaacaactccagtcatactgttaatgctatgttcggttaatccccaagagagagggattggaggggatttattccacacctattgtggtgtggaattattccccctcaaatccctccaaaccccttcaaccccttccataccgaacaaggcggtcaggggctcagggcacagtaccccgttcgaataatccaacctgctttgaactttgaggcacattttgtacgatttcaaacgatggcacatgagttctatacatccatttctcaacaagttcaaccaaacaaggatcagatcatgatcatcagaaccccttttaatctgcaccatatctcaccccacaaccaaactacatacaaccacaccaagcagcagcagaattaaggagaaaaacatccgaaaacactacacaggctgcagcattcatggtacatggtacactctagctatagctgctgcttgatttgatttatcagtaccagggcgagtccgggacggcggtgatgacggtcttgacctgcaggtacttgtccatggcgaccatcccttggtcccggccgaacccgctcatcttgtacccgccgaacggcgcgtcggggtcgaaggcgaagtagcagttcacccacaccgtgccggcccgcactgacctcgacaccatgttggcaatgttgaggttcttggtcacaatgccggcagccagcccgtacttggtgcagttggccttctctatcgcctcctccaccgtcctgaagaaaaaaaaaagttcagatcataagtcaagttttcagaatgtttttttttgtttgttttggagatgagatcagatcatcgaaacttgtgaggtttttgagtactgacttgaacttcatgagggacatcaccgggccgaagatctcctcttgcgcaatcgtcatttcctcctgcatggaggatcaacccagatgagcattgttgatttgatttgattgtgcttctaaatgtaagctggttaccttgacatccacaaatatggtaggctcaatgtagtatcctttgtcaccagtgggtttgccacctgtgagtagggttgctccctcgttcttgccgatctcaatgtacttgagaaccctctcaaattggaccttgtcaacctagcaaatgaaaacataatgttcataagttctgatacaattgtccattttgtcatctcaatgttttttcttccattgctcgcatttcgacagaaaatgtttcagaacaaaaatatgaaaatagtaggataatattacctgaggacccatattggtggcagcatcaaaagggtctccaactttccagttcttggcagcctccacggccttcttcacaaactcatcgtagatcccttcttggacatagacgcgtgacccggccacgcaaatctctccctgaaaatttcagacgccagtagcacggtcagtttttttttgctctgaagttcagagtctgaactgaacactcctaacctgaacatttctgaaccttggtccggtgcatagtgcatttagttaccttgttgaagaaaactgcaagggatgacagactgacagccatgtcgacatcggcgtcgtcgaagactatcatcggagacttgccgccgagctcaagagacacattcttcaggttgctccgcgccgccgactccatgatggcacggccgatttcagcagagccagtgaaagcaacctgacatatgcacaacaacatttcggtcagaaactcattcagacaaaaacctgaaacgctacagtaccagatggtgatcggagtgctcacactgtcgacgtccatgtgggaggagagtgccgcaccggctgtcggcccgaatcccgggacgacgttgatcactccatccggaactccagcctgaatgatgatatcaaaggtacactgaattatcatccaaattctagaaaatcaactcaagaacaagaagaaaagcaggcatgaaaacaaaagggtggatttggtttgaacattggttaccagcttggcgaggtgagcgtagtacagagcggagaggggcgtctgctcggcgggcttgacgacgatggtgcagccggcggcgagggcggggctgaccttgaggaagaacatcatggtggggaagttccaggggatgatgacgccgacgacgccgatgggctccctgagggtgtacccctggtacttgccggccacccgaagggactcgccgtggatcttgtcggccgcgccggcgtagtaccgcatcatctgcgccgcggcgggcatgtcgatgatcttgcccagcgtcagcagcttcccggcgtcggcgccgtccagcgccgccagctcgtcggcgtgctgctccaccaggtcggccagcttgttcatcaccctgctcctctcctgcgtgacggcaacattgtttgtggattttgtcggacaagctacagtaccatacagtaaattggacgaacttgtaaaatttggctctgaagaagatcatatgggagtggaaacacgtacatagcctgacatgcggggccacttgccgtgctcgaaggcctctctcgcggccttgacggcgaggtccacatcagccttgtctgcctctgcgatgtgggccaggacatcgcctgttcgtgggtcccttgtcttgaatgtcttgcctgtaaaaatcaaatccacatagaaacaattacatttgtccgttttcgttcttgaaacaagatttaaggagatagagattaacattttgagtttttccatggtcctttgggtgatgtcttttagtttatctctttgcaccatcatttttttccttagtagtaatatagggccagacctttgagattagctgagtgggtggattaagaataaagcacaggctaggcccatataattaggggttggctcgataggtggatcgagaataaaatgctggaccctaggtggaatgatggacagagaacagaaggaggacgactgcacttttaaagtggtagagataactattttcagttgaaaaagtatgacttgatttatcacgagagtgaagtatccacttcacacaaacataagaggaaaagaaaagaccgtggcaaatatttttagaaaagttgaaaaagtcaaacactttaatagagtgaacattatttccattcttgtaaaccctaattttgatattaccttcgtcccgaagtaattgtaattctaaattatcttatcatatactctctctgcttcatattataaatcgtttgacacttttcttagtcaaagttgtttaggtttgaccaagtttatagaaaatattagcaacatctacaatgccaaattagtttcattaaatctaacattgaatatattttgataatatgtttgttttgcattgaaaatgttactatatttttatataaactcggtcaaactcaaagaaatttaactaaaaaagtgaaatgacttatatatgatacagagaagaaaaactatgatgtctctcattcaatggtgcatatgtaaaagtgggagggtgcttgagagtaaaatatggaggaatttgaatgggaagtgattgatgagataatttgtactttattacgaaaaccatttgagataatttgaattctagaaatataattattatgggacagaagtggtacaagagtacaagacactgatcaaaattttcaactttgatcggttgcaatggccaatccaaatagaggaagaacaatttgagatttttcaaagttttgtaccgacaggaccttcttggtccatcttttttttttttttgaaagcaaggtccattttgttagtggcacaatgagggaatgccgaggattatgaacagaatcccacgagaatggaagatatttatgactagtcaaagctgttccctctcaccatgacgtcatgtctacgtggagccacactcacattgattccctttttccatttttagggtggatatttttctgagggcataataaatgctggataatttgttttctcttgtaaataaataaagctattccccctacaaagaaaccaaaatttttttaactgccttaatttgcaatcgcagtgcacgccacgtttggccacttgacgtacgattcatggtgcttcatgtagtagctagctaataccctctccgatttggcacaattgacatttaaacataaccattcatcttattttaaaaaatcataaggttattatttattttatcattatatatatactttaagaataacttgtattttttttatgtttacacacaattttaaatctgacaaatagtcaaacaaatgtgtgtcctaaaaagttgttatatattaaaatcggagggaatagctagcttgtcatgtgtgctgtgctggccggctgctaatgctagcttagctaaggagataaacaaaaatatattctttattatttgtagatatctgtatagctgggagcgagacatatagaacgtacacaaccgttttgacttggcttcgatctggcctcctgtttctacggatgcaaccacgtctaagagtcaatatcatgtgctcatttcataatgccaaagtacatgactcatgcatgacgcaaaactttgtttcattcatgctttatatacttgtgatgaatgatgtaaaagaaaatatataataattaagagaaaataaataacaccgaattaaaaaaactataggaattacgctttaatttagttaattaactacttctgatgaatgatatatatgatgcaaaaagaataaagagagaaagaaataacatataaaacactataggttatattattgcaataaattaaccaccagcagacatggctacttacgtatatggtaactgatataaatgatataaatgtgtggtgtaccgttagtacaagggttcatggacatggatggtcgtttaatgttttgatggaggcagcaagaattccttttttttgtttaacgaatcatgagccaccaattttattaaatagaacaggagaaatttgtgaaaatatagtacagctagctagatccagagcagttagattctttgcccccgtaaggtttaagttttaacctcctctttaattttcagtattagatcggtcgtcgagagttttccatgttggaacatactctttctttcattttcaggagaccgcgagaattgaagagaaagctagctagctagcggctattttcaaaacaaaaaaaacaaaacaaaaaccgcctcagctctatagcaacacgcagtacatcatattcatacgtacctacatatttgtacattatattcatacacgtacgtacctacatatttctctaatttttatgcaagaaatcgagcatgagttaactccaataaattagttcgtcaacagagtaccatcatatcgtttgcattccatgctcgatgttaagccgttagttttccttgggagagattttgatcagttggctgacgacgacaacgacagtgcgtatacggtaaaatactaatatacgtgacaaaattgttcataactatatatatatatatatatatatatatatatatatatatatatatatattgcaggattgttcataactattaatttgtagaggccggttaaatttatcatattttccaaagaaaatgtaaaaaaaaaatggtacggaattgtcgagagcttaaatagtttcctataaatattagagacagttctgaattaagttgtattggtatcatattttttatataaactttggtacttcctaaatatcctaagtactggtacctcgggtatggtaaattaaatttctcgtatcagatagctggaaagagaatgggtagaaacacacataaggatgaaaaattataatcaaagacgatgaaacgtgtagcagtacgcctatcttgtaaagaaaccatgggaattaattaattaattaattaattaagttaatcaatgacgatgaggcatatatctatgtattacccgaggcggcgtcgacgaactcgccgttgatgaagagcttggtgaacttgatctccggcaccaccaacccgccgccgccggcggccgcctttccattgccgcagtcgccggtgctccccatggacgacgaataggctcttgatctctagttaattatttgtctctaagcttcgagagatgcctatcctctacttggtcgtcgtcttgatcttcttctatctatcttatagctagctggctggatggcttcctctcaacaaggagaacagtagatctcttggacacagcagggacgactggcttgatctttatatagacgatgacgacccatcgtcccaatgcatccatcgatcgtgccaggctatattggctgtacctaggaaaagcacctcattggttggacttggcccaattcttctgttcaatttttttctccatccattatatttttatatatgtgtgtgtgttttttttactttaacaagatctttgagatgctatcaataatatttataaaaataagttgtttaaatgaaaagagttgcatagtatgttaatttgtttaatgctaagtcgagtaatattatccatatacatggttgttttttttttgctattgatagcaaaagttaaaaatatttgatttagctttatttttaaaaatgcttatattttaagatagagtgagcatttgatgtctctcatggctgttactatcaaacattaatcaatcattgtacttaacatctatcagtttcagttttgtgttataagtaaaatttttgtaacttaaatcaaatttacataaaatatgcaaacgtttacaatatcaagtttaactgaaatctactgtgaaacatgtcttgcatagtgtattcatttgggaatgtagatgttacttacttttttttccctatattttgattgaagttaaagaacttttaattcagaaaaaaactaaataaatgttacaatatggggaactttttttagaacttacaatatgtaactgaggggggtattttctaacactagcttccatgtgcagattagttaactatatggtcaacagcttcaccttaattcctgtgccaccggctgctgctattatgtagtagtagtatgtgatggttttcgttcgcacgtccagttgcatgtactttacaagataggcgtaccgcaacatgtacactatagactacttatcctcggtcgacgtgtcttctcctgcttcatatgtttccgccggttgatgcttttatatggactttcttctagagacaccatatttctgttatatcatgcatgagtgttgtctaagtttctatatttaattagtaaactaactggattttgctaagaaaattgcatggaccaaggtctaaatttagttggaagtaatactgtattaatttgatatatacctttgtttctatttctgtaaatatatacagctgtattttgcgagtaattttatcacctttgaaaagataggggatatcatattttttttatataaaacatgatattcctaggtacttaatatctataggtaccaaaatttttaattttagtgtaaaatttgttacctacatgtactttctataggtactttcttaagtaccttaaaatttattttgtttatatgtagagtggtcaacctaaaatgaacggtattaaatttttgtcctttaatttgttcttgttaacgtattaatttggtggattttaggagtagtgtacttttggtcttttttttaacaaatactataaacttacaaatggttagaatatgtcgaatatactagtcctactagaagttggatttgaagttagaataggtgtaggatacagagttagaatcggattcctgtcatatgttttctttaaatagaggggagcaccacaatgtaaccatgtcgactacaatgtgcgtagacacgtcatggactcataatggcttagttgccatgttgattggggagaagcatccataatcagagctctggagatatgggcttcggttgaacctcgttgacaaatatcgtgagttcttgtgtcttcatgtaatgtgtcttgggtgatcaatgactgaagtgattgagaatgttagtcgttgttccgctatatcaactaacttttataacaagtggtatcaaagccaaaggttttagcattttgatcaagaagacatgtgaaggaggaaacacgaggtgggatcatgcatcggaaggagatcatcaatcatggcaacgagatagatggtgacaacgaggatgttgtggaggcgaagcttgtgatcaaaccagggatggcagaacgtgattggaagatgaggctggacatggccgtaggtgttctgagatatcggaggggtagtgctacgaacgacatgcctgacgcacgcggcgatcgcagatccgcgacggcgaggaggctatagaagaagggcgaagctgacgaacgtgatgcggtgcggtggatgtgcagggcagaggacgatgaggtcgtggatggtggacacgagggctgcgactgcggtacgtgcagaggcacagactaatggcatagggtgttgtcctatgcatattgcttgcacaaagtgatcacccagcaagatgtgtggtagaggtgtgtcatgtgtgcagaccagaccgagctaggtcagagctagaaggttagattgcaagcaagcaatcataccgtgggtaataggacgttcggatcaggttgaaaaaaatacccgggcaacagtgggttgaattcgttgattcgtttggcagtacaagatatatctaagatatacgggtcggcatgataggatatatgaaaatatgtgtcattaaagaggaagagcaaaggttatcgtgataacttgttcaagtgattcaaggcaatattgaattttctcaaattatcatggatttggtctacggatgcagaaaacatagatgttggattttttagctcggttcataagataataagaaagaaatggtcatgacatcaattttatgcatatacaggcgcctgggtatttgatttggatttggaaaagcaagtgttctataaaatttatggtttttggttggcttctcttaatcaatcgtttaaattaatacctatgacatgcttgatagaagacattgtccttctgacaattctgatttagcatgtgtgctctgttcaacccatgcaagagaaaccactttacatattttctttcagcgtccttttagtgctgattgctgggctcggtttggtattgtctgggacatccctctcacctttgaagatatgctagctagctacatcaagcaaagacttcctataggtcttcacattttgttgagaaagttctttatgcagcgtggaacatttggaagcaaagaaactcactaatctttaagaatatacctccattagtttcttatgggaaagctttctttaagattgatctttcgcttttagtttttatattaaatgtttctgagagacaaactctttcacaatggataaacctcttgtaaatatttttttaatttttattaataatttttttactgtgggggtttcccctacagtatttctcctcaaaaaaacaaggaagaaatggttctcttcaatagtccaatgagtttgatttgtttatttagtgatgacaagagctatctagtcatggattagataaaatcaaatttaagacagaagataaaggtgaacatggcctttgaggagtctagtatgagccggttaaggaggagttcaatttgagttggcaagatgactaagatgataggtgggaaaatggaggactactgcaggcagagtccatatgaagaaattacagggataacaaaagtctcctaattgttatattgattggggcctactacaagctatggactcgtagcggcttagttgctatattgatttgggaggagcgcgagccccggagatgtacgctttggctgaatctcgttaacaaatatcgtgtgtttctgtgtctttatctggtatgtcttggatgatcaatgactgaagcgatcgagaaggttagtcgttgttttgctatatcgactattttttacataatagggttaatacaatgaattaataagttcattttacgatcttcaactggtgaagcgtggaaattaaatttggactttaacctcgcatgattcaatcctcggaaatttcaatccagataaaacaataaaaattgactgagatctcaaaattctgaaatgagtttcttgtaataactggtaaagtaaacttccagatgggaaattccatataattgacccacaaaacttaaaaatctttcactgacgtacacaacctttttccaactttgggaactttcacggaacacacacaaacttttcggttggccttatgagacctttttagttcttaagccatgaatgtcaagagattcaccttccagaaagcgcttataaagaagaaatgggaggggcattacaatttgagcccttggatcaaagttcatcagagcaaggtgttcttttcttctgaagatgaaaattaagttttttatgcaaaacgaggtggtattaacgtatggttggttaagttttaattattgcaaacttgaaaaatagattaatatgatattttagagcaacttttatataaaaagttttcgcacgaaacgcaccgtttagcagtttgaaaagcgtaccatgaaaatcttaatattaatctaactcttgttggagaaaagaatgggacaagcagtagacaagtttaatttgatacaagatgcaacctgttgaatgcaccatatatgcacagcaaggttcaagcatgcatgcgttgatctgttctgagaaacctcctcttgttttaattaattacgtggacaataccaactggaccactggtaataccactggtaatatgaactcaacacattcacaaacatattttaaagattatattagggaatttcacattttcaccttctaaatatcaattaaagaaatgataaatcatggccactaaatttttcttggtaagtacgtacacggaaatgctggttagagttctataaaaaaattgttacttaaggtaatactcttttcatttttataatatctgacgctgctaacctttttacatatgtttgatcaataaattttacacaaacacagcaagatataagtcatgcatgattaaaaaacctttaatgataagtcaagtcataataaaatataatataattatgttaattttttaaataagatgaataattaaacgtattttatcagtggtgttgtgtattaaaaaacgtagggattacatcatataataagttcaagttaatcaagggcatcatctggcattttcgcttatatatatatcttgtcacagagtaacatcccaagacaatgatcgactcaacaataagacggtcttcaattctttaattatattatctccatttgatcgtttgttgatcgaattatatcgcatgccctcctgctttggaatacaaatactctacacaattcgactaacgtgactgccaaaaccgtcaaatttaatttaaattagcgatccataatcgatccagacaacacttgcttgatggacaaccctacaattaactaatacattggacgagccgggacccaatcaattaataacttttgtctaactgagagctggttgcctttaagcaacgcgatttgtacatgtcacgctatatttgttatgaaatcatcatgagagctacgctctaggcctctagcttaagtttcgtctaaattatcgcgtaatcagaggttgacttggggcataattatagcccaaaggatgaaattagcttaccttggcacgtcattatctcagcatttgatagtactaatcattttagagttagaagcacttttctcctattacaaatagtacttcccctaattgttttggacaagcatctaatcaaaccttttaaagttagagtatcaatttattttaataaatatgtagattgagtatatgaaaatcatacaagatgcatgctctttgcctcaaaaaagtactttcattaaaattataatttaaatggattttataaacactttacaacaagaatcagtagttcagtagtcccagagtcatagaaatatattgttttgaatgtcttaaatcaattttttaaaaactttaaacatcaatgctttctaaatattgacaccatatgcatgaaaatcatatacgtagatttgtcttgaaaattattttcatagtattatgtgtttgtcatgttttgtaaataaacaaatttcactataggacatccaaagattatggtttttgctattggacactagtaaaacatgaatttggctgtacacaacataaaaatatggtaatttaattgctagaggacatcatgcacaaccattaaactgtaatatccactcaatatgtatgttgcccctttcgttcttcctcaccaccttgccacctgctaggtttttgagagtgagagagcatagagggggtagggatacagtctggttaaaaccaaacgtacttgcctcgttcacacggatgggagtggcattatagtcatcttaaaatatctctctgctcaaacatgttagaaatggtaaattaactgacacggtgttctccagcaagttatcatgtttttaaggtgtcctcaagccgaggctgtttggttgataggcataagttgccacactttaccatacttgaggttaggcaagtttgaccatgttaaatgagtgtttggttggctcccacaaatgtgacaagattcatcttttgtaatctaggtcccacatgtaagtgactctaaaagtgtggcatggtttcattttgttggttagagtgtggcttggattttgatggcatcacctttgacaagtttagctaagaaagtatggtaaatctaggcaatgttagtatatgaaccaaacagcccctacgttttgatagtaaagccataatctttgaatttcttctagaaaattttgccttataaatatttgcaatagaaattagtagtaatcttgttttacaagggtaagctagtagttaaagttgtgttttaaagatattgtcaaggtaacgaaatgtttccttgaccggagtaaatagttaaagttgccatgttatattatgtattgtcgaaataacatctagttgtgactgaagggactatattgatctgcactttcaatttgttagtccaacttccagcagacttttaattggaaaacaacagatctctggaccactgtatcgttgacaatcgatccaagggtggtcttctgttaatcagtcacgatcagaaaagtagccttttgggatgctatacatattccaagttttaaaggaaatttgtaatatcttactccaatttgcaagtgtcctcttgagtatcataatcctaggtcctagctagcttgtttctagcaaattgcatatgaccaatcaatttcttatttgtcaacgaggccgatgcacctttatcacctcaaaaaacagatttgtcaagatttcatattactgccgagtaatagaaaaagtcaacgcaaaaaaaagtcaatgtgtcggtgtcggttagcgtttgatagtatactgtcattaacctttttcttatgggtttacgtcagatcatcagacaaagaaaaacacaccgagaaactgaaatatactgtctttattccgacaaattgatatttgatacaagcaatcaactaaccacaaatataacccaacctttcagctgtatatatagaaatgttatttttttccactgtaattaatctttctgtgctgttcatcatcagatcatagccaaggggtgttgtagagaggggtgaccaccgccttggtgtggaggtacttctcaagggcgtccatgcccatgtccttgccgaagccgctcatcttgtaccccccgaacggcacgtcggggtcgaagccgaggtagcaattgatccagattgcccctgcccggatcgaccgcgaaaccgtgttcgcgacgtcgatgttcttggtgactatgccggcagccaggccgtaccgggtgctgttcgccttctggatcgcctcctcaaccgtcctgtgcaaaaatgttcaggatccagtggtttcaggctttcagttagatgttcatgtgatgttagtcaggctggaaatgttcagaaaaagatgcctacttgaatttcatgagggccatcaccggcccgaagatttcctcttgcgcgatcgacatttcttcctgcgcaaaaggggtctattagtttttcgcacgatttggaaatgtgcatttttgttctctttgaaaatgctgctggtcatattttagcactgaggagtgaagagcacactggtcatgttcatgccttgacgtccgtgaagatggtgggctcgatgtagtacccgttttcgccgcagggcttccctccggtgaccaacgtcgcgccttcgcgcttaccgatgtcgatgtacttgaggatcttctcgtattgctccttgtcaatcttcgttgtaattgcacacaagtggttattacagcttgctgaacatctttggttctctgaatctgaagtttgtatagttgaaaaatcagagcatggttactgatctagcatatatatatacctgagggccttgatgaactcgcgggttgaacggatctccgaccaccgatttcttggccatctcggtcgccttcttcacgaacgcatcgtagatcccctcctggacatagattcgcgagccggcgacgcagatctcaccctgcaacagaacaggattgttgtggaaagctgatgagattttcacaatatgttgtgcttatgccagctagatggttttctgacgacatggccggtgagaggccgaccttgttggtgtaggaggccatgtgg

SEQ ID NO: 4828 - DNA, 17075 bp, Oryza sativa
tctgaaagtcactctttccttttcttggtccctagtgtacttctgacctgaagagttaattaagttaaaaaaggtatcaaccgtatgtatttgcatgtatgaatttgtagctcctgtttggattaacataactgtaatgggagatggtttttttctcttaagttcaaccccccctcccctttttctaatataccatctaaatagttataaaaatatataaaaaaatagaacatagattaatgtgtgacatatcgcttaacaaacatacaagtttcagtttgacctatacaaattgtaaaaaagaataaacatgattgtaaatagtaacgtactatctagagtttactttgttcttttacttgtgttgattaaatttaaacatgcaagcttatgtagcaatatatcacatattgatcgatattgttaattttgttaagaaaaaactttttggttgacattcaaaaattaaaacaataagacatcttagacaaaagagatatttaactatttgccactcttctaaaccaccactctctgtttgccactttttcccaattttggttacttcgctgctttttttttttttgttatttaggttagattcgggaaagtttaagaaggagagaaaattcatggttattctgttatgtttcttgataaatgtttgttgtaatcgacatgaaacatcttcgctttgacactcttcatctccctgttttaactcccttttccttgatttcataaacctgtatctatttcatggcccaaattagtaccgaggaggatggattcacctcaactcgttgcatgcaatgcaagaaatgaatatggttgttgatctttttaattgattccaggccaacattaaataggaaagtctgaaatggatcaacggggaacacaaagaggacggctaagtgtagaatggacatttcacgtcacttgtccatgctgatatgcctatgtgtcatgccatgtaagtaagtgttatctgatcatacgattaatcatcctgatcagtcccctgactccgattagggacattcattcgatcagcttgatcagaaatctgatcatttgattaatcgtcagtcaggtgcgatcagatcgagcacctatcgatcactttcagaacaagtcttagggttgagcacatctgaatgtgtgctacaactgttggttgctttatacgtactagggcaagtaagtgatcattctgccatcaattataagcactgattgctttataccatccattatactatttaggttctggtatacatagtaccgatcaggtcaattaatcgaggctgatcgacgattactcatcctggtcgatcccttggcgatcaggatcgattagcgatcagataacattgtacgtaggcaaaaaaaaaaggcaaaatattaacgatatttctctcacgattgatcgagtgggaaaatttttaggacaatcttgaaagtcgcatttgaatagtggctgtttcttatagtggcaaaattaatagttaaaatttccgagacaaaaagactttcccatagtaaatgttgtatttttacctgggcaaaccgtctccttgtctaccacatcatccagttccacgcagctatacatgtcatcgacaaacctggttaaaccggcgtcgtcgtctgaacctgcatatgcatacatgcacaagttgtggtgcaaaagaattcagagaaagaaacatatacttcatccgtcctaaaaatataagaacctaaaattgaataagtgtccagataaatcgcactaggaaatatttcattcaatcctaagtttttatattttagaatggaaagagtatactagtacgtatatggagatgccaaagtgtacgtacgtacgtaccatattctatgggcgctgggtgagcggaggcaacatagcttgtcgtctcctcctcctcctcgtcgtggagaagcagccggtctagtaattccggcggggatttaggccgcaacggcggcatgatcagatccgtgcagccgctgggctcggagggttcccgagatccaccgctaggttcatcctcccaagatgccatcagccacgcccccacgcgacgccgccactgcttccctcgatcgaccggcgcgccgccgccgccgcaatcgccagcgagggcagccgtcgaaagacggcgcggcggcgccggcggcgggtgaccaaaatataggggacaaaaaagacaaaattagttctagagcatcggaagttgtcgattttggttttatagcatcaaaagttcaaggctcattttgatagcacctgaagttacctccgttacttctgtttagcattccatccaaactccagttagttttcttttcttattattatttttcaacaaaaaattagatcaaacaccaatggtggccctcttccacttccttctcatctcgaaacagcagtcatacaggagctcaggccggtcagccatggtgcgaacgcagtatgctggctccacgagctcgtcatgtaatacttgagccctcacgagctcatccgcaagccgctgtgttcatccgcgcttgctaggtgtgatctatccacattctagctttgcccggacagcgccatcgtcgatcgatctcgtctgccgcgccgccatggccatgctagagcttgttcaaatcttgcgtgctcaaccaggtccatttcctccgcggccgtgccgcttccgagttcgtccgtgtgcactgccctcggtctcccctagatgcgtcatcctcaagctcatccaatccatgaacgcccgaagtgtcattgtccagctcgtcgccggcattgtcgggaccgcacggaagcaaagccctccagattattgtcggcgcccttgagctctctccgacatgctgccctcgatcgagctcatccatcggccctcaaattcgccccgaagcaccaccctcgcgctcgttgcgggctctcctgagtgccgacccactcctccttgccctggatccgttgtctaccgacccaagagccgccgcctctagcatgccagaaccagctgccaccatccaaggctccaactcgctcagcgctatactgtcatggtcgagctcgcctgatgccttgaagagtggtcaaccataggagggagagcgcaggaggaagaagatagaggtaggatggggtgagccgacggaactgctgacggaatgctaaaaatagtaatggatgtagttttcagtgctattaaagtgaatcataaacttttaatgctatagaatcaaaatcgagaactttcgatgccatagaaccaattttgccatctccggtcgatgcgagaaatggcgcggagttgaaagcccactaaagcccaaggcccacttagctgctgacacatgggccccggcccgcttggcccgcggggaccccatcgtctcactcacctcccccccgcttcctttctgcctagggtttctctctctctctctctctcctctctctctctctcctctctctccaatcgaatcggaatccatggagtcgtcgcggtcgcggaagcgggcccgccaggactgggacggcgccggcgcgccgccgccgccggcggagcgggcggtggtacgtccgtccgttcatccctctgtctgctttgctcgatgggggtggtcgggttcctagggttcatgggggctcctgtgctgacgttgtggtgcttgcaggtggcgaggggcggcgcgtcgccgccgtggagggacgacgaccgcgacgggcactacgtgttcgacctcggcgagaacttgaaccgacgatgtgagcgccaccccgttcctgtctcttggttggctgaaaggagatttgtgtgttcttagatcctgcctgcttggaaactgcagtagttttgttcagttttatgtggtgctgtagaattctactgcgaaagttcattgcaataatcgcatgagtgatttggacattgattacctagtgtaatacagtataatattgtatctgtgttctaaaaccaagggaggtgaatgaaacaaggttcccgtttggattagcaactttctgttatgttaataaactatatatgcccttgttccttgcttttgttcccagcatttattgatgctaattttagttgaaattgcaataaccgtagggctttatagctatttaggttctgtgagattgttcgttgatattcttctcttcttggctatgcagacaaaatcttgagcaaaatgggagaaggttggattttctgcaatctgttccctagtacctggtgtctttgctattattgtaatgtaaagcaacaggaatcattttaaatttttaataggtacttttgggcgtgttttggaatgctgggaccgtgaaacacatgaatatgtcgcaataaaagttgttcgtagcatccgcaagtacagggatgctgcaatgattgagatcgatgtgctcaaccgccttgcagaaaatgagagatacagatcactgtgagtacctcaaaatatttgatcccaaaaatcttagtcttttctgtttctctcctgatcagtcttccttactggccagctgtgtccagattcaaggatggtttgactatcgcaatcatatatgcattgtaagtctcaatttcattcatttatgctagttctaaaaatctataccaaatgtcagttgttgatatgcgcatttacagttccaatattccatattccacttttccctgttagttcaaagttttgtttgttggcaatttactttgctggccctccgaatattcacctttttgctcgtaggcagtgaaacatgctgctatgtacgatatggtaatgtgcttgaataggatttccatgcttataaaacagttgtcgttctttgctcataaaggtttgccgatatggaaacaaatcaaagataatttttcttcaatggatatcgatggttttgtcaggtttttgagaagcttgggccaagcttgtatgattttctaaagagaaatagataccaacctttccctgtggaacttgtgcgggagtttggacggcaactgttggaatctgtagcatgtgtgtgattgtttgattctgcatatcaattcttaacaaattcggtagctgctgattcattcttctgttgctgaaaaggagcatgcttgaccatcttttcctttctttcttctaaaatagatatgcatgaattacgccttattcacactgatctgaagccagaaaacatactccttgtgtcttcggagtatataagggttccaggttccaaggtaatgtcaatcagttttgtagtgatcatctgctattctgaaactaggcatgcggtattagcagttatgttgaatgatcccttggggttgtacagaagaattcacaagatgagatgcatttcaagtgcttaccaaagtccagtgccataaagctgatagattttggtagtaccgcctttgataatcaggaacatagctcgattgtttctacaaggcattacagagcacctgaaataatcttaggtaaattggttatcttttaaggtttgcttttattttatcttgcttgagtttggaatatccttgtgatgaaggttaatgtggcctcgagtatgctccaatggagcacaacaaaggtgcaattcaaaatccttggatgcaataattgataatgctgttagaactcttatttttagtgattcgaaatgacagaactcattaaaacaatgaaaacttcttgccatcactataatcatgttagtattggcagaagaaatagcacttggtctacttattcgtcatttttttcagtgtactatctgattatgctttatagtaaagtggtaggcatttgactgagaagaatgtttttattaacttggtatttttagagatggagcatatattcctccctagataattctgatattcttgaatatgttcctatgacaggcttagggtggagtttcccttgtgacctttggagtgtcggatgcatcattgttgagctatgctcggtttgatatcttgtcatgcatatttttcctttcttttaccttagcctatgttcctaaccataaaaaacctttagggggaagcattgtttcaaacacatgagaaccttgagcacttagcaatgatggagagggttttgggtccactcccagaacacatgataaggaaagccaggtacattgtggcagtgtgcacactactttgatgatcattttcttttacctttttctgtgttgtcctcaatatagcaagtagtaaacgaatctatgttttactgtttaatttggcatttgacaaggaaaattttaattgtatcactttttaaaaatattttttgggttttcctttctatagaacttgacttgttagtggtatgctattctgccaagttgaacccctcaatatgtccgttttcttatactagcttgtaatttaacaacagtttgttcatgtgtagacccaaccttaaatccagggttttttttaacagtttatagttactccaactcactaatactcgagtcttatatttcttttgattgatttatccatagttctcatataaagtaataataatagatgcaactcatgcgaatgctgtttctgagtacgtcatgtggctgtcatgttaactttggctatggtatgctaccatttactgtcttgcaatgatcaatcttcttcattttatactgattttccatatttgcatcgtgtatgtcaactggaatatgcagttcatcagctcagaaatattttagacgaggagcgcgtctaaattggcctgaaggtgctgtttcaagagagagtatcagagcagtcaaaaaactagatcggctaaaggttttggttccctcaattatgtctctttttttttgctacgtttatccccaatctaaattatatctctaaaattcaaaacaatattatgcatattcctgttcttcagtctatctcctgtctgctacaagtaaaagaaataccatgcatagaaacatacaaatcaagagtagaagcagaagctgtttttttttaatgtaactatgcatctatagttaatgatttgtctgaatgaaggcatattatgtttgtaaatgtttgatataaagcttatttcagttttgtcagggtgcagatagaaaaaataaagttccattttctttggtgaactggtcctcttgtagtgtagtatctgtttcatttagtgatttactatgctgtttgtgtggtaaattcagagtattattctgctggttagtaaaattattccttcaaatttccactaagaggaaatgagaaagtattagaaacatattctgaaatatctgttctgaagaagattcaacttacacacctcaaacattatggactgaaacttcaggacttagtggcgaggaaggctgatcattcaagggcggtgctggcagacttgttatatgggcttttaaaatttgagccatcagagcgtcttactgcccaagaagctctagaccatccatttttcagaaatacaacatgagtacatgatcatgctgactctacccctcccaatatgtacgtgaagaacccaagcctggagaaagcaggcgcaaggacattcccatataaagcagaatgccttcagctcatctgtaccataaatcttctgtaagctgagctataatgcttgtggtggtgacacggcataactgttacgttcacccgatgtaatgtacaatagcattgaatctagggaaggttgatgtagcagatggaacttgtgcattgtgagttgtgtgatacatgaggaattgcattgcgactcatgtcgcagtgacacaacaatgaccaaagcaggccatatatgccccttccaaatgcttgtatgatgtatccttgctggggtgttcatgttacttaaacatctctgtatcctgaagttccgttgaaagcctgacaaagtacatagtagggttggcacttggcgcctgtttgtcctgtttgcaacttgccatgacttcctgaaaaatgttgtgcatacactgttacagatttgaatcttcaaaatgcagagagcgagaggaattttgattcgacaaagaaactgcataccgtgagaatatttgttgcaatggtcgataactcttttttctttttccatcttttggctttggaagccaaatccaaatccaaagcgaaagccgatctggtggcgatttggaaatctgtcctctcgagtctcgactgctgctggtgtctggtgacacatgtgttgctgggccagtgccctttttgtcacatgtggaacaacccctacccccttttttccttcacggtgtcacgtcgcactcctttggcccggtgttcggtcggtgttcccacctcggcccgctgctgcaactgcagcgtctgcagcgacttgtgatggtctggtcagggcacgcacacgacgccgcgccgtgccatgccagcttgcctgcactgcaacgtgggacacggacacggacgccgccgccggcgagccgtggcatcgcccggcgctgctgggggcaagcacctggatgctgggtagcgaaagcgaacaaggacttcgtgccaagtcgatgagaaacacaagtcgatgagaggacacctccacgccatgccatgccatatcgagagtccaggctttgtgggtggctgcgtcgtgtccgtcgccctcaacgtggcccgtcagtgtccgcggcaggactcgtcctttctcctgacgtggccgcccggtacatcagaaaccgacgaggcgcaacactgcccagcttggcaggccactctctgtttacgatcaccttatgattcgtttgccaaaatttaaattttaagacttaggcctggtttagtttccaatattttctttaaatttttaactttttcatcacattaaaacttacttatacacataaacttttaacttttccgtcacatcgttccaatttcaattaaacttctaatttttaagtttttttcatcgcagtttgcttttaaatcgccagtaacttttattcgcaaactatgttttggactgataaaacagtacggcttataatcagcgtaagcgaaataataacctacaagagtcggttctgtctttcgtcttgctttattatcagccgtagctttataagttttttagttggcttaggatgattacccgcacaaacgcaatttacatatgattaattaaatattaattattaaaaaaaatattaaaaatagatttatctgatttttaaaatcaacatctacacgaaatgtatcatttaacgtttaaaaaatgtgctaatgaaaatcaaggaatcaaccaattcaaattgtagtttagaacgggcactaaatgttgagatttaatcttattactgctaattttacccaattaaactacggattataattgcagctcaaccaatccccttctttgaggaattagccaccaccacaaccgatatagattgtctacggtactgcagcctgcagtagatcagccactgccaccactcaccactacagagtacagaggatcggcgcccaccacatcacccatgtcccaggatccaggccatacagagatcacccgagtcccagggacccaggccatacagtgataagagggaaacaataaatgtttattactatgccaattaaaataaatcaatacaataggtatgattaaagcttaactggctaggtttcttacagtgaaactaatcaatccaatatttaaaatgctaaatttaacacgacgataaaatattcttttagtgatagataatatactcgtcgataaggagatactcgtggtggcttcatcaatcaaaaatacgccggtctaatcttttataggtgtttatagtgatagccggataagatgtgtgtatgtttataaggacgagcgtgcgaggagaagccgctatcctcgcgacgtgcgacaaggattaaatcaaatcaagccgtctcgccttggggtttcccatccctccctttaaaaaagggcgcatcatctctaaactcccctccacatctccaaacttccaatttctctctccacatctctctgtgtttcttttatttctcctctgctcgcggcgatggcggcggcgaacggcggcgacagcaaggggttcgaggtgccgaagctggagatcaagttcaccaagctcttcatcaatggccgcttcgtcgacgccgtctccggtacgtcgctgcgtgcttcctaattaatcctccctcttgcatctttcaccttttttttaattattattcttctcctgatgctttttttgactcacgaaagttagcaacaagaagcatctgttagtacttctgtttctttattgtttgcaactttctttttttactatctccgtttcgtattagaaattaacataaacttctttaagtttaacaatttttttaaagaaatagcaacatttagaacacaaaacaaacgcaatattaaaatatattaaatattggtttagatgaaactaatttagcgttgtaaacgttgctaatatttttaataaacctgaacaaactcaaaagtttgattagaaaaaaaatcaaaacgaaaacagagacggatatagagtattgattagtcacaatacgtgcgacaccctgcgcttttaacaccaagttagataaatgtgatagccgagtagtatctatagcgtgttaagaagtgcgggacgtcatagtacgcaagtgagggtgatttatcgtgtaaaaaagatagaagaaaccgaatgtgaggatgagacaatggtagtatggtatctagatttaagcattgcttcggagaatttgtttactgaatgaatgcatgagtttcaccgaattttcgaataaataggtataattcctgtaaagttcattaaaaaaaaacctctattccaaaagaggcttaaaatattactaccaaatatgcatatttaaatgcatgttgcatggtccaccctgttccatgtggaggtaaatcaaatgaggcctaatatattaattactactactggacaacttgctagttatggggcttagctagggatcaagtcaaatattccaggattgtgccaatgctgaagacaactttggacacgggcatctttgggatatatcaaaaaaattaactgatattggttgtttgattgtgtggttgtgagaaacaagagctaaacctgcttacatgttaggtacttccaaacagaagttgtgccatgccatcactctatatttttttcgttttgaaagatccatcactgatcaaaacagcagaaattatggaagcctctttttgaccaagatctagcttttttaaacaaacgcaagaagatgatcaaacacaccacacacatttctacatacatctcatcaccaaagatcttgagcggatgggtacgtatagaacacgtcatcaaccccccccccccccccccaaacatctcactttcaagaagatattgctcgagagaaacacacgtcatggagagctgaaagtggatgtacttccaagagagcgagaacactacagctgcatattgcgtgtgaaagactgaaaatctgaaactgtagagcctgaagaaggggggaaaagaaaaacagagtgtcgactccgtgtgaaactctgaactgaagttattttttttttcgccgggaaggccgaaggaggccaaccgagtatattaagaaggaataaaagttacaagagaaaaaacatcaaaatacaccaaggtgcattgccacacaccacacgctaccacccaagcacaaaccgctgagggtgaaacctagcaccaaacgacccccgctaggcctacggcaacaccacagagacgaggctccgaaaacgatgccaccatggtggtcacgacatctaggatgccgccatcgcccatctaaaaagatctggttttcacccagagaagctcgccaagaaagggggagggtaaccctcgacaacgctccaaggagattacgacgtccgaagacgtagccgctgccggtccggtgaaccaccggactaggctttcgcctgggaccctacaaccttgactgcagatcgccatccaccaactcagaaccaccacacagacaaatggcagcacgtggcatccaccataccgcaccgatgcccctccgtcggtcgacttcaacgaaccaccacccctgaaagctggcccaggactcctccgttccaccacccgccggccgcctcgccagatttggccgaaggagaacccgggactaggtggcattgcttcggcagcctgagcttcccccactgacgagctgccgcctcaatccaacctagaaactccccgcaaagaaggggaggagctccatgaaggctgagggtgccgaccggcaacgaggaagacgacccaccaccgccaactccctttgctctgccatctggccgccggtggtgctgctgctccagaccggcaccacccgccggcgcccccgaagtccagccgtcgctcctcccctagccaccgcgacggcatcccggctgcctggcccccacgccgagccgccaccgaggcctggacgacccaccgcgccatgggctggcgccgggcgaccaggccgagcgagtgagcgggggtgcccctgccgctccgggcaggctgcgctgcccgccgcctccgcgacccggccggccacgacgagccgcggccatccgccgcccgcgcctgccgctgacgagccgcctccacgtcgagccgcagtcgtccgccgcctccgcgcccgtgccgggccggcctagccgcagccggccgccgcctcgccgccttgccgccggccgccaccacgaccgcatgtcgtcgcgccgccccaggcctcctcgcgccgccgccgcgcagatccaggcgagggagggccggatccggccatgggggctccggatccgccgcctcctcccctcctcgccgccgtagctgccatggaccacgccggcggggagcttcgtcgtcttcgactcttcgtccttcgcgcagagaagggagacgctacgaagagaagaaggcctcgccgccgccttccctgcctgctaccggcttcgccgccggcgggctccagcggcggcgaggtagggggagggagggagagaaggcgcgggtggctagggtttttgcgcccccgagccgcccgacacgaaagctatgcgcgggggagggggggctgaactgaagttaggaaattaacaacagagggtgtgtttagttcacgctaaaattagaagttttgtttaaattgaaacgatgtgacgaaaaatttgaaagtttgtgtatgtaggaaagttttgatgtgatgaaaaagttaaaagtttgaagaaaaagtttggaactaaactcggccagaatttccaggcgtcactgcctgtagctttgtattaaattttagatgaaatcaattctttttttttcctgggaatgatgcgtgtgtccaagctatagcttaattagctagtggcggtgagcctatggagcgttgcgagacaggcattggcactgtgggaagaaaacgaagggtgggagagagcttgagaaggacaggcagatccacacagatggcgagatgtatccatatgaatatgatagtaatatgatgaactgtgtggcagcattgcaaaatgccacatggtaccatggagtaatatgcatcactagagctatatcatgtggcgcatcagtgtccgggagaaaaggcagggtagtgggacacatggaaaacgcggtaattttgacagtaacatactacggttttagtcaggtcaagagttgacagcacgcagctttagttagaactaagtactctccctccgttctcgaataactgacacggttaactatagaggtctcactttgattacaaattacttttaaataattatattatgaatttatgaagtatattttcaagtgtttattaaatttctgtaaaaggacgagcggtcaaaagtttaaaattatatagtggcagcgtaaattatttgagaatgggtggattattttctggtctctattggtcgtagtagaagcaatatgagccgttgatttacaagggtcttatcctattttacgggacagttataccaggcaatgtctaagttcaatgtatgtgcaacgatcagtgcacatatatatacacacacacgagtgatgaatcctgttgactgttgagactgagctgttcggtatctagcgttttcaggggcttaattaggtttatttttcataaagcatccgtacattttctttcttttcttttcttttcaataaattagacacggccgggccgtccgacccaataagtccaagcatgccactatcactatggcagataacactagcttgcaacgtcgcttatgcagacgccaataaaactggcattgttgtgctagcttttttcttaaaaaaaggaaaattgcattgttgtgctaagctaggggacgacgcctgcaaatatttcaatgcattattgtgctctgattgggctcaacactcaattacgtgttgcttttttctgaatataaattataggagtacaaattaagtacatatatatctgatcacatatttctcatatttgggtacttcgacattgaccatccatcctccataataatattatttttcgtgctagccaagtactgatttggatatataaatgatgaataggatgtttttgagcagaattcattgcctggtaatattttgcaaggaatttaaaacataggcctactttgaaatggagaaattttaaagaaatgttgcgtaaattaaattaacttctacgaaaagcgtacaaaattctttcgttcgaaaagagctgttcatcccagcgcgattagactagttcgtactactaaaggatgaagtactagtatgtagtaggttgaaagtgctttgaaattcaatgtctttattagtatttatttttatctcgcaagacatacgtgtacacaatattatgatatctctagagtaataggctcaaatgtaaaaaagttcacgtgttaattaattagcaataagaaaaatgtatgacatgtcgcccttccactttgacatcttgtcactaagtaagcatcaattatacaccccattaaattgataatgacattcaaaaagtgggattagactatattcatcaccatcataatgagcaaaccagacaagtggatggtgaaaaaaacaatgcaaatttgtcatgctgtggaaaatctacttggacctaacataaaaaagctagaggctaactgatccatccattaacattaagaaaaagacatacatatgtaaaagataaatagataattttatctgatcttccgagaaagctctagttagcctggatggttctgtatatgagagattatatatgtaatcttgagatggtgacaacctaattaattaattaattaacaagcaagcatccaggctaataaaccagtgactgctaataaaccagaagtactgtagacaatgcccattgaggtgtccctgaacaattttcaggtctgggtctgctggctctcaaacactaattaagtcagtaaaaaacaccttgtatgtcatcggagatcagataattaatctgattatggtagccgaatattatatggctctggttcgtctgcaacaataataatttggctcctaattaactctcaagtttcatgatcaaatcctggaattcatactggggatcgtccaaaatatttccttcagagtgtctgtcatgccggtgtcttcttccataattttttttagttacaagtgtttgtgtcgtggaagcaattgaaagttgttgatcagagattcagagacctgatgggtaatttatcttaagaaacatgcaaatatcagtctagctagttgattcagaatcgccatgtgtggtagctatcgtgcaagcgtgcaaatagtttagttttttaagctacgatatgttattgtcatgtgacatttggtaatcttttttttttcaatgattttcttcgaaactagacaaccagtagttagacgtcaacgctttggtttttaattgcaactagaatataaataaattaatttactaataatgagggtcctgtatatagtataaattatttcccttgcttgttacgtgtgcaattaagtataaataaagtagctagatgcattattatcgatccacattatccacttgggtagtaaggctacttctcagttctcacaagtgtactacatgcgactatgtgagaatctctgaatattattgtccctttccctctagtcaaacccttgttttacaatttattcttacaatttgtgttcagaatactaatttaatagggctaccataatatgtacttttagcacttttttcctttaaaagtacaatagtatatatcgatatatacgaccatatcagttgacaagttatttttgctcttttaaaatacaataagatgttctattatacaatcatacgggttaacggatcttttccctttatttgcaggcaagacattcgaaacccgtgacccgcgcaccggcgaggtcatcgccaagatcgccgaaggagacaaggccgacatcgacctcgccgtgaaggccgccagggaggccttcgaccatggcccctggccaagaatgtccggctttgtaagcgcgcctctctccaccatcgcccgaaacccgtaaacgggttggatccaaacccgttagttaataataccaggcggcccatctagttataccgcactaattgggcctaattaagcccagcttaactttgaatttttggcgccaattaatggctgcaggcgaggggaaggatcctgcacaagttcgcggacctggtggagcagcacgtggaggagctggcggcgctggacacggtggacgccggcaagctgttcgcgatggggaagctcgtcgacatccccggcggcgcgaacctgctccggtactacgccggcgcggcggacaaggtgcacggcgagacgctcaagatggcgcggccatgccacgggtacacgctcaaggagcccgtcggcgtcgtcgg

SEQ ID NO: 4829 - DNA, 12851 bp, Oryza sativa
atcagtattattacatgattaattaagtattaacttttttaaaaaatggattattatgattttttttaaaacaactttcgtatagaacttttttgcaaaatacatactgtttagcaatttgaaaagcgtgcgtgtggaaaacgggagagttgggttaggaaaattggggaaagaacccagtcttatggacacacctaactctacttctgtcctatttaattgtgcctgacgtttatctcgactccacgcgatcacctcatcgttatcgaagtcactcctcttcaccaactccgacgagattcctatgcccaactctcctcccctaactttggcaacttgctttgctggatatctgttgtcgtccctgatcaaccgcttgtttcttgtttttccccaccacatccgccatccatcacccctccttcgtccctacgggtttgatgatgacatcatggttttctcctacttcaatcatccctctaaagctactctcaccgtaaatctactccatctcaccgcctctaaccctaactatctaatcgagtgagatctcaccatctctatccctctagagttcaggtgtcatcctcatcgtcaatgagacctcaccatctccatccctcttctttttttttcctacgcccccgctctagaggtcaaagacaatgctcggggcactgaagatgtacaaaaaagcatgtgagtcttttttatattaccacttatcgatgttgagtatatcagcttaaaagctacatccttctcctattgagttggagtagccttttattgttttcattctagcttatcactcatagccaaaattttaaattttaaaaattaaatttagacagttaatttcgagttattttatcgaagtttttagcatctacttttaaaatcgctagaaatcttaactaattaaaatattcgtaattttccgttcgccacaagacggatgaaggcgccttcgtccgtcggcggtgcgccttcgcagcccccaaatcccaatcgctcttagaattggatacagggaaatactttctaaaatcggcgcaaccaaaactcaaccactctgtcacaaaaaatcaaccacaatcatcataaaatcacaaaatacatcacaaaacttcacaaaaatatacataaaaaaagaagaacaacaacatacatcacaaaacatcacttgcctgctgccggatccaccctcggccatcgccaccgcggccctcggccgttgccaccgccgcactcggccgtcgccatcgccacccgatccatccgcggtagccgccgacgccaccaccgctgccggagggagaagagaggcggcggagggagccgccgctccttatccggccacggacgccgccaccgtcactggatctgctgcgggaggaagacgagaggggacggagggagccgccgcagctagatctgcctgtggccaccgccggcggatctgccacgggaggaaggctagagggagtggagggagcccaccgccacaaccctcggatccgcctgcggccgccgccaactctccgccatcgccgctgtatccaccgcggaagggaggcgagacagggcggagggagcggccgccggctagggaggtgagatggggcggagagagctgctgtcgccgtccccgccgctcgcgggaaggggggaagggcacactacaaccactcggggggagggggtggagggcgctaccaccgctgctcggtgggggaggtcgccaccgccgtcgtcggttttcgattgatcgagagagagagaggatcgggggcgggaagggtggaaaagaattttaggattagggtttttgctgcagacatttatattggttgtgatcaatctagaccgtccattcgatcgaacggctccagcttctcgcgcatcgggccaccggactattgggcctccgcattattgggcctacaaatgggccgcaattaaaataaatgttttctctctcagtaattttaagcaactttctattttcaaaaatagcaccattttaattatttatgactgcttattaatttaattccaactaaattgaataaactagaacattggctagatttttctcatgatatggatttatttttcgactaaaaatgtaattatttatttgtcatgatatagaatttaaatttagactaaaattaaataattttaatttttaattctatatggactctattcttcttccaatattcctatttttttattgttctaattagtttctatatgaactctaaactcttctttcaatatttttattttaaattttaattatttttctaaattgtattcctatatgcactctaggctcttttggagaatattctagactcctcatccaatattatttattttataatttatactttatattaagtcgtattatttatatagacagattaatctatccagtgtagggtttttttttgcaaaaagatttgttttatgtagatatccgattggacaacgtgattttttttaaaaaaaacaaaatgaaagagtcctggtctacaatgagttctccttatttttttatattttactccaattaatatgagaatttctatttgagacttttctagcaagcaaaaataccaaagcagtgtgaaaataacttcggttaaaaacaaatatttttagtgttattacaccgtagcgaagcacatgcattttgctagtacaaatataaactttttacccatagttatttggttccttttttttgcctcatcgcagggagagaacgacgaggccgttagttttgtgatctaacggcgacgatgcaattatgataactagtatggtggcccgcgcagattgcgcggctagcatcattatattttctctcatataatagcatatatgttttctcattatattattaaaatatattacaatgacaacataattttaaattttgcaataactttacgaaactactaatgtgtaatattcatattgtattttatatacatgttagttattaattatttttaatatcaaattttagttatttgtgaattatatatattcctatatggactttagaatcgtattttaatatttctttttttaattctaaatgtttattatttctaattgtatttctatgtggactctaaacttatctttaaatattctttaatttttaatttcaaatttcacttacttctaaactgtattcctatattggctttaaactcttcttcccatgtttttcttaatttcaaattttagttatttgtaaaatatatttttatatggactctaaacactacttttcattttattatgtttattccgaattttagttagttttaaattcttatatggactctatactctacttctaatattccttatttttaattctgaatttctatttttttcttaattgtatttctataaggactctaaacactacttttcattttattatgtttaatccgaattttagttagttttaaattcatatatggactctatactctacttctaatattccttatttttaattccgaatttctttttttttcgtaattgtatttctacatggactctatactctacttctaatatttcttatttttaattccgaatttcagttatttcctaattgtatttctatatggactctagtctcctcttctaatatttcttatttttttaattccgaattttaactatttctaaattgtatttctatatgaactctagtctcatcttctaatattccttattttttaattctgaattccaactatttctaaattatatttctatataaattcatctttcaatattctttaatttttaatttcaaatttctgttaattttaaattgtatttctatattgactttaaactcttcttcccatgtttttcttaatttggaattttagttatttgtaaattgtatttttatacggactctaaactctacttttatttttattatgtttattctgaattttagttagttttaaattcctatatggactctatactctacttctaatattccttattttttaattccgaatttttattttttttcttaattgtatttttatatggactctatactctacttctaatattccttatttttaattccgaatttctattatttcctaattgtatttctatatgaactctatactctacttctaatatcccttattttttaattccgaatttcaattctttttgactgaaattgcgaatttcagttatttcctaattgtatttctatatggactctagtctcctcttctaatattccttatttttttattccgaatttcagctatttctaaattgtatttctatatggactctgctttttttctttttctccgattaatgcgagaatttctaggtcatgagagcgaacatggaggctcctttttattccgaattttagttagttttaaattcctatatggactctatactctacttctaatattccttattttttaattccgaatttctattttttcttaattgtatttctatatgatctctatactctacttctaatattccttatttttaattctgaatttctattatttcctaattgtatttctatatggactctatactctacttctaatattccttatttttaattccgaatttcagttattttctaattgtatttctatatggactctagtctcctcttctaatattccttattttttaattccgaatttcaattatttctaaattgtatttctatatggactctagtctcctcttctaatattccttatttttttaattccgaatttcagctatttctaaattgtatttctatatgaactctgttttttttctttttctccgattaatatgagaatttctaggccatgagaacgaacgtggaggctcctttttctattcctttaataatataatagatttttttaagaaaaatgctcgtgttatacgtgatctgagatacacttgatacgtaagtggtgtgtggtttaaattctgagatcccgtgttgaattttcaacacgctcgtaagttcttctaaaaaaatatttgaagtgacgtctctctccaaacctttttttttttggtggggtttagacaggatctgaaccggacctgtacaagttgaacctgatgagacgagatactatgcatgcatataaacattacacgatcctaatcccaccaaggagaaaaaaccgatccttggcgaggcagatcctgacatatccttgtcctcccgaccaccacagttgatcgtagccaccctggcgtgcgtgcatagccagtttagccacacgaaactgtagctctctcgacccaaattccccgaacccacctactagctactcctgcactgcaacagcaaatgcaaggagaaaagcaccgagccagccgatgagactcggtgaccgtgccccggcgccgaccgccgcgtgtgcgtgttcgcccaggcaaaagacacagcgcaattgcgcgcactctctttcgcaggccgcgccgccgccgccgcttcgctttgcaattgcatgcgcccttttgccgacgccgcctagcttatcattatccttcctcgtcggccgcggttttcaccgtcctctctcagctcccctcgtgttttcaccgagcgacgcactcgtaaaaatacatcaaagaacgccgcggtaaaagctacgcaccccgtacgtacgtaaaaaagtgggtggtaaaaaaaaaggatgggttggtgtactggtctctgcgtacgtgaaaagactagctatcgatgcgtgtatctctgtgcgtgcgcgaacggaagaggggagcagcagcgagaggctttagctagtctcgcctttttctttttcccggctttatataaggctcactcgctcacactcactcacttgtgtctagtttacaccgatcagtagtagtgctactaccactttgggtcggatcgagcttgttgttgcctgcaaatctgcaaataatcttagctccttcagctaaagagcaagcaacggctactagcttccctcaacgccctcgtcgcttgcctcaccgtcaccgtcgtcactcgtcattcaccaacactcgtcaggtacgcttctcgcagcttgtagtatggatatgtgctgcagtgtttagcttctactggtgtgatgattaatttcttgggcttcttccgatcctgtgacgaagtcgcttgtgataatttggggcttattcagctcagacgaccagatgcaaagcctgaaagtctgtcgtctgctaagcctgtagccgtagcacgtcgtcttctcgtgagcctctggttggatggaaccttggagaggagatggaagtatggtagtagtgtcgtaccagtacttgtgcctgctgctgctcgctgcacattgagctgcgtggcgtatgcgccgcgcattttgctgcctttgcaaaatgctcgccgatgcatatgcatatggtctcgttctcctcttctttcgctcgctgctcttttgaggagagagacacaagcgaggccggctttcttttgcccccaaagctgcgtggccatggcgtgcagccaaacgcttcacatctctcttttctctctctttggcactgtcgagataccagtcacgcatcacggccatgtacgaacacgtctcctcctctgcagcaaacctgctcttctttctctctctatctatccaacgctatcaaactgtagccgtaggcctctggcgaggcattaaatgcaagcgaggcattaaaacgcaggcacagctcatgattgcgtcgcttgttggtttcctcctcgtcgtgttccaagcttcgacctgcaagctcggacggacgacttgccttcttgccgtcgcaaaagggtgccctaaaaactgatcctcggtcctttccatgtcacccacgacgaagaacaacattgctcgcacagcgtaggagtagctaccattccttgtcctgtcatggaacatcaccgaggaaaaaacgagtaatttatgtctactacagaatcttggctggctgatttctatagctacctggacagcgcattttcgagtactagtataggagtatagtactctatgattttgtggatagtagctttttgcatgtttgggtgtgtttagttcacgttaaaattgaaaatttggttgaaattaaaatgatgtgatggaaaatttaaaagtttatgtatgtacgaaagttttgatgtggttaaaaaattgaaagtttgaaaaaaaattttggactaaacaaggcctttgtatctttattttacaaactttgtgctgttggagtagtactagactactagtaggagtaactttgtattgataatactaggagatgaacgtacttgtaggtaatggtactaacagactacgaaagattccaacagcatctatatatgaaaaaggggaacaaaggagaattctgaaaaaagaaaagcacgcaactcctctctttgatttttttgcttttgtccatccatgcatcagccaacggttaaaaaaccccgtcgttgcatcatgggtccgcagcaccaaaagcccctcatcctcctcccccttttgcagagcatttcttcccttttcccccagcaacgagggtaaaagcaagctagtatcctactatggtctactccagccaggctaccactgccatcctgcatgtctcccgtccgtcgatcgtgccatcatccgcctgcagcgtcacgcgagtcgggttcgccgtgacgacgacgacgacgagagatcataatagtagatggaagactaccaccagcggtagcatagctataatagtaacttcttcatcatttacagttaatttaatagtcaatagtcaattcatataatagttatctataaatatatactatttctacctgttatacacatattgtgtcttgtaatccgtactatagcctattgcttatctctctttcttcactgtgtttatagctggcttatagtttaagaacggtggtgaaatgctagaaaagttactataggactaatctcgcctttgctccaaaaaagaggggcagaaagaccggggcgtgctcgtgctggaccatccgccgctctcgcgcgggaccaaaccaaccaaccagccgcgcgcgcgcgcgcgagcccggcagccgagctagctagccacgcccaccaattccaccgtgcacgcgcgcgcatgcgtgcatgctcgcgagaacggtcgggtcgggccctcggcgtgggatcgagttgtttggttgcctttcccgtgctcgatagatagcgccggacgacgacgacgacgtctttctggtctttttgggtgcacacacgcacccgtttgcacgtcgcgtcgctgtccctcgctgccacttcggctaaaagtcgtgcgacgacggggatcatatccgtgtgtgtttgcgttcggttcgacacgtgacacggctgttgtgtttgattgtctcgtatgtactatatttttcacctccctgaagaaaaaaaatgggaaaactgagattagtaggggaaggagttttttttttaatcttgtgggtggcctttgtgcatgcgatgcgattcgcaccgaatcttgtctggtcaggtagcggcgtcacgtacccatgttacgtcctttccagcttcaacgccgccatgattgcactcagtcgcagcagccgcgcgtgctcggctgcgccgtcaataatggcctcgtatctcctccacccacaaggccacacacagcccagtagtaggccagtagtccaccggggtcaactcctccttcgagtgcaacctctgccagtgccagccatcaaaccaagacccccccgaattagccccaaatgatctctttttcgtgtcaccttttccctttttttttcgtcctgcgatcaggctagagtacgtacgagtactagtactagtgtaccaggcaacgagagccatcgatggcacgcagcgctagtccactcgattacggttgctcgccgtacgtctcggcgcgacgcggccgtggtccctgcgtcgcgcgcgcgtcgcgtcgcgcacgccacgccggcgctcgcatgcgatcatgcgcgagctcgtcgcaccggcttggccttttgccgcgcgccacggcttttctgacccccaaaataaaagaaaaaacggctgcagccagcggcggccggtcagccagccggccagctacacggtgcgcgtacgtacggggggaaacacgcactgtgtggggggaaggaaaaaaactcgttgagcagactgggtggctctcggttcaaaattgtctccattgatctaatttttaaaaacttttaaagtaaaaatatttatttttaactaaagttgcttacacgctactctcttcggtctaataatacttgcccttttatataagggtaaagtcaaactttagaatctttgattatgaatctttttaaaatatttgtccttcaaatatgatgattacatgtatagattagtcttaaaaaataatttaataagatcatatatttgttaatacttttatacatgttataatgaaaaataatggtcaaaattattttttggagatcgtatccttgtccaaaacgacaagtattatcaatccggagggaatactaacttagctcattaaacaaagaaaaatataccccctacatccataaaagttacacatattatttatattatttttgtcaccaagaccaaggaaaatttaaatcatcttggatgttacaaaatcatagagtgaatgcaagcatgtaaccaatgagtgtttagatgcctccttgggttctaatcaaatatttaatttgtctccttatttaagtcttgaatgcataaagactgcagatagaaataacttatttgggaaaaactcaaatgtgaaatatatttaacttttgtggttgaagggagtaataaactataaaaacagtactactagctagcgtgtgatgatatctagatttccgtttacaattataaacgattctaaaatacttttataatattaaggaagtagcaaaacgataaatcatagtgagtattatttaatatatttgacaataaactagaagtagtaggggagaaataaacaatacaaaagtcgataagtgtaaaataaactaatagaatactatgccttgggattacagatatcttatgtttataataaattaaaataatataatctcttatatttatatatcgagggagtacgatcatttagcgtattgtgctgtacgctagaaatttcttacgtctggttcgtagaaccatttgtgggtgtgatcttaagcgagggtacctgcgtacgtaggtagaagatggggacggggatatggttgagagaacgggagtggtgaatgccgtcctgaatccacggagcagcgtatggagtcacgatttgttacggtgagctctcgctctcgtcatggcggaggtggatcgatccatccattttcacgccggtcgtggtcatccatcaatgctcatgtatcgtgccagcgagattgcaggtgatgtcttcatcatctaatcggaaattcagcaacctggggagaaaaaaaaatcaacaaatcgctgagcactgtacctaatttccgggacgattccgtacgagccccctaacagtagtgtacttactggagtactaagtgcaatgagctaatgccatgtttgccattactacttgcaagcagtcaatctttagggcagatgagacgatctgatccgtccgaagaaaagagagggggagagggacccagccgtgttgtggtgtgatgatggcgccttttgagcacgcaaaagaggagtcctagaccgacctgccaatgccgtgcccgtggcagccggcaggtagtgggttggcactgcctgaccccccgacccgactcccctgcctcctgctgccgctagctgcgacctgcaccggcgcatgccgcagcacaacagcagcagcggctcacagtcacagcttgtgtgtgcgtacgtacaacccgagcacgcgcacagtgccgcaccgcagcacgcggcacagcagcggcattaacgccacatgctctcataaacgtatgagtatttcttcgcactttttgcaggcttgcgatgcagcgacgacggagaacgcggcgccgcgcggcgaagggcgagacgaggcccggggttgggtgcgcgtggtggtggtgccatgcacgggctgatcgggttggatggatggtcccccgtccgtagccgtaagggtggcccgcgtgtggcaggtggcgcatgcagcagcgggcgcagcggctgctgcttgctctgcttgttcccctccccaagcgccgtgttgcctctgaccgcgccacgcgaatgctccgctttgtccctcgacgccacgccacgcgagtagcgccacgcaccgcccaccaccccatccatccatccatcgggccgtgcgccgtggttggcggcgttttttcttggtaggttttgtattgtacgcacgcactggtagtggacggctagtagcctagaactggtgtaagtcgttaacccgtaaaacctacttaacctgtttggattcgtggccgaccaattacacccctacctaaaactaagatcggtgctgctgctgcttttgcccgtgcgcgcacgagtaaaaaatgggtttgggccatgagggaacgagggggtgtgtgtgttgtgttcttctattctgcaatggtggagcgccttcttgtcgggggcacgcacgcttccaaagttgtaccgcacgggcaccgaggggcagggcagggcaggttctctcggctttgggacatttcttgctgcgtcgctggtggtgtagcagtggtggtagtgggagtagtggcgttcaaggccaaaggatgttgcgtttcgatttctctagtgcttgggccatgctgcatgaggcttaaactaaactttgatcacactttggatgcatgttcctgcacaacaccaaaaataaaaaaaaaataaaaatcctccaaaaatagcgcttggtaggatgtccgtcatgccagcaatacgcagttgaatcagacttaagtgcctgtcagcattgaacaaagttttgtaatgtcaaaagttccattattatacacacaatctgcctctcaatgatatttacaagtactactagtactagtactcccatggtaacataacaccacgcgctagcggccagccacacgaacatgtgatacacttctcaataaaaatccccatccattctcccttccttccatccccttcgataatccacccccatccgttggaaacctcagctgcactaccctctcgtgtttctcgcgccccaattaatccacgggccacaacgttttacctaccgtctccccccacctacaagaaatcatttctacgacgcctgctacctttggtaaaaaaaacggagcatattttgcttcttccctgttcaatcttaccaccggcaggcaaggcgaggtctatttatttatttaccgcgcgaggcggccactactactactaggaccaaacagggtcaaagcagctgcagtagttgcatcagtgacgaagggttctaatgcctttctgtcccgcctcgcattaattctttggcttggttggatgcgagagaaaaaagaggagagattttggtagaattgtaagatttttgttactactaccactcgttttcttggcttggtttggtttggtgtttgatcacgcggtggtgacattataagggcgcggttgcgcaggtgttcgaccagcgggtggcgaggtcggcggcaaggtggtggtggtgcgcacatgctcgaggtgctggac

SEQ ID NO: 4830 - DNA, 22298 bp, Oryza sativa
tttgagcatggaagaaaggtgagagcggttttcttggtttccgtggcgcggcggcggcggactttgcaggtgaagatcacgccggaggtgagctcccggagcgtgaaccgggcaatcatgtcggagctggtccgcctctaccacgactccgatctcggaggtcgcctcccggcctacgacggccgcaagaacctctataccgccgggacgctcccgttcgacgcgcgcgagttcgtcgtccgcctcaccgacgacgacgacggcaccggcgtcccgccacggtgcgcgcattatttgcccacagcccggcgctccattcttctccggccatgtcttaaccgtcatcgcgtctctggctccgcagggagagggagtacagggtcgccatcaagttcgccgcgcgcgccgacctccaccaccttcggcagttcatcgccgggcgccaggccgacgcgccgcaggaggctctccaggtgctcgacatcgtgctccgtgagcttgccaaccgcaggtacgcacacgcattgctcgtcgtcttgtgttcttgcaagggaaaagaaaggaaaaaaactaatactgattggccccaatggtaggtatgtctcgatagggcggtcgttctactcgccggacataaggaagccgcagcggctcggcgatggcctacagtcatggtgtgggttctaccagagcatccggccgactcagatggggttgtcgcttaacattggtgagatgctcgcgaatatttggtgccctcatgcatgtatctttcctggttgtcatgtgcttgctgcttacatggtggatgatgttgatgccagatatgtcatctaccgcgttcatcgagccgctaccagtgatcgaattcgtggcccaaatactagggaaggatgtcatatcgaggccattgtcggatgcaaacagaatcaaggtaaatttatgcttgcggggaaggaatagtctagccttgttactgtagtgggatgtaagatgtgttgtttggatgcttttggttaactgatagatggcttaattgtgatgctttgcatgattatctgatttacctgtggaattcgccaattccatgcagatcaagaaagccttgcggggcgtgaaagttgaagtcactcaccggggaaatgtgaggcggaagtatcgcatttcagggctgacaacacaaccaactcatgaactgatgtatgttatagtgtaattcatttctcgtcatgtactttcaattgtcaaatgtcttgtaccgaactttcacgaaagtagaagcatgcatgttaagcactccctcttgcttctaaatctgagtatggcagaccaaatagaccaaattaactatcaatatccatatttcatatacgttagctactaggcattgtgttaagctatggaactgattttgtttgttttaacagtttcccaatcgatgaccaaatgaacatgaaatctgtcgtagagtatttcaaggaaatgtatggcttcaccattcagcatccccatcttccctgccttcaggtgggaaaccaaaagaaggcaaactatctaccaatggaggttggtattaatctcatcaagtcacaaatttcattagctggtcaattatgtaacattcaaccttggtaaaagacatcatcattttgagatatttcttaccaggcctgtaagattgttgagggtcagagatatacaaagaggttgaatgaaaagcagatcacatcattactcaaggttacttgccgtaggcctagagaacaggagatggatattctacaggtctagttttttctcctaatcggattataacattttgaaatatatggattacatgtttgtcaggagtaaatgtttcaagtattttgtcttactaaattggatgataaatccaaacaccaaatcagtgcattagaatttagaagatacgcatgctaatgtacgttaattgttctatgctgaagtctttgttttcattacccacttccaagtggtccaagcattccatgcaattgatgttcaatagctacccacccaataagtgctactagggtttctcttcacttgatcagcactcttgttataatggttcaagactaaaaaaatttctttccagacagttcaacaaaatggatatgagcaagacccttatgcaaaagaatttggaatcaacattagtgagaagctaacctcagttgaagctcgggtccttcctgcaccttgggtatgatttgcctttgttaatctcagtagttggctaactgctctcagctaataatttgggtatgaaattttgtggctttcagctgaaatatcatgatactgggaaggaaaaggagtgcttgccacaagttggtcagtggaacatggtgaacaaggttagattccccgttttccgcagctgtatacaacagacgtccttttatatatcatgatgatggcctgatcctgctagttttccactaattaagcattttttttttgcagaaagtgataaatgggtgcaaggtgaatcattgggcttgtataaatttctcaaggagtgtgcaagaaactactgctcggggattctgccaggagttggcacaaatgtgtcagatatccggcatggtatataactcttaacttcatctaatggttttgcataatattggtgcttttataatgttatttgttggctgcatcttttcagttttatctctgctcttcttgcaggaattcaacagtgagcctgtgataccaatatactcagctagaccagatcaagtagagaaggcgcttaagcatgtgtataatatgtcattaaacaagctcaagggaaaagagcttgagcttcttttggccatcctccctgacaacaatggttctttatatggtgagtgtcggtttggtaattgcatcgcaatttttccttggaatcctcatattgtgtgaaatgcttaagatgtaacttaatatttgcaggtgatataaaacgtatatgtgaaactgacttggggttgatatcacaatgttgcttaaccaaacatgttttcaagatcagcaagcagtacctggcaaatgtctcacttaaaatcaatgttaaggtaccaaatacttataaaccaagcagttaatacttagcttgtctacacaaatgtagtgtaatgcagtaagcagacttgcagcattgctaatgccttgcatttcggagttgtgatacagatgggaggaagaaacaccgtgctgctggatgcaataagttggaggattcctttggtcagtgacataccaactattatatttggtgcagatgtcacgcatcctgaaaccggggaggactctagcccatccattgctgctgtaaggctgagcatttctatggttacatggccatcattttttttttaacctcttaccctctctaataagctgcatgcaggttgttgcatctcaagactggccagaagttacaaagtatgctggattggtgtgtgctcaggctcatcggcaagagctcattcaagatctttacaagacatggcatgatcctcaaagaggcaccgtaacaggaggcatgatcaggtcttttttgaggaacaatttgttcttccaaccaaaattaattgatgaagcctcctattaaatagtttagggttacctcctaccgattaacttatttttggttctggtcttgttgtgtagggagctcttaatatccttcaggaaggccactgggcaaaagccattgagaataattttctacaggtatgctactgcaaatactgtttataaactaacgtttgtagagtacagtagttagatatttgtggaatcaatttaatcctatgtatcttcaacaagtactgaacctagtgtttttgttcgctatttgaagtatgaaagttgctgttataggcttctatttgtatatctgctaatagtatcggtactgcttctcttctagggatggtgtcagtgaaggccaattctaccaagttctcctctatgagttggatgctatccgcaaggttagatgcatttgtattttctttactcagatattttgtccactttattaggttgcctgacgaaatgttttcttttaggcatgtgcatctctagaaccaaattatcagcctcctgtaacattcgtggttgtccaaaagcgtcaccatacaagactcttcgcaaacaatcacaaagacagaagtagcacggacaaaagtggaaacattttgcctggtaattactattcatcacctcttaaggcatttcattggatctactgcagatgataatgcaaccaacatattgcaaaaatattttttttattttaactaaaaccctcagtttgttggtagaactgtttcagtgatttgatacttgttttcctattcatgatatcacattcacaactgtttttcttggattattaaggtatcactttgggtgaactaacttttatatttactgttattcacttgatttctgtaattgctcatgtgtttgctaaaaaacaggaactgttgttgattcaaagatctgccacccatcagagtttgatttctacctctgtagccatgctggaattcaggtaagaatattgtagtggtccttttgtaaggctgacatatactgaacttgtcgttactctggtccccatgtcttctgtgattaagtatttgaggagacttcatattgtcttttcaaccacaagcagtgtagtacttcctccgtcccaaaatgtaagcatttttgaggttggtacgggtattaagaaagtaggtgagaatgattgaagaaggtgtgtgattgattgaaaagagaaagtaggtgaaaaagaatgattgtgattggttgagaggagaaggtaggtagaaaaatagcttcattttgagacaaattactgtgctagaaatagctacattttgagacagaggtagtagtatcacagtagctagttactgtagtacctagcaaagggcacatctgcacatgctagaacaaacaaacttactataccatggtcaaatttttaatcatgtgattgtacattatagtacttggatcagcaaatattctgtctgtagtagcgctggaatataattccccaagtttgtcctccatgtactgaaatgactgatgtgtgtgagttttccagggaacaagtaggccagctcactaccacgtcctttgggatgagaacaatttcactgcagacgaaatgcagacattgacaaacaacctttgctacacgtacggcattactgaatcttgttaagtttatcctttgcactctgagcttctctctatagaaattgtctgacttggtacatttgctgatgcagttatgcacggtgcacacgctctgtttctgttggtacgttcttctgaaatgatctgaacatttttccatcattttctttgtattcatgtgttattattagttggacacgaattctgaaggtgaatcttgcatttcttttttcctggtccaacagttccacctgcatactatgcgcatctggctgcgtttcgagcgcggttctacatggagccagagatgtcggagaaccagacgacgtcgaagagctccactgggacgaacggaacctcggtgaagccattgcctgcggtgaaggagaaggtgaagagggtgatgttctactgttgatgactgggagactacctttaactactcacatatgatgtacctaacattgtagaattttagtggtagggatttagaattagcttccttcaggaaagggagcagagcaagcatttggatcctgagcgacctcttttgaccactctgtaaagtactaagtaacgcatgtataatagttgttgtatcagtctgaaaaaaaggaagtgcactcagtgcttgtttttccagttctaggatgattttctcttcatggttaagatctggtaagagactcaatacacgaatccattatcaggataacaccaacaattttcacttatagaacatattcgaaaatttctgagaataggctaataattctcaaaataaaaataaaaataacctgcaggatgagcatcattcgttgctgccattaaggacagtaactaaggatataatgctgaatatacgaatctagttaagacggcctgaagcaggtccacagaacccgacttaaaatcattgttagttcagattccgggccacattgtatttttactgtgacttgcagatgaaccttcttccataaataaatattgcattcacttcaaagtgatgttttatgtgttagtgagttttgagtggatatgctgaatacatcaacaagagcaaactgaaaatccaagtatagcatttttaacaagctgacaaatgacagaatcatgctgcgatgataatgttcgtccatccattgttaagaagttatggttgcacattagatataatcatctgcactgataggcataggcaacaacagaaaaaaaaatactactggcattggtgtctaaccttgttttttcatctgcagaaccgtgttccatttcctggcaagagtaaaaaaaatccagctctgctacaagcctgaaacaagctagctgaagttcagtagtcctcaaattaactaactgtacaagcctgatcactcgaatgtctgttcagacaaggttcttcaaaattgctaatgaaacggcttccagtgattgatcatgcttctgttggtccagtcaaactaatggatgcttcaacaattcctttgtccaagcattatatgcttcaacaactcctcagtaccccttcacctcaatcaagctacaccctgcattcttcttgacagtagggtgtgccatcttgccccgtacccttatcacatcctcccatctacttgctgttgcatatacattagacatgagcaaattcacatcagtaatttgggaatcttgctcacagattcgtttggttaaccgttcactcatctcaacattcccatgagccttgcaagcagtgaggagtgcaccaaacagtggcatagcatccttgttaattggaacgtcaccgatcaacctctcagcttcatctagtagaccagcacgacctaggaggttcacaaggcagctatagtgttcaactcttggttctatctgataaacctccctcattgcatggaactgcttccggccttcatcaaccaagccaccatggcagcatgcacttagcaccccaataaacgtaacaccgtcgggcttaactttacttctctgcatatcttgaaacagttcaagagctctaccagcctgaccatttgtggccagcccacagatgatggcagtccaagctgtggcatctctgccttgcattcgccagaagacctctagagacttctcaatgtgcccacatttagaatacatgtcaatcaatgcggtgcctaggactgcatcgatcttcattttcctttgttcagcatactggtgaatccattcaccttgatcaagagcgccaagattggcacagcatgtcaggagagtgacaacagtgaacctgtctggctcaacccgttgcatctgcatatctcggaacaatgtcagcgcctcctcgaagcatccgtgttgcacacacgcattgatcattgcagtccacagaattagatccttctctttgcactggttgaagagcactctggccttgtccagctgcccagcaaggccatatcccgacacaagtatggtccaagaaattatgttcctcgcaggcatttgctcgaacaatttcaccgcctcttccaagcaatcattcttcgtgtacatgtccagcagagcatttgcaactggcagattgaaaccgaagacgttatccatgtacacatgaatcctccttcccaagctcaggtcccttgctctagagcacgccgtcaccgccgtcaccaacgtcaccctgtcaggtgtgacaccgcttctctccatctgttcagacaaagcaactgccgccgagtaccacccgcacctgatgtagcacctgaccatcatgttccacagcaccagcgccctactcggcatttcgtcgaacaccttccgcgcgatgtccacgcgccccagcatcgtgtacatctccatcagcgagctcccggtgtaggcgtcccaccggaacccggtcttgacagcggccgcgtgcgccttgcgcccctcgaccgacagcttgaggaccccgacggccctgagcacgaacgggtaggtgaagctgtccgccacgagtccccgcgcgcggaggtcgtagtacaccgccatgacgcgcgcgaagctcccccgcctcgccagcgtcctgatcagcacgttgcactcccagagcggcatcccgtggcccctcctcgccgccgccattgccatcgcgcggggtgggtggcggcgacgcgacgcggccaagacgtggggggggaatcttttcctatatagagagcggaaagtcacagcctcacgggagagaagggtaggtgtttgtgtgtgtgcctctctctcgagtctcgagatggtggggaagcgagtggcggtggtggtgggagggagcgtggcggggctggcatgcgcgcacgcggtggcggaggcggggtgggaggcggtggtggtggagaaggcggcggcgccgggggccgggaacggcacgggcgccgggctggggctcgacgcgcagtccatggagacgctcgcccgctggatccccgggcgcctcgacgccgccacgctgccgctcgccgtcgacctggtaagctaagctcccccctgtaaatccgccggcctcctcctcctcccttccccttgccttgacccacccgtgagcgcggcgcgcgcgcagaacagggcgacggacggcgagacgaaggcggggaggacgctgacgagggacgaggggttcggcttcagggcggcgcactggggcgacctgcaccggcggctgcacgaggcgctgccggccggcgtgaccgtgctctggggccaccagttcgtgtcgttcgagatggcgccggaaggggacggagatggcggggtcgtggtgacggcccgcgtgctgcgcaccggggagacggtggaggtcgccggggatttgctcgtcgcggcggatggctgcacgtcggcgatccgccggcgattcctccccgaactcaagctgaggtcagccagaggttctagactactgaattgtttactggtagtagtattattgtttagtcgcatgattttttttttcaatttagctgctccctccgattttgaataacactcgcaccttctccacctcctcgagttgggtactactactaattatcgtgccatataattttcttacaactctaattgggaatataaaaatatgaaacatacttagcagagtgaatccaagcccggcctgagacccacgtgcccacgctcgactcacgccgcaaagtctattggacaaaaccccatgtcggcatgcccgatgggttcgcgttgccagccacctcctagtcccgtgtgctgccacgtcgctagccatcaccgcaccgccagccgtcgcttgcgcccttgcacctccacgtcatgtggccaagctcccttcccgtgcaccaccgccgccgcctagtgtagacactggagaagagtagaagactgagggagtgagagatagcagtgaggagtataaggtttgtgatttggggatttctatgctagggtttcatttagtgaatatatatattgcatacaaaggggtcaaatggactattaggccatgtgaggagataaaactatttaaggcctgaaaaatatatatgggctaaaaaattttcaggtcgggcatggtttacccacaggaaaaacccgcgcgcgcctactaagttcgcgggtatcggatcgggcgtgcccacaggcaaaaaaaaaaaaagttatccgcggatacccaaacctatgagcaatactgccattcctaagattttgggtgtgtttgagagaagagatttttttaaaaaagtatataaaatgggatgagccattatcatatgattaattaagtattaattttttaaaacttaaaaaataggttaatatatttttttttaaaaaataactttttaaaattatcttttttaaaaaaacgtatgatttagtggttcggaaaacgtaacgagggatttcttctctctttcatcctaaggaacagccttagtgatattaaggatttacgattgcctttcatctctttcaacgtgtgttttcgggcgcattcgtggacgatagtgtggtgcatgagtcgtgatggtgtgtgcgtgtgtttttcttccattaatgaaaggaaaatattagctgagtttttcagtatttcaatataatatcatgtcaaaatgggcaaacttagctaagattgttttcgattttctgattatttttcaataatgtaggtactctggatactgtgcatggcgtggcgtcttcgatttctccgggaaggaggggtgcaccaccatggtcgacatccggagggcctacccagagctcggcaactgcctctacttcgacctggcatacaagacgcacgctgtgctctacgagctgcccaagaaccggctcaactggctctggtacatcaatggcgatgaaccagagctcatggtaattgtcaatcgatgagaaataaatcagtgtgtttatccctccttttccgatgtgatttggttccgtttggtgttgcaggggagctcggtgacgatgaaggtgaacgaggccacggtgagcgagatgaaggaggaagccgagcgcgtgtggtgccccgagctggcgcggctgatcggcgagacggcggagccgttcgtgaacgtgatctacgacgccgagccgctgcccgggctgtcgtgggcgggagggcgggtggcgctggtcggcgacgcggcgcacccgaccaccccgcacgggctgaggagcaccaacatgtccatcctcgacgcccgcgtgctcggctgctgcctcgcgaggtggggcggcgatggcaacgccgagccgacgtcgacgccgcggcgggcgctggccgagtacgaggcagcgcggcggccggtcgtggcggcgcaggtgctgcacgcgcgcaggctcggacggctcaagcagggcctgggcatgggcagcgccggggacggggaggggttcgacgcgaggacggcgacggaggaggagatttcgcagctgcggcagagcagcatgccgtatttcagtggcgcgccaaccattgagtgatctaataaatgtatttttgtgaatttttatataaagaaagaaatggctatctctatcataggttttctttaccgaaatttcaaatttttagctcctgccctgtttggaataaatgaaatctgtactattttcaataagaagtttgttgtaaatttcaccaaaaaccgttaatttaattttatttttcttctcataggaaccgttcatttccgaaaatgctcaggcccgggcaaccggcgggaggtggagcaggatcatgcgcacgttcccctggccccaccacatgtctcaagaaaatgtttcacccagtgtactcacaatgttttactatatatagatctgatattaaaatattcttttacaacaaattacccacatattttggaaaccctttattaagggaattcgtttcattttttatttgcagtggcatatgtatagatctaatgttatagtgaactgaaacattctttcgctatttgctgaaacattgtttttatataaggtgaaacaacgcccgatttaaacgaatgaaatattttcgatctacttagtgaaacaattccgatatacttggtagagcatcgtgcaactgtcaacgtttgatgtctcgactacggtatttggacagtatggggatcgtcggtgctagggtatacgcgagactgaggtaaaagagatggagacgatgatttttatacaggttcgggcccctgagctatcaggtaatagccctacatcctgttggccggagccaatgttgctttttattcaccataatcacaccagtacaatatgtggggtggcctatctaactgttgtcgacatggcggtctgaaggtctgactcgtagtcgacaacagggtagccttcctcctcgagctcgcgcccgacggaatcagagacagtgctagatccctacggccggcctctgaaggtaccggatagggtcgatccaggcgtatctctgatgtcgatatccggcggcttgtcttggcgtatgtaggcttctatgttgattgtgttgggagttgattgtctcgtggtgggtgttgatcgtctcatggtgggggtcgatcgtgttgatcgtgttgatcctccatggtgggtgtgtgtccccctgtcctcctagggggcttatatttatatccataggtgtccccttgtccaagtagaactagggaaaccaatatgaatacaatccgagtagtccttgtcgtttccatatagaactctggttgtctttccttatccggaactccctcctatatccgtaggctgtttccgtataggacatggtatgtggtgggtcctgccgagatttagtcaactactattaggtatgtggtatccataaccctgacagtagcccccgacttcaatgcaaatgaacgaattcatattctcaattgcgcgcagactttggagtaactattatcgagctcatgtgaacgttttcggtgagttcagatataacgttagacttcctttgtcagcttcgtgcgggcaccgaaagggtttgtctaagtcaatctttgatgttgaccgagaaagtacagagcgtacgactaagtttcccgtcttgctgtaatcgagaatttggattaaagtcaagaaattttatctcggcgggtacatcatttcttcattccgcattccttgtcgagatccagcaatcgttctcgagcgatcgagaaggcgtagagtctgcgacagagccttgtcaacattggtcgtactcgccttagtcgatcttggtgtagaaccatagagacatggagccttcgtcaatgtcgaatataattttcctgaaatcaatactcagaaaagaatattagatagaaatagcccccaagcgaatgctcaaagggtgacatattataatatgacagactaatgaattgaatgtacagaccagtgttttgtatatgagtgtcttctctcttaccgactccgatcagtcagtttgtagagtcatacactctccctagcccccagccttgtcatcggagaatcattctcggaggataaggctcttggacccttgacctgccttggttgaataagcactgatcctagcccccagccgtaaagttggaaaagtcaatttccgattacacggcttagttaatacgcacggcgagaactcttacacgaccagatcttacatggtcttttgtcattacagatcttacatgggcctccacttacatggcactccagcaaccgttggatctctcctccctttcccttccttatctggctacattcccaaattcttgtcccatcgacctagccgaaacctcccctctccccctccacagcttcctctgcctccttgccctcgtcggcgccgcctgcggtgaggctccacgcctccatctcggccgtgtccgttagttctctttttccctacctccgcgagttcagctgttcgccgtagctccccctgctacgtcccgagctccgccgcctccgattaaactgtttgcgccatctggcggcggccagcagagtcctccctcagctccgcgggtttagattactgcgcattgatatgtggacttctctgcttgcttcctgaggttagttatgtataatttttccctaatgattgaaaaatctttgggacgaaaatttccaaaatttggccgaaaattccaatatgatatttggaagttttgaccaaaattttggaagttttcgttcaggggtatttctgtcattatgataaaaatctaacggaggctaactagacaatgatggtatattatagaagttaagaaaattgtgatgacatatgagaatttgacaaacccagtgacatattgtagaacatggataaaatcagtgacacataatggattctttctatttgttcccttaactacctatctactatggtgcgacatgtttagaaaaagttaaatcttatactataattccatttcttacacattaaattatatatacttataatataattttcaaattatatagtgcactattcacattttatatgagaaatatggaaaagtgatttattatctatttaattatgagagaaaaatattagtccaaattaacataaacatatagaaaataaaaaaacaacaaaagaattacggaattactccgcacactaactctctctccctccattttctttttccctctaacagttagtgatcgctagatccagcaataaacaacccagatctagcatctccgttttttgtaaggttggttcatgcctccctaagtctttgcaagcccaacaatcccaacctcaacgacgacgatgacaatagtgtgcatggcgataggggaggagaaaagacatggctataactatagggtgcagctacgcatgcaaaggcggagaggagaaacggtggtggctcatagagaaagagcgctggtggtggtgcgtggagctgtagttagtggtcgcgggtggtctgagaagtttgttgtcgacacaatctctaactgagtttgttaatgtttttctgatatatgggccaccagtcatcataaaaaatagcatagtaaggccctgtttagatacctggcaaaattttacgccctatcatatcgaatgtttggacatatgtatggagcattaaatatagaaaaaactaattatacagattacatgtaaattgcgagacgaatcttctaagcctaattgtgtcatgatttgacaatatggtgctacagtaaacatttgctaatgacagattaattaggcttaataaattcgtctcgcggtttacaggtggattctataatttgttttattattagactgtgtttaatactttaaatgtgtgtccgtatatccgatgtaatacgccaaaactttacatctggatctaaacacagcctaaaaatattgagatatacgtggaatatcagtatatgccactcaattcgcggccctatgatccaattcgtgtgtaactttggaacctgccacgggagagcgaattccttcgtttcactccatccatccgtctgcccatccgttttacgctcgtccgcgaccgccgccgccgccgccacctctaccaccgtacccgagctcgtccgccgccgtctccattagcgtcgtccaccagctcggccgccgtccccgagctcgcgtcgtcctggtgagcctctttctgattcatctctctctctcccaccccaccgggacaatttctgtctgcaatttgctcacgttcgttcgttaaccctagcttctcttctagatctggaagaagctatttcagagccttaaccttaatacaagtaacagtttattgtttgtttcccccaaaatttgggggttcccaagttggatccgccccctgcttcgtcgcaagagaaattctccttttcatttgagtttgtagagcttttcaatggagtatacatcaagtgaggatgatgagctggttgaaggttacatggatgttgaggatgatacaggcaccagcaatactgatcaaggaacaggtctgatgccttctgagatgcgtagcatccttccccgtccgtcgtctgttggcaacggtcggctgatggctgctgatgggttgggcacaaacgatgacccatgcctaggcatggagtttgagtccgatggagctgcacgggcattctacaatgcgtatgcgctgcgccttgggttcggcatccgcgtcgcccggtcgcgcagcgagcggaggaagggtgttgagctacttatcatgaagcgttttgtgtgcctgaaagagggacatcacaagaagaaggatgccgagcctagcgacaagaaaaagaggaagcggctctcgataagggatggctgtccagcgatgatggaagtggtgaggaggggtccggaaaaatgggtcatcacaaagttggtcctggagcatactcatgtgattcttagcccagacagggtgcgggaggtccagctccgtcgcctctctggaaagtgcgcagagcatgataatcaattgcaggagctgcgccggaatgtgtttggagatacagatgcgcaaggccttttcaactacttgaagagaatgcagtcggagaactctggttttttctactccatacaagttgacagtaagaactgtgttagcaatgcagtttgggctgatgctagagccagaatgtcatacacatactttggggatgctgtttattttgacactacttatagtaaaaatgagaatatgttaccctttgcagctttcacgggtgtgaatcaccatggtgatactgttccttttggttgtgcacttgttttggataggacagaatcttcatatacctggctatttgagacatggctgacagcagtgggtagacggttgccgttttcctttacaactgatgaaggcaaagcaattgcatcagcagttgcaaaagtatttcctcagtgtttccatcgtctttgtagatggcgaattttgtctagatgcaagaagaagttgtctgacgactacgtgagatttcccaatctccatgatgagctcagaagatgcatcaacgagtgttatactgaggttgcttttgatatgttctggggtactattcttgacaaatatggcctgagggagaacagttggttgcgatcaatatttgaagcaagacacagatgggttcctgcatacctgacaacaagctccttctttgcagaattgacattgacccagagaggagaaacaatcggtaggttttttaggaataacttcagcacaagagttcctctcgatgaatttaccactaaatttgaccaacacatagacaatttgtatgtacatgaaactcagaaagatcttggttcatctcatccggaacagatcctgaaaaccaatatagccttggaaaaacaagcaaggagcatctacaccaatgccgtgtttgaaatattccaaacggagttgtttgaagcattgcagcattatgctgttaaggttcatcaggatggaccttactccaagtactatgttgacagagatgatcctccaacaaggcacactgttttctacaatgttgccgagaagaaggcttggtgcgattgctgcaggtacgctttctcagcaatattgtgcaggcatgtgcttggagttttcatcttagctggaatcatggtgcttccggagacatgcatcgcgaagcgatggacaaagagggcaaagactgggccagaattaattgggcataatcttgagaatggaaattgctacatggattcttcaacttcaaggtataatgatctcattcatgatgctatcaaatgtgcagagaagggagctgtatcagcagataacttcagagttgcaaaggaaatactccgcaaagccttcatggaaatcaagtgtcttggagaaaaactgactgacgatgacctgcagcaggttgacagtagatagcagtggttatcttgtgaagcatttgagagattgttccagatatcttttactaaaggatggaaatgaggcgtaattttgctgtgccaccatgagtaaaagcatttgagagattgttccaggtatcttttattaaaggatggaaatgagatgtaattttgctgtgccaccatgggcaagcctaccctgtactgacaatgaccaattaacatatttaaccactgtaaatctaatcctgatgtatgctgttagcctgtctgtagaatgctaatctgacttgtgggagtcaggactgtaaatgttgactcgtttgcctgtgttcctcttgctgctattcatgtcatgatatcacaactcacaaaaagttatgttggactcgccatgcttgtagggttttttcttcataaaaagagttacagacatcgtttcttgtttattttgaaaattgatccatttggagtaagcctttgttgttaaatatacaaagtttattgcgttctttaatgagaattcgaaattcggatgaattccttcatgcaaaatcttgacataaaccaacacattagacctttcgtcttgtttgttcgtaataagctttctggtagtatctgctaccttccgattctatggctacaaaacaaaatttacaaagcccctatcatgtttaaacacgacaaaaagaaaatctcctggctcaaattttaacacgccgcagaattcacgaaaattcaaaaaccaataaaaaatcgcaaaaatccaacgggaaaaaggagacgcaggaggaaagggagagagagagagaacaaacggcatcaatggcggccacatccctcctctcccgcctcctcatcctcccaccaccggcgccggccgccgccgcctctctccggcagcggaaacccgccgcagcgcactccctatcctccagggggcggaggccccgcctcgcggtacaggcggtagcccccgcggcggcggaggaggagaagggcgggctgccggcggcggaggcggagaggctggcggagttcctgcgggaggacctcccccacctgttcgacgacgtcggcgtcgaccgctcggcgtacgacgaccgcgtccgcttccgcgaccccatcacccgccacgacaccatcgacggctacctcctcaacatccgctcctcaagctcctcttccgtcccgacttctacctccaccacgtcgagcaggttgagctgctaccccgcactgcatttcccaatttcaatcgtaacagatttgcagcgcattttgcgaagaactcgtgactggatgggtggtggggtttttagacagggccgtacgagatcaccacgaggtggaccatggtgatgaagttcgttctactgccgtggaagccggagctggtcttcactggcctctcgatcatgggcgtcaaccctcagaatctcaagttctgtagccacgtggttagcattcttgcttgacactgcagcttttggaacatttgtttcttcgaattaatgtacgttaagattttcttttattgttcatgaaatgaattagtggtattttaatcccctgaatcatatgtatggatcacgtcttacagagtctactatatgttagaaccataggtctcctgcttgcgacattcgagacctctgagatgaagcatatatattaagcatatgcagcttagaagttaaagtcttaaaagagtacggtttcttttatcaagagcattagtaagcagtcagtctggagtaagatttcgagagatgagatcagggagttcctgacaaagctttcagacaagctttagttgcatacttatgtttagctatgtcaaataactttttattgttgcaattctccaccggatacagttcctcctataatgcaatgcttcatagtcctaattcaatttgatactaaattttagcttttcaggaagcttgtgggactatttattgatgggccggcaaaacaatacttagcttccatagtccacacttgataaagtttacaatactcttaataattgcacttgctgtgatgtgccgtagagttcctggttcttacttatttgtttttttccccccgtttagtgtgcatttttgtaaatagaagattaaggatactatgcttcccagcagagtgttggagagattttgtacatacagagaactccaacacactaaataagtttacccaagtaatcattaaatattattataacttcccaatatgctgaagtgcaggatatttgggactcaatacagaataatgaatatttttcttttgaaggactgggggatgtcttcaagcaggtcatttgtcatgactctacatttttcttataatttgtcaaacaaatgtttgagctagatcttttgattctgcacagctacggatttacaagacccctgatatagaaacaccaaagtaccttatcctgaaaaggacggcaaactatgaggtattaactttaggaattcattttatatctgttctgaagtaacagcactgccatattctcatgatccatgcttcatatgaattaaccatactgataagtatccgaattattttacttgatttttgccagtgtataatctttgctaatgtgatctctatagtagtcagaactcagaacatctaatttatagctgttacttctctgcagaatgtttaagatgaaatcatgaacataaattcttttttgcagattaggagttatccaccattcttaatagttgaagcaaaaggagataaactaaccggatcatcaggttttaataatgtaactgggtgagttatttttctgttacagtagatatttaaccctgtaatcctagtactgattacttataagcgcttgtaaatgtaggtatatttttggcaagaatgcttcttcagaaacgattgcaatgactacacctgtcttcactcaggcttctgatgacaaactctcagatgtatccatccagatagttttgccgatgaacaaagacttggacaggtctatcttgtgcaatgcaggatttcagttactgacagtgcggtttaaagcattgattttggacagctgtgcaaaattaaactaaaagtagtcttatggatttatttctattactaatagtagtaatcttgttcaatcagcttaccagctccaaacacggaagctgtcaacttgcgaaaggtagaaggtggcattgctgcagtgaaaaaattcagtgggagaccaaaagaggaaattgtgatccagaaagaaaaggagctgcgctcccaattactcaaagatgtgttgaagcctcaacatggttgtttgcttgcacgctacaatgatcctagaacacagagctttataatggtatgtttccttttgggctgtcccttattgtttaagctgacatgtgatttttttgatgtacttcactataatgatcctaagactaactaatgaggtttattttatgattaagtgttggaaagttgatattttatcatcatgcttcctttcccaaaattccagttcattcttttttcagttttacatttccagttcctttttttcagttttacattcattgttatcttttttaattcggaaactctcttatgttcttccttatcaaaagaggaatgaggtgctgatatggttaaacgacttcacgctggagtagtagtcttcactgtctacaacacatttctgcaacatatagacacttagcattggagctttcggagcatcatagcaaggtaaagtaattgttcataaagcattttgcgtggtttggtagtattttaaagctgcatgttatttcctctaaaaaagctttgtattctacatgtaaaaaaaatgtagaaacaatttatgtatctaaatgtatcgtgcaacttagttattcccatagatccgtcatgccttttgtcatccatgttttaattttttgcattatgctcatttagcttttgcattatgcaggtgaaaaaaattaggaagatgcatggatgaaatgataggagaatgtaaataccgaaaaggtcactatattacatggtaattctagtccatatgaaaaatgtttgtgtataacaaaagtgaaatgaacaaaatgaaactgtttagaacaaaaggaataacccccacctagccaccctcattcccagtgacatgcctggctgtaacacgtctcttctgtctttcttcctcttccccacatctccaagtaacataagatgataagaacatacagaataggccagggtttgaagatccgtcagttaagatccttactaggattctttcatgtcacaccaagtgaccaaacaacacatcttaaagcattgcctccaactttgacccccccccctttttttttgcggggacaactttgacaccctttgttggaacaaccggttacttcagaccacttgggttagtgttgagttggagtacttcgaactatctatggagtattaggagttaaaatttggatattcgtagacgaagaataaccaaccctgtcttcccattctgttcagtaatagaataaaaaatgacaagagccttattttccctaaaatccctgaaaaaaagaagaaattctacctctttctataagatttaatgaaaattgagaaatcttttaataaaattgctattgat

SEQ ID NO: 4831 - DNA, 40847 bp, Oryza sativa
atttgaaactaaaatataaaattacagtcctatataactaaaattacatatgtaaatttagttgacatgacatgtaagtgcactgtaattttgataaaaatgttatgtaagtaaatttgtattagttattttatttaaaatataaaattacagtcctatataactaaaattacatatgtaaatttagttgatgacatgtaagtgtactgtaattttgataaaaatattgtgtaagtaaatttgtattagttattttatttcaaatataaaattacaatcctatataactaaaattacacatgtaaatttagttaatatgatatgtaagtgcactgtaattttaataaaaatattgtgtaagtaaatttgtattagttattttatttcaaatataaaattacagtcctatataactaaaattacatatgtaaatttagttgatatgatatgtaagtgcattgtaattttgataaaaatattgtgtaagtaaatttatattagtcattttattttatagtccgttggatgcaaatccaaagaaagaaaaaatctaggtgattttttatcatccgagtgatgcataggcggttccgtagcaaaatcgtgttgctacacttgctaaaatttattcgttgacttccacacgagacataaaatgaacatatttttcagctcattgtgatttttgcagctcaggttctaattaattacctcgtaagattacttcctccgtttcatacatacatacatacatacatatataaatatatatatatatatatatatatatatatatatatatatatatatatatatatatatatatatatatatgggcaatgctagaaagtcttataacctgaaactaaactagtaattaatttgtacattatttcttcactttatccagggttcaatctattgaaaaagaggaaaatgtttgagggccagcaaaattacgaaatttccgaaatatttcaaaatcgaccaaaagcagagtttgaattcaaacaacaaaaatgagaaaatttgccctagagacatgccatttctgggtgtgttcggatctcccagctcccaactccttcttttgttttctacgcgcacacagttaaacgttgtgtttttttaaaaaagtcgaaagttgcttaaaaaatcatattaatctatttttttaaaaaaatagttaatactacctccgttccaaaataagtgcagccgtggatattcgtgcccaacgtttgaccgtccgtcttatttgaaaaatttataaaaaatttaaaaatatttagtcacacataaagtactattcatgttttatcatctaatagcaataaaaatacaaatcataaaaaatttacaaataagacgaacggtcaaacattgaacataaatagtgtaaaactgtacttattttgggacggaaggagtacttaataatcacacgataataaaccgctccgttttccgtgtggagggattgaggtcccaaccgcctcttacgaacgcacgtcactacgacgaggacaaccgaggacgtgagacctcattgcccctgacgtccagatatcgaaagggccactgccgtcgacattacctgagatttgccatcgtcgacatcgccagagaggctgctccgccattgcgcaccaccgacaagtcgttgcgcctgcgttggagagtccgctccgccgctgtttgtagccaccgccgagaattgtggcgagccacctttggtgccgggaagctgtcgcgtcgctaggatcgaggcatacggactgttttgatcttagaactagggcctaaacgcgtggttacatgggatatacggacacatatttaaagtattaaacgtagactagctaataacaaaacaaattacagattctacctggaaactgcgagacgattttattaagcctaattaatacatcgttagcaaatatttactgtagcaccatattgtcaaatcatagagcaattaggcttaaaagattcatctcgcaatttacacgcaatccgtgtaattagtttttttctatatttaatactctatgcctgtgtcaaatattcgatgtgacaggatgaaaaatttttatttgaaaactaaacaagcccttatacggaccgaccaagttgttataacgaagtgcaaaatttgcaaattggtgtaccaatttacacccgccatacaagtttgtatagcgtgaaagcaaattacttttatctctgttagggataaaaacggagtggatatggacggataatgctcatataatattcgtttttatatttaccgtatacggaaacaaatacagatagcttgaatacggaataagaatcaaatatgaccagacatgaatacgaaaacaattttttctcagaacacgaaaaccaacttaacttctaataaaaataaatatcaacgtacaacctccaaatttaaatatatgacgccgttgactttttgttcaacgtttgaccattcgtcttattcaaaaaatttatgtaattatcatttattttattgtggattgattcgtcatcaaatattctttaagcatgacataaatattttgatatttgcacaaaaatttgaataaaacgaatggtcaaacgttggtcgaaaagtcaacggcgtcatacattaaaatacggatggagtatataattagctcactttatattaaatgtagtataatttataaatatttttaaaaatttaaataatattaatagtgtggactagtgttaagagataaaccactattaaaatctaaaaatgtattttaaaggtcatagagttataaagaaacggggtatgtctcatggcttctgcggatatccgaatagtaatgttcaccgaattattatccgtatccgatggaaactccgatgccatattcgtatctgtatccgaattatccgatccgaaaggtatccgtattcgtttttccccggagcggacagaaactatccgctccgttttcatccctaatctctgtacacaagctccatagatctgctggtagcagtccacaaatctgctgccgtacatgggcattaggcctcaatgagctagagggaacattcagcccattttcttcgtaagaatgagccaagcttgatttgctgacatgcttctatgttacggagtaacttataaccagcatatacttttatgatgacaacattacttatagctagcgacataatgaccattattattcgtaaattatttttttgatttaatttgatgaaaggggactgtgcggttgatgctaaaatatgggaggtggcaacaagtgtacatataaattaatgaggatatttatcccactattactaaatggatttttcctaacagccttgtgttttctacggtggccagcgctgccgtcaatgatcaataaccaatgaaaatgcaccattttcactagcaggtaaccttgcctagccgccagcggaaatggttttcgcaaggagctaggttaagctggccatctatggaagtttgactttttacaggtccaccaacatagatgaattttggtaataaaataaaaataccatatgcatgcagctacccatttccacataacaaacaaaaaatacaaatcaaatcgtttacattgtcactacatcaaatggatctgcaaaagggaagaacaaacacataaaaattcaccacttcaaccctagctcccaagcatagcccccttcaatttacaagaaccctagacagccaccgtggacgagccgccaccagagccaccccctctactatagccgcgaccaccacccctgattttggagaggagaggggaggggagtgggaagccgttgccagtgccccctcttttgcttctgccatcaccagtctcctcccatcccaccatcggatccgcctcccatcgctgtcgccgagagcacctcgaggctagagggagccactgttgccaagagcatgcacctggaggctggatctgggacgagaggggattgtaaagctgccgctgtcgctccctgtattgatgctaccgccgccgccggcctcctcccatcctgccatcggatctgggagaggggagggcagggtcaccgccgctgctccctctgttgcgccaccgccggccattggcctcctcccatcccgccaccggatccgcctcccatcgccagcgctgtcgttgacgcggtcgccgttgccatcaccgtcgcacctcaaggcgggagggatcaatgactaagatgaggaggagttgagaagatatatctggctgagaggtatggggagaagtcgctatttaatactacctccgtttcatattataagtcttttttactttgtttctagttaaacttttttaagcttgaccaagaatagaaaaatatagcaacattttgaacataaaccaaacgtattgtcaaaatatattaaatattagttttaatgaaactaatttggtattatatgttgctaatttttttaaaaaataaacttgatcaaacttaaaagaagtttgactattaaaaaaatcaaaacgacttataatatgaaacggagggagtatggtgatttttttaggcagtcctctttaacagtcgccaacgaaaaatcaattttcactgcaaggggacctcttaaatgaaagtgatttttgcctgtagttcgtgaccggaaaccctctgatatatatccgccggtaaaagtaaaagtgtggtgtcttaaacaatggccttttatagtgtcctttcacaaacaataacttttttttattccccaaccaaataataacaatggcaataacaattttattaataacctgtagaaacgaatatgtgaatgctggtcaaatagtgcttttattctcctaacatgaacctattatataagaatacaattactcaatgatagtatggttgctagatctccttaattagtccttgccctaattattttgctcgcagcatcttgcttggatatatacttggactgagcatgtgtacaagaatctaataacggccggtactctgtattttagtatggggattaccgattatatatttgtgatatactttagatctcggcaggcagagatcgatgtgcttataatataaatttagccccatgttccattgtctgttgtgcatgtgagacaagagatggttagcagtagaaaagaacacaaggatactttctctaatgcagaatcagcaaacaatcatttcttggatgctaacagaactttgcatacatgcatggagaaatctcttccaagctccattatatatatattgatccaagttctaactgacaattccctcttattagtttctgttgtaatgagaataagtatatcaaaatatcatggcctcctggaaattaaaagaaaaaaaaattaaaacaggggtaccataatgttgcaagagctaaattctacattaataaatgaggcatcttaatttgattggtgactaattaggacgtttgtttgcaacatactccctccgtcccaaaataaatcaactcctgtaattcgaactttgtcctaaaataaatcaacttctacctttctcatccactcttggttagcaaatcgaaaaattttattccttcaataccacttatctacctatcgaccaatactaatatgctattaataagggatattttggttatttatctacctctttaattttatattgggaagttaggagttgcttttttattggacagagggagtatactaatatgtttgattggttatgcctagctagcagcaggctagatatagatactagctagtagtacctactgaataactaccaaaggcatgtttagttcgcgaaaagaaaatttttagatgttatatcgaacgtttaaccagatattagaaggggtttttagacacgaatggaaaaattaatttcataactcgcctggaaaccgtgagacgaatcttttgagcctaattaatccgtcattagcacatataggttactgtagcaattatgactaattatggactaattagtctcaaaagattcgtctaacgatttcccctctaattgtgcaattaagtttttatttttatctatatttaatgctccatgtatgaatctaaagattcgatatgatgtttttgggaaaaacttgttggaaactaaacggagcctaatcattgtgcacatcgcataatatcactacatgatcgatactccggaatagtagtaagattattctttgttgccacaggaattaagttgagacctatagttagctcacaagatatgatcgattgacagggtacagttataacgacaaccggtagcttgcctgttgttaattggaggtttgttaagggaagaggtcctattctcgcaacccgtattattgatcacagcaaaaaaaaaagaaaaaaaagaagaagaagtacatattgtcatgcactaatgccgcagattcgcatgtccctagagtgcctatcattatttctggtgttatatggagtatatatgctaacaacactattgctatcattgacagcccccatcagtatgatcgaggagggtgtgtgatcagtgatcacactaacaaacaattttatgtgatgtattatctcaaacatgtacacctaactctcaaggcattcctgtgctatatagcttgaacatacaccaaattatatgcatgcatgctacaattcgaagacaaccaacaaaaagaaattatcatgtattcatgtgtaaagcgcgctagctatagctttatatctttgaatccatctatctcacacctaaaaacacatgatgactacatgatagtagaagagaagaaacaatagagcgtcgaggaaaccaaatatcactttccttggcacttaaattaattaactagctactttcctacttgcttaattaattagtagcaggtacaataggaggctataagccagctataaacatattttaaagagataaaggaagagagagaatagtaacgggctacagatctgtagtcaactgcagcatagactccaagacgtaatgtgtgtatgacaagtgggaccagataatagtatagtgagtaactattgtatgaattgactattacattggttataaatgatttagagttagcagtgggctatacaattaaatttgctctaagcgacgttaattagaaatcagaacgtcagggtcgacgtcgtacgtcgtggttttacccgacaagcatatcgataagcatctgcgtaatctgctaaagtaatggggaggcagaggctccgaatgatgcttagctacgctttcggccaaaaacgctgcgctttggccttagtttattgccggtcaaatctccccatgatcccctaaacccatcctcgatctcctccattatcgtcttcttgcccacacacgcagcagcttaattagtttataatctctctttcttctgttaatcttctattagggttttgagagagatcgagcagtgattcatgcatcggacatttcctcgtgcccactatctagggtttccgcgcaggcagtactacactatagctagctatgtatagcgctagcctttgccggaatgccattgattggctggatgggctggatgtgttggaagaagcttcaaaggttttaaaaaatggtgaggcctacaggggttagggtttgattgatttcgtgggaagattccaacagaaaggtgcatgatcatggacgtttttcaggaatggggcttctcatttgtgtgaaacttaacattacacacatcagaacttcataagtgcatgcattgccatcaatatatatactatcaatcagtgcgttaacacacggtgcatttcgcatctacagcggtaatgcacaataaatcatgtgctcatcgatgagttgtaacttgtaactagagctactagcaatcttgcagttcttcaacatcttgacatcttgtacggttgtaccatggggttatacagcaaattaatggatcggatgggcaatgaaaaggaaaggtagctagtagctaggagaaggagatcataaccagcatgggggttgtcagcgacggcgtgatgattgctccggccgccggcgactcgccggtcgccgtcgccggtgaaggaaggagaggacgaaagggagaggcatcatcgatcggggttgggttgtcgtcaaaaggcgagcaaagagggacagcgcgccgacatgccaactgccccccaaccccgcgtcctcccgcaccacgccgcgacccgccgggtgcctacctctagtgacagacaagtggggcccacgtgatggtgcgggtcacttgtcagtgggtgggggattgaggtggcaggggagcgctgggtaggggatctcgtcgtcgatccctgtcctttgtcttctcttgtactgcagccttgtttgttcctgggttttccgttgtaccccctctgagtttctgtatttgcaatttcatatatgggtgtgtttagtacgtacaaaaattggaagtttggttgaaattagaacgatgtgacggaaaattaaaagtttgtgtgtgtagaaaaattttgatgtgatgaaaaaattgaaagttagaaaaaaaatttggaactaaactcggcctatatatacaagcagcatgatttgatttgattattatagttgtagtaatgtttatgcagtgtcatgcaccaatgcattgcccatctctagctcgaatggttaggcaaaatggctcaggtagtacttaaccgtcacactatttataatgcaaatgtttgattttttttttcaatcatacatatagaaaattaattgaaaatgaatacacgagaaatctatcggtataattttaaataaaatacttacatagtgatttaagattgtaaaacttgactacactactggttgaaccattactacatgagtaattaagtattaattattttaatcgtaaaaatagattaatatgatttttaaacaactctattatagaaacattttttataaaaaaatacagtgttctgcggctcgaaatgtgagcacgcaaaaaatgggaattctctcacatacgttgctcactaagatggtgtttgaaactggtgaagatgaagattaagttagcgcacgtaaaacgagaaaatcattagcacacgactaattaatttttaattattacaaacttgacaaatgtatatatttgatattttaaaacaacttctatatagaaagttttcgcacgaaacacactgtttatttatagtttaaaaaacatgctaacggaaaccatggtaaattctgaatcttttacgctgaccactgatgtagagagctgacaaaatttttaagcagcaagcactctgtcttagggcctgtttagttcccaaacaaaaattttcacgctgtcacattaaatgtttggacacatatatggagtattaaatgtagacaaaaaataattacatggttcgttaggaaattacgagatgaatcttttaagcctaattacgccatgatttgacaatatggtgctacagtaaacatttgctaatgacggattaattaggcttaataaattcgtctcgcagtttcctggcaggatctgtaatttgttttgttattagactatggctatgtttagttcccttcaaacttccaatttttccgtcacatcaaatgtttggatatatgcatggagcattaaatgtggacgaaaaaaacaattgtacagtttgcatgtaaattacgagacgaatcttttgagcttaattacgccatgatttgacaatgtggtgctacagtaaatatttgttaatgatggattaattagacttaatagattcgtctcgcagtttacaggcgaaatttgtactttgttttgttattagtttacgtttaatacttcaaatgtgtgtctgtatacgtcaattttttttaccaaaacaactaaacatggcctatgtttaatacttcaaatgtgtattcatatgtccaatgtgtcatgtagggattttttttttttttgccaaaatatgtttggttttatgggacgaaaggagtactgtggaattctccgcacccacgaggaccttaaaccaaaaaccgtccacacgcgcgcggcgcgcgccgaaccgaggacgaggcagcacagcaggtagcgcgcggtgggccccacccccaccccccgaccgcgcgcatctttataggcagcatccgcgcggccaccaccacccaccaccacaccccttgtctccgcaaactcgacgcgccactcgacagcgaccccgcagccgatccatcccgccgccgaagcagcagcaaccgccacggtgcgccgccgccgccggtaccgatgtcgacgagctccggcgccgactcgtccccgcccgtctcgggcctcgactacgacgacaccgccctcaccctcgccctccccggctcctcctcctcctcctcctccaccgccgaccccgaacgcaagcgcgccgcccacgccgaccacgccgacgccaagccgccttccccaaagtacgtatagcttatgctctctttatggagattcctacgttcccgcgggtttctgacctggcgatcgatcgatgcgtgtgcgcagggcgcggccggtggggtggccgccggtgagggcgtacaggcggaacgcgctgcgggaggactccgcgagggcgaagctggtcaaggtggccgtggacggcgcgccgtacctgcgcaaggtggacctcgcggcgcacgccggctacgcgcccctcctccgcgcgctccacggcatgttcgcctcctgcctcgccgtccgcggcggcggcggcggcgacggcgagggtacaaagctcgtcgacttggtcaccggcgccgagtacgtgcccacctacgaggacaaggacggcgactggatgctcgtcggcgacgtcccctggaagtaagcaacgcgtgtacacatctcaatcagttcttgccgattaattcaccgaaatcaaatgcaaaatctgatccgatcaatcaacacaggatgttcgtcgagtcctgcaagcggatccgtctcatgaagagctccgaggccgtcaacttatgtaagaacttgcgatccaatccactataataatccaataacattacattaccaactatactaattactgcaacgatcgatgagtgaatgacatttcgattctgaattttttgatgcagcgccaagacgatcatccagataatcgatcctaccacacgcaacgatgcaatgccgcaattgatctgtctgtctgtctgtctgtctgaattagttcgtctgaaagtgtgtgcaatggaagaggcttggctgtacaggtcctccatgcatatgtacctataccgtagtaggatcagtgatcgatgagccaaattggtgtgtgtactgtacaggccacaagaacgaaaatatcctctctctttaattcaggtgtgctccctgctgccggatcacggccggcccggtttggtttttggacgacggcggcgaggatcgatccaagggaggcgccgccacgccgccgcggcggtgtactttaattttcaagttgtcagctactttctgtaatttgtttcatgatggttcggtttcctgtgacagccagcacttttgttgtatgtcaaatgcaatgtatacatgatataccggttgttatcgttgttgttgctgttgttgactttgttctgtccattgatgcattgcaaggtcaaatataggagcacaataatctgtcatttctgtcaggcttttgatgtctccttttgcccatttctttcgatttggtggtgctgaatgttgttcttttggttggaaaattgcgagcttggttaggtagatggtggtgattgcggctgtggaaatcattggcagtgggaataaccaatccatttttgcgcatggacaaattcatccactgaagagagccagtgcagaatctgaacccaaaaagggaacaatccacgaatgcacgaactgatcattgaactaggcagctagcggttgcagtccataaccagcattttctcacggctgggaagaaatctactgcctctctaatctgaaatactggcctgttcacgtgaattgtgatctgttgatgcatgataatctgtggcccgatcaggccgcctgcaaattcagtttctgcacatattagttgatgctcaatcgctacaacgagtactgttgggttaaatctattgatgatgacggtattttatataggtccgacacagataactgctatcggtgacggtatctgacctgacacagataacttttcacatcactgaccaataatacgtgacgtagcctccctccgacacagatgatggttcctgcctcacacatatgtcctgttttgcactaatgagtgtacacagaatactgtataccaaattcaggtagtccacacactaccgcatagacaaccccattctgagcatgtttacacttgcggttgcccaaatatacatgtcagtactagcagtgacatcctgacagcatgtcagaccgcttgctctgcatgttactgtagttaaggaatcaaacttgcgatgcagcatatgcggaagtaaaattgccctggacggcaggacccctgtggtgatgatacatgcgctaagtatgtgtgcccatagtagatggtgtacaagaacccgtactgtttgggttatctgctgtcagttgagttggagaaattggatagataatacagcacgcgtgcatcccagagatgtggatgtgttaaaagaaaaaaaaactcgaagcttggctcgtcctagatggattcgagccacaaacgagtcaagctcaagcccaaactaaagctcgcgagctttgctgagacaagctcaaagtttataacgagctggcccaacctcatatatgctgtagataatagcccaccatagaaattaggaagcacactagcctaaggagaggaagaggcacacattcctgaaaaaatttccgtcgatttggcttccttccgtgtgatcactcatagctgttcgcctcatcgcctattccgtcgcccttccagccgcgttgtcttgttccgatggtgcgacctaacctacgcagcgtagctacgtctacgactgcgagccagagatacctatgcgcggctacgcgtcgacgacgtcgtgctctgcggcagccagcagccgattgcaagtctctccgtttagttccgggaggtatctaatttagaagaaattattagatgaaattgatattgatgccatagtgaatatgacttcgcatcagtaaacgttagaagaaaattttaaggtaagatatataactcatttaataagaattgtttttatgcattacatttattagaaatatcgttatattattatggttgtattaaaggaccttttttctagatttgctccagaccactaaattgaaatgaccgggcctggtaaacccaacgagttcaaatgaaactaaggatgatttacaaaatttaccagtgctatttgtgatttagcggaacgtgctaccggaactcccatcacgtgcaccctgatccctcgcagcactcacagctcgacacgtgtcccgcatcacgtgtcctccgcccgtccactgctttgcgccgacccagcaaaacagcgtgagacccgcacaccggatcacgcggcccacaaaaactaaccaccacatcctaatccagattagagagcgcgattagtctaaaccgcataataatttacagaaatgcccctcacctcccctttttattttattttttttctattttttttccgcagccacctccccttctcctctcttatcgcaccacgcgcactgttcacactccacagtatgttcgctgcgacgacgcagctccaaatcggaaccctaaccctagtagtcctcctcctcccgcgctcgatccgaggtcgtcatcccgctgattccgaggctctctactgcggcggcggcggcgatggaagagcataggcttggcggcggcggcggcggaggcggaggcggggggaggccgccgatcccgggggcggcggggaggaagcttccggggctctcgcggcacgcctcgttcgtgagtaacccccgccctaatcttagctctttctcggcgttgtaaacttggttttggtgtggtttggttgggtgcttgctctgttcttcgctgggaaggcggcgaggtgtgatatatatatattttttttttggctgtggaggatttggggataatgtcggcatgatgtgatgggcgatggagtctaattcggggatgaggggagtgaggagaaggaatcttgggctctgaaattgccggtacatccttgttgtacttgggtagtacaccaacctggggcgagatgtttggatccgtgcggtttatgtggaagcagcgtattgggaaacattgccttgggttgtatgaaatggttggttttatcaaactgtacacagagtgtcctagaatgttttgcataaactatgttagtgctttgtactatcagtgtattttggcggcctgtattcttttttgcagaatttggtggtgaatttgatgttttaactttgctaactcattaggtatttcttccttgaaaaattgaggcaacaatttttcagggcactgtaaaagtgaggggaaaggggatcagactggtaattttctgtatgtgtcatgaaagtgtcttaattcttttggtactttttgctcttgtcctgactacatggacccataacatcattgaaaagaaataaattgaaaggtacttcgatgtctctgctcaacagtaattgcccatttaagttgtccacagtcaaaaacagcaaagctgttctaaatgatattctgtactccttccagtttcaaaattcttgaccttttagacataatctcacataccaaggagtgatttattagggtgcctaatccttgttttgcccatattaaatacggtcttgtcctaatagaaatcagaaactcgtgctgttccaagtggtttgggcctatcattagcgtctgtgcatgccgggttcgagttctattgaggctattttttttaaaaaaaaatcatagcgttatcttggtaatttttggctcgctcgcgcttgctttagcacacaacggttgctacatcatcactgtcatcacacccgctctcaacgagcaagcggtcgccgagagcacggcgccagcaagcagcccaagaagccaacaagcgattaattaggagatgagacaacggcccgcgtgtgatgtttaatgacatacacgacgctagaaacaatgcgttggatttttatgcatgcatgcaggagcaagcaggtccaagatactttgcttcaagatctaaaacgtcaactattttgatactggagggagtaaggggttggcaaaagtggtaattgacttgatatcattgccttgctgattttggtttcaatctcgtcattctttccggtattgtttagattataacagtggatcctttagatctacactgcacattgttttttcaatagaagctagatatggtgatacacatagtatgcttccataacaaaatatatgcacttgcctgtccatttgtagttatgtacttgtctgacactgcatgttgcttggtaatttctagtagatcacattatttgagcaaggagggaaccattataatgtcacacttaattcacatgggaggggacaagaatagttgtttcatagttacaactaattgcaccgcttttgggcatgtggtagggcaaacttaactatagttagtatttgctataaaaattttctcttcaatccttgcaattaaatcattttaattgggcatccacggacgagcctaggcagccattgggccatggatcagccagtgagtatgagtgatattcactttcggaagaaccgaatgtattccctctgtcccaaattataatagatatattttttacacaatctttaataacatactttgatcattaatttatttcatattatgtcatcaacaactataaaattattatcacatgaaaatgttttaaaatatgaatctaatgatataacatacataatacttggtgtagatattgttagtgtaattattagtcaaaagttaccgagtttgatttttctaaaaataagagtgctctacaatttgggacagagggagtatatgacagtgcaatttttgtttttgccttttgttggatcaacattgttaatatatgtatgagataatctggaaaccctttttgggtcatggtagtgcaacttcaaaatgaaagagcatacaacatagattctgtgcagtatggttaattatttttttgtcatgcttggcattggttttgcaggtgaggagtcctgcaaacagtacaaaatctggaactgagaaaacttttgaaaacatggatgctgttgcatatatgcctgttgtaaggtctggaggttgggctgatattgggtcaaggcacacaatggaggatgtctttatttgttctgataacctcatgaaagagtttggagttgaaagttttgaagatggtccgagcgcattttatggggtatgcttttattctactgtattcaaggcccagacttgtttcttgatgtatgcgatatatgttagccatttcatgactagactaacaataacaactttcctttatgagtaatttcatgcccctggcaggcattttatttatatatacccttcatatgattttaatgtcttaggtttttgatgggcatggtggaaagcacgctgctgactttgtgtgcagcaatttggcaaggtttatcgttgaggatgaggattttccaagggagatagagaaagctctgtcctcagcgttcttacagactgatgctgctttcgcagatgcttgttctgtgaactcctctcttgcttctggcacaactgctcttgctgctcttgtggttgggaggtattggcctaacttcttaaactgtaaagtgttgtactgactactgagttcctggcagcatatctgtttaactactatttgatgattgtcattacttattaatggtaggagccattccccacccccaccctgttatggccatgcagttcctgtttcgttgcctgtggccttgtgcaaattataagtcttcagtgcactcaattgtgcatgaacagacaggggcttcaaaacttatttctctcatgaatagacagcattgattcttgatctttgtttctttgcaatcgtgtgaagtgcatctatagcctttctattttgactatcttgtcggccacggttaatatcagcgtgctttagcctattgcatgctacagtattctctttcatgaaagcaattatatagtataaattttggtacccaaaaatgggactgtgtgcccccttttatagtccattatgtagttctcctttctgtctatttcagtctctgctttctgtcttgctatgatctctgagagaattatgcttccacttgggataaccaactttcttgtcttaaccgttttgccatttttcataggtcacttctggtagcaaatgctggtgattgtagagcagtactttgttgtcgtggaaaagccattgaaatgtccagggatcacaagccttcttgcaacagagagaaggttcgcattgaagcctctggtggttatgtttatgatggctacctgaatgggcagcttaatgttgcgcgggcaataggagactggcacatggaaggaatgaaggcatgtgatggtcttggacctcttagtgctgagcctgaggtgatgatcaggaatctcactgaggaggatgaattcctcatcatcggttgtgatgggatctgggacgtattccgcagccaaaatgcggtagactttgcacgccgaaagctccaggagcacaatgatcctgttacctgttgtaaagaacttgttgatgaggccatcaagaggaagagcggcgacaacctttctgttgttgtcatctgcttcaactctcggccgcctcctgtcctaacaactccaaggcctcgtgtacagaggagtatatctgcagaaggcctgagggagttgcaaagctttcttgatagcttggctgattgacatgaggcttcttccttgatagaagcctgacatactgtcgctagtgtacttccattgcttagcatggaatttttaggtttagtgcggctattccaaggcttaatgccagctatctcacaaattctctgagatagcagctgttgagtgattctggtgttgtaatgtattatgcggctaattctatctgcagtttaagtatttattggttcagggatatgctgtcttaaagagtctggaattatcagggaacatttctaagatatctgaaatggcgagtgatgttgtctattgactgtattgcaaattttgacatactatgggaacaaatgcatgtttatttactgtggttggagcacagtgattctgtagtgtctgcagtgtggtgctctgaacttgtatggtcagtcttgcacttgggtaagatcagttacacagtgactgtgccagaagaaactctagctccacagtccacactacagtcaatgtgacctcagatggttccaacagcatgttttttagtatgttctccccatgacatcaggtgcagtagaagctgaagctctgcatgtgcactctgccatccctgcttctgaatctgaagacggagaccagcaacgatgaggaggtgatgtcgaagacgtgcgaatccatctactactcccatcagcagctgttgtcggatgatgaagcctctcgccattatgaacgctctagccatcagcaatctgatcctgatatcactacctctgaaactggagtagtaggagaaaagaaaagctggagaacaaccaatcaatcattcatgtgtcctgcgatggaaatccagatcggcgaatggctctctgaagattgtttttcgattcagattttttttattgaactatacggagatcagtgatcaatccctctagcttcgctgaaacgaatccacctactctctctctctctctctctctctctctctctctatatatatatatatatatatatagcgataaatcactagtcacgctaaaatgaaatgaatacactcctaaaacatgctcaaagagactatggacaaaggataaatcctgatctcgctacgctagtgcatacataattttcgtgaacatcagaatttatattctaatagatagaattatgcaccgccacatcatctgtgcttcctgcttctctctgaatattagtggcatactggcatcgtaggatcaatcaggctctacccactccctcgctttatcgtgagaacttgcagcttttgctggcccataatcgcaaagagatcgatgctggcccattgcaaatggcagccggggcccctgcctcagtcactcagggcctaggtcactctacttcggctacagttggatgatctgttctctctttttacctttggagatttattatggtgttggtgtgggtcactgggtgctctgacactccaacatctatgctccatgttgggacatttcactttgtcctgtagctctagctagtaactaatctagatttgtagcttgtttccccgaaaaaaaagaaaaatgtagcttgtttaggacttccctaaagaacatcaagcaccctcaaaatgtgttttgagatttaggtaaaaaatggtagggttacattgggttcatgtcatctaagtaaattaaccatattcagatgctaagggctagtttggttctctacctaccaattcactaccaattcattggtagtgtaaaaacccatgtaaattttggcactatcaattactcctagttggagggtagaattctcaatttgtttggatttagattgctaccaaaaatgccaaatctaactagagtataaaagaaggtttggattgctaccaaactgagcttgggtatagccaacgatttggctccaattcaaacgtacatgattactattcaagctatcaaatgctactatttggtagggcaacaaaccaaaatgaccccaagtttgccttttaccaccgtcacccactcctctcacctgaggttatgtttgaaacacagtaattttgtacacaacaatctgattatgttagaaccgcaaccaagtgtttgcaattttgataatttcgctccccaccggcaagcacatatcgtgcctgaaatttccgttttttttctatttttttgtgaatttggtcaaagtttattcaaattcattcaaaatctattatatactaaaagtccattaaacttcctacaaacgctctcaagttgccacgtggcgctctaataaattagagaaaatcctagaaattctaagaaaaaagcaaaacatctacccttgattttcacttaaattagtgggtccaatattatacaccgttagataaaattgatcttaaaacaaaccaaataatatgggtcccacctctcctttttctcccgcgtgcataggtataggtcacgtacgtacatgcatgtggacctgttgttcgtacgcctccctccatttttttcctttttttcttcttttttccatttatacaatttgatatatatttgtttaaataataataatttagaaaaaaagaaaataccatcatataactctttataaacacaggtaactaaattagctatgcagactttgaaaataaaatttacaccatattatatgttaattagctctaaaatcaataatgtaagataatttactaaatactattattttcatataatgcactattttaaaataaagcttacacaatattatattgtgtacctatcaaataaacaatttaagatctatattaactaatatatacatgtacttaaacagatagacccattatttaaatcatcggatctattttttattactttggattattattctcaaataattcagtgttttaaaataaaatctacaccatcaccataatgttgtgtacccattaaattaacaatttaatatatatatatatatatatatatatatatatatatatatatatatacacacatatatattaactaagttacatttacactaaaaccggtggacccattatttaaatcatcggatctattgttaataatgtctaaagttctctttttggcccactccacaatgcacatctgcacctttgcctttcgcacatgtgacagagtgtcgtgtttgaggcatcttgggtgatcacgaccgctgcagtgctaccgttgttattaatagcatgaaaataaaattaaagatgtgatgtagcgagagaagaattaagtaccgtggaacacttaactctgtttaagctgaaatcgagagttgattaaataataattataatgtattgtgttatgttgtatttgcattttgtattatttgttcgtacagttgaaagaaatcattatgttataattgtgagcacaatattaacgaatatcaacagaactcttactaggataagagtgttataagggagtttaaggccctattttttccctgattccatcttttgaattttcgtttgcacgctccatgctttcaaagttactaaatggtgcttttcttaaacaactttttaacttttcagaagtcaattcattcgtttataatctcaaatagctatcacataaatcagataattcatcaatttcagttgtcatatcccctaaagtacatatttttttcatgcgagtcatggtgataagtaaattggtgatcaacgcataatcaaagtcataagataaatctgttagaacaactatgaccaattgtaaataggtgtcaaaattaattgctattaattaaacaactaatggcttgctagcaacatatttaatttttctctacatgtatataaacatggacgaagctaaaacgaatatgaacatacatcccatacatatatatattacatcttaatattctaattacatgtggtaagtccactaaaatttcttaaaatgccctcaagatgtcacgtggtgctctaataaattagagaaaatattagaaattctaagaaaaaaagcaaagtatctattacttgattttcacttgaatcgatgggtccaatattataaaccattagattaaattgatcttagaacaaactaaatactacgaggtcccacctctccacctttggtacgcacctacgtacgtgggtacctacgcttccccacccttttttttttatttttccctttcttctttttctccatgaatatgcttccctccctttcttactatatcatgcaccttcacgagacgatttaatctatttacttaagaaaaaaatatgattcaaaagtcgtaagtacttaatccatctcccactcaaaagcttgcgaatggacttttaagataccttaacaaaaaaaatagaacccttaaattattacaaaataacagtatccgaactttagtttgcccttaatctatgtgataatttttttaacaaacaataaaaatcttacctttcaataatatatgtgcccgcgcatacgcgctggccaccttcctagttcataaaaaaaattaaaaagaaccgaccaaaaataccgaaaattctgaaatttaggttcttttagcccccaccggcaaaaacctttgtttcaaaattgcaaaccctgccggaagctccccgttctaaaaaagatataagtttaaaccttaaagtaaggcgtgtgagaagcacaactctcattaccacctactcccttccctccgtaccataaaaaatcaacttatggagatgaacctagacaaatatttgtccaaattcatccttagaagttatctttttttggatggagggtgtatatgatttgcgtattcacggactaaccacgaaactttgaacggcgaaattgatatttctctcttctcaatcattgatctacactatggctagatgccacaccacaagctcttgagtgaacaccaagcattgacattttcccttgttgcaccatatgtgggactcaagtcactcaactccaagggacccatctccaccactaaaaactgccaactcccctgcatgacaccacacatcacggcccaagaaatttctccatcagccattgccatcacatcgctggccgttaactgcatccctgcaagcaaaagccatcccttctctctccattggattcttgcttctactactccacgaaggaccaaattaaatcaattcacacactgtctatctctctgaagcagcctggtactactagcagcgatatgattagatcctgggccttagtttgtcgatcgtctgaatttttttcacagtagctcagctgcaggcatttgcaacttcagtaaattaatggcagcagaggtagtagttactgtagttaactctgatggtttcgtcgacggcaacgacgtcgacgcaggaggacgaaaaggactagacctgggcaggcaggcaaccttgccgtgcccgccattgtcgaccatagtgggggtggtggcccagctagcaaaagccccatcttggatgcagtctcggatggctgctagcctgctacacgtagacaccaccacatcatcttcgccaactatgcgctgttgcaaactactcgctttcaaattacttatcgttttagctttgtcatatgttaaacattcataactttaaatattgatatatatatatatatatatataattcactgagaaatgttttcttaacgatgttaaactatatgagttctataaattaatggtcgaagttaaaaatgtttgattcgagataaatctaaaacgataagtagattgaaacggatggagtagtgccaagaattcagagataagccagtgctggtaaaatatgtgtataggtgttgtactgctactagttggttgagcacttctgagctttgcaattgcgccctggagctggagcagtatcttatcagaatcagcagcaatggcgccatcgctttccttagtggaaacatcaggtttttcaggtcacaggcatgtaaacaaagaacaatatatactttcttttccatggtttaaccatcaggcaagagtggcaagcggccatgcatgcgtctagtagcagctagtttgatcaaaagctcaaaagcaattctgctttgtgggggacgcgttgttcagagttcagagcagtgaaggtgatggaggagacctcaatggagggccggcctcctttggtccatgcgtccatgtctccatagggtaccatggctaacaccatattatatgagtgacagtggtatcatcaacaggacatcttatgttctcaaccctcaaacatcgagaaagagattagaggacatggaggtcttagctagcacgcatcataatgcaggtatgtgttagaattggtgttgagtatatgagttgtagtagattattattggagctcaaattgtattatttgtaagtttagggtagtaaacgaacttccatctaaaatttagggatgtatttgaactttttcctacaaacaaatatcatagttttgattgcatcatttgatatcttaacagatcaataactatacagtagggagactgtttgatccacaatttcacaacaacgtggagtaggaaaaaaaatcgatttagggcttcttgatacgaaaaaatgatggaatatgagaaacacgtgaatttggtaaagatggtgtttgattacttcatacgaacacaatacaacggatctagccaagtgtcttataagaaggatagagccgtaataatggcagccacaagaattttgaatggaatacttcatttgaacatataaaaaaagagagataaagagacaagttgtatttgacttatcaaagaaaatgtaaaacacgagcttttatcaaatgtatgtttgaaatactaaaaagcggaggaaagaaagaaatcctacatgaatttttgaaatatatccctacaacctaaaagggcttcatagtaatttttccaacaggttttcaatcctttgaaactcctaaaatttcattgtttccagagaagacctttaaatattgtatacataatattttttaaaaaagggttcatggaaggtattgtgaggtagagatacgtacattgaaaatgtcaagcttgaaaatacttattttagaagatttgtttggtctatctatgctacttcaaatatgccaccaccacacttttcattggcgtgtaggtccacaatgctggtattgttggtgtttcatcctatagttttctcgctctagctaactcagtaagcatccaaaaaattgatggcgaaaatggctagataagtagacatttttaggctttgaaataaatgctaaaggtttgttttttttttaagatttcgtggcaacgcacgggtaaatcaactagtagtttttttacccaccatgagaaactgagaatcaacatataataagtcgtgcaaatgtaatttcattacttaataacatgcagcaataacaatttaccataagatcatttgccgaaagacaggattgtagtatagtgatcatttgccgacagcggcagtacagcagtagtagtacgtatactcgaatgtatcggcactttggcaggtgaacaatgatcataccgtcctctactcacccatacatatacaaacatcatgaatatacatacggccccacatttcgatttttctggtactactagtagtaggttgagcctaggaaatgacgatatggattccttatatctgggtggtctgcaaccttaataattaccatgataacaccatcaacctaattgctgtactttagcctctgattgcaatgatgaggacgagcaagatttggatcatgggagaataatcataaattctctctgccatggcattgaagctttgctatgatttgcatgcttggtttgatctttctggtgggccagattggccgtgcaaaggacatcatctccatgaatgcactggaaagttttgagctcttgtgagtaaataacttatttttagttctgacgaagaatcaaaagatttttgagacaaatgcttttggttacatatctaaggagcttcaataatcaatcagattacccagacattggtggagtattgtatagcacactatagctagtgcttggtctactcatctgcataagagcaagtttaatagtatagcgaactactaattctaaatcatctgtagccaatttaatagccaattcatacaatagttgtttactgtactattaatacctggtcccacccatcatacacacgttgcatcttgaagtctgtgctgcagcgggctacagatctatagcccgctgctcttctctctcatcttttatctttttagaatatgtttatagctggctaatagtctgctattgtacctgctctaacggtgcgattttggtggatttgtttagctggcatctcatatgaaataattgtcattaattgtcaatatgtataattttctattacatagaagattatgcacatatacacacagcattacatgctcgtacatcttatgacacacacctgaatgcatccttaacacatgctcgaagagatagagtccaacaacaaatatgtaaactcattaatttttatgcaaagcacatctacatcagtagacaccgtaatttaaaatcctaacgagcccaccacttcatcaccttacactagaggagaagtgagcttttgtaccggttagtaacccctttttaccggttctagcaaccggagataaagtaaccgagactaaaatttttgatctttagcaccggttgaaataaccggtactaaatatgcatacgaaataaaaaatgagggttgtggaattcgatctaaagatctctcacctcagctctcacgcgcataaccattccaccaactctacacatctaactaggatagaaatactttcttttatctaaccctggagacatcttttgtatatttagtccggttggtgttaccaaccggtactaaaaatattttaccaatcggaagcaaagatcctccagcattaatctggggactaaagatatatttttagtaccggttggtaataccaaccggaattaaaggtgtttttgtgactttgacttttagaactggtacttaaaaatatctttagtaccggttcttaatttaactgagatatttatgttttgggtaacgtgataaaagatcagttctccattagtgatataaatggtgctttcctaacatgtgcaatttttcctgtctcctaagtttgtacttcctctgtttcacaatgtaagtcattctagcatttcccacattcatattgatgttaatgaatccatatagatatatatgtctagattcattaacatcaatataaatatgggaaatactagaatgacttatattgtgaaacggagggagtaaaaagcatgtcacgattttgtgttaaacatgttaagcgatcaaatccggcaacacaacacaatgaatattgctatggacaatgattttaaggttgggtgtacactcaacaactacaaatatcctatttttagtgtttggtgggttagagttcaaagatttaaggtaattggctattggggtagaagtggtatgacgtaagaggctacgaggaatggatttgttagaggaaaagaaagtcaagactgaagtattatatccagtttgagtatatacacatgttacctacctacgtatattgaatttcgccgtaagttttctgggaaaaaaactttcaaatataactacaactatactaattcctatgtttttcatgcgctttatccaaacaacaattcctgcagtttcctatgttttttcaatccataggatttaagatgttaattagggcatttggggaagcaccagtacacgaatattggacacatgtaggtgagttttcattatattttagtgagattaggaatgtgccgccggcttttgtctcgtagggtatgtgtttggtgggaaaatatcctaggcacactccatgcataccaactagcaaatgtcacgaatttttttttaaaaaaatagacatttactaaattctcatattcaaatccattatattttagccataaaaaaattgaaaatctaacaattttaaggataaaaatatgtcggattttttgactttttttacggataaaatagtaatgaatttgaagataagattttacatgtaggtgtaatactattggaagtatgtgtccaattttttctagaattttttgtgcatttgctagttgatgtacacggaaaacttgtatgcataggatatgttactgtgttaggtggtgtatttgcgagggtgtgagtgtagcgctacgtgtatagtggtgtgtctgcgtgtgcgtctatcatgcaaacagaaaaaaaaaaagatgttatggcatttcaatcatgtatttgttttccttgtttctgtgtgcttcagaatcttgagttccaaaaaaaagcccaagagtcttctcatgattatgacaacaaatcaaataaaaatctaacttgatcaaactcgctaaacattaagaaaaaagtacggcgaattctgaaaattaaataaacctaacagcctctgaaatagaaagatattttagctcaaagatagggaacaacactcccaaaaatatttttggaaggatcgatgagaggttcaactgaaatgcatacgagaaagagataaagagtgaatccacgtagacatgacaggaaaagcatatctctctgaagttctgtcacgaccgagaactgaacgctgaacagtcaccgtatagtgtctgggtgtgtttagtcggggaaaaaggaaattttttgctgtcacatcgaacgtttgactggatgtcggaaggggtttttggacacggatgaaaaaactaattttagaattcgcctggaaaccgcgagacgaatcttttgagactaattaagccgtcattagcacatgtgggttactgtagcacttatggctaatcacggactaattaggcttaaaagattcgtctcgcgatttcctctataactgtgtaattagtttttttatctatatttaatgcttcatgcatgtgtccaaagatttgatgtgatgtttttgagaaaaaaatttggggaactaagcgggcccctagacgacctagaaaagctttggctcttttccttttgtttttgcacaaccccaaggctggctgcgtgtgttgatttgatttaggaccaaacttcctgggagcaagctccaaaatggaggacgacatgaacaaactaggttagcttcgcctttaccactttacataattacatgtagatgagcatgcagctcactcagcagttgggggcctggggctagttttttttgcatgcataaaacaagcatgggtcatatgggtgagtgaagtgagtgagtgagcagcatgcaggtggtacagagattgtagaggaggggatcagacgttggtgggccgaatcactccgcacgaactgaaaattattccaccatcaaaagaccccagtcaactcatcatcgacgctctcaactctagatgggctccctttctcgtacgcttgtcggggccacgggacagtgacaccctctggagcaaaatttgtacggcatcgatctgtggagcaaactttggagttaccacgcatttcggccgttggtaatccgatgcaagtttgggtcttgctatttgctactccctctatcgtaaaatataactagtggtaaccttaaatattaaagacagaatattaaagacagggataaaaaaactttgttgccttttcaaaataggtgaggcttaagtttaggccagtcacaatggaggtttcactggtgtgtcatgcacatttaataggggtaagactgaataaaaaatgattatttgcatgaaatggggatgagagagaaggaaagagtttcatcctggtgaaactcgtcagcgtcgtttccaagtcctcggtaacagagtgaaacccccgttgaggccgattcgtttcattcaccggatctcttgcgtccgcctccgccgtgcgacctccgcattctcccgcgccgcgccgcgccacgcctccttcccgcgtgaacattcctccttcccgcgcgagcgattccaccatctcccccgtccggcgcctacggagtacaccgcaaccggtcgccccaatccggcgcctagaccgtgacccacccgccatcttccgcaagaccgaatccccaacccacccaccatcttccgccgcccccgtccccgtccccggccatggatccgtcgccggccgtggatccgtcgccggccgtggatccgtcgccggctgctgaaacccggcggcgtgcaaccgggaaaggaggcaaacagcgcgggggcaagcaactaggattgaagaggccgccgccgatttctgtcccggccaccccgcctcctgctgcgacgtcttcatcccctgctgcgccgacggccatcccaccacgaccaccgcaatcttcgccgattttcgtccccgattcgccgaatccgtcaccggctgcgccgacctcctctcttgcttcggggacatcgacggcaaggccaccgcaaccacaaggaggaggatggggaccaacatcgaccatttccccaaactttgcatctttctttggaaaccaacaagacccaaattcatggtacatgtattttcttctttttctgttactttcaacctacggtaactctaattcatggatgagactactgccattgtgcagttcaatgctttttcttcatgttatatttcgtccagctgtgagttatggtttgaagattgctgtggttgtttcattgctgagtatgtgaaagatagatggatgaaagagagaattatattttagtctgtaatcttgctcatccagttgctcatgtatgaccttggttctagaatgttgccctgactgtatgcttaatgttcagagaagtgatgcctaaagcagtgagatcagtgggatcagattagctatcgacatataatattagctatctcagttgtgaaagagagatgggtgaaaaggcaccccttggattaattctgtagtatcaaattctgcaccttgtctgtccatatgttctgcttggttggtgggtgcagtgcatttgtaaaaaatagtttgcttctgatccttaatatatgtaacagggaatgaattttcacccatctcagttgtaaaggtactgtcttgctatgcaatatgtgtaaattgacaaacctgaaaatagtctgtttggaatttgcaaaagcaattcgatagtttggaatttccaaacctcagtcagcagtaggcaatccattttagttcttgctatgcacaaaaacagtacacctgatatgctcattttaatacaacttttttgtctctgttacagtttggtcaggggttatcctccaggagggtttgtcaattttattcaacaaaattgtccgccgcagccacaacagcaaggtgaaaattttcatttcgttggtcacaatatgggattcaacccaatatctccacagccaccaagtgcctacggaacaccaacaccccaagctacgaaccaaggcacttcaacaaacattatgattgatgaagaggacaacaatgatgacagtagggcagcaaagaaaagatggactcatgaagaggaagagagactggtattcatcggatacttttacatttccatatgtctttgttttgactaatacttgacaggtcattaactgattcttgtaggccagtgcttggttgaatgcttctaaagactcaattcatgggaatgataagaaaggtgatacattttggaaggaagtcactgatgaatttaacaagaaagggaatggaaaacgtaggagggaaattaaccaactgaaggttcactggtcaaggttgaagtcagcgatctctgagttcaatgactattggagtacggttactcaaatgcatacaagcggatactccgacgacatgcttgagaaagaggcacagaggctgtatgcaaacaggtttggaaaaccttttgcgttggtccattggtggaagatactcaaagatgagcccaaatggtgtgctcagtttgaatcagagaaagacaagagcgaaatggatgctgttccagaacagcagtcacgtcctattggtagagaagcagcaaagtctgagcgcaatggaaagcgcaagaaagaaaatgttatggaaggcattgtcctcctaggggacaatgtccagaaaattataaaggtccacgaagaccggagggtggatcgtgaaaaggccaccgaagcacagattcagatatcaaatgcaacattgttggccgctaaggagcagaaggaagcaaagatgttcgatgtgtacaatactctattaagtaaggatacaagcaacatgtctgaagatcaaatggctagccaccagagggcaatacggaaattagaggagaagctatttgcggattaaggtgagttttataaactgaccactattttctgaaatgtatgaattctgaaatttatatacaattgtgtaaacatggaaaattagataatgtatgcatgatgcacaacatgtgcgtgcagcactatttaatggcagtttcacaagtgtgaaaactgaccactatagtactattgtggtgtgaaaactgaccactactattgtggtgtgaatgctactgtggtgtgaaaactgaccactatagtttcacattcctggatgcagccctcctctatatatatagatacagtcctcatctcttcctggcatacacacagccctcttctctaattcctggacgcagtcctcatctcttcctggcatagacgcagcccttctctcttcctgtttagttcaacaacattgaggtgatctgcctttctttgaagtttctatcttttttcactgctgtgaatgattatttctctgctgtgaatgattatttctccaatcttcctttgttcaccttctctctttctctgctgtgaagatgtctggaaatgaaaatcagattcctgtgtccttgttggacgagtttctcgctgaggatgagatcatggatgagataatggatgatgttctccatgaaatgatggtgttattgcagtcctccatcggagatcttgaaagagaggctgctgaccatcgtttgcatccaaggaagcacatcaagaggccacgagaggaagcacatcaaaatttggtgaatgattatttctctgaaaatcctctatatccttccaatatttttcgccgaagatttcgtatgtacaggccgctgtttttacgtattgtggacgcattaggccagtggtcagattactttactcagagggtagatgccgctggtaggcaagggcttagtccattacaaaagtgtactgcagcaattcgccaattggctactggtagtggtgctgatgaactagatgagtatttgaagattggagagactactgctatggatgctatgaaaaattttgtgaaaggaattagagaagtatttggtgaaagatatctcaggcgtcccactgtagaagatactgaacgactactcgagcttggtgagagacgcggttttcctggtatgttcggtagcattgactgtatgcattggcaatgggaaaggtgcccaactgcgtggaagggtcagttcactcgtggtgatcaaaaagtgccaacgctgattcttgaggcagtggcatcacatgatctttggatttggcatgcgttctttggagtagcaggttctaacaatgatatcaatgttttgagccgatctactgtgtttatcaatgagctgaaaggacaagctcctagagtgcagtacatggtaaatgggaatcaatacaacgaaggttattttcttgctgatggaatttaccctgaatggaaggtatttgctaagtcatatcgactccctatcactgagaaggagaagttgtatgcacaacatcaagaaggggcaagaaaggatatcgagagagcatttggtgttctacaacgtcgattctgcatcttaaaacgaccagcccgtctatatgaccgaggtgtactccgtgatgttgtcctaggttgcatcatacttcacaatatgatagttgaagatgagaaggaagcgcgacttattgaagaaaatctagatttaaatgagcctgctagttcatcaacggttcaggcaccagaattctctcctgaccagcatgttccattagaaagaattttagaaaaggatactagtatgagagatcgtttggctcatcgccgactcaagaatgatttggtggaacatatatggaataagtttggtggtggtgcacattcatctggtaattatgtttttattttgcattattagttatctatggtactaagatatgtacaagtttctctaaattgcactaaatctgtggttcatattggatatgtgtaaactatgaatgtagcctgactaaaaccatcattcatgctgaactggtttttgttttgtatatgcaggatgaaacaaggaactaggtttctgaacgcattacggactgaaggttgaggggcagaatgatccacccagttgcttctatcagatcactaaagtttcatttcactgttttattttggacacttgatgcttgtgtgcatccgatgaatgtttaatttggtcacctgatgcttgtgtgcatccgatgaatgtttaatttggtcacctgatgcttgtatgcagttatctatcttatttgttaatgttgctggtactgaggatttttagaagtgaaatgcacaagttgctgtgttttttgactgatccttgtgtgcacttgacgttgtatgtgacaaatgatggttcccagttgtgcacctgattcatgattcagttattcagtttaaattgacgttgtttgtgtgcaccttttgtcagttagccagttacggctggaagttgtgtaagtttgtgtgacgcctggctacaggattttgggtacaaatgatcccagcaacttgtatcaattaaatgctttgcttagtcttggaaacgtcaaagtgaaacccctccactgtggggattgtttcataaaagatttcatttgagagaagatggtataatattttgggtagccgtgcaatgacactagccattgtgactggccttagactagttaaagctataataaatacaaggggtagtagggatagtatggttaatttaggttgcgttcattctttatacttcccagcatgaatgcgtatagaaaacggagcggtctattagcgcatgattaattaactattagctaatttttttaaaaaagaattaatataattttgtaaagcaactttcgtatatatttttttaataaaataccgtttagcagtttgaaaagcgtgcgcacgaaaaacggcaggggagagttgggaaccagctggaacaaacacagtcttagtgtgtaaaagtcattttttgtaagtactaggtttgctatatttcaaatgaaatttaaactccaaaagttgttgtattttgggtcggatgaaatatttacaagttgtatattaatattttaatactttttttactctagtgtagatagtatcaagatttatggtgtgttcgggaggaggggttgggaacccctcctcaccggcacgcaaaacgaagtacgtattattacatgattaattaagtattaacttttttaaaaaatggattattatgattttttttaaaacaactttcgtatagaacttttttgcaaaatacatactgtttagcaatttgaaaagcgtgcgtgtggaaaacgggagagttgggttaggaaaattggggaaagaacccagtcttatggacacacctaactctacttctgtcctatttaattgtgcctgacgtttatctcgactccacgcgatcacctcatcgttatcgaagtcactcctcttcaccaactccgacgagattcctatgcccaactctcctcccctaactttggcaacttgctttgctggatatctgttgtcgtccctgatcaaccgcttgtttcttgtttttccccaccacatccgccatccatcacccctccttcgtccctacgggtttgatgatgacatcatggttttctcctacttcaatcatccctctaaagctactctcaccgtaaatctactccatctcaccgcctctaaccctaactatctaatcgagtgagatctcaccatctctatccctctagagttcaggtgtcatcctcatcgtcaatgagacctcaccatctccatccctcttctttttttttcctacgcccccgctctagaggtcaaagacaatgctcggggcactgaagatgtacaaaaaagcatgtgagtcttttttatattaccacttatcgatgttgagtatatcagcttaaaagctacatccttctcctattgagttggagtagccttttattgttttcattctagcttatcactcatagccaaaattttaaattttaaaaattaaatttagacagttaatttcgagttattttatcgaagtttttagcatctacttttaaaatcgctagaaatcttaactaattaaaatattcgtaattttccgttcgccacaagacggatgaaggcgccttcgtccgtcggcggtgcgccttcgcagcccccaaatcccaatcgctcttagaattggatacagggaaatactttctaaaatcggcgcaaccaaaactcaaccactctgtcacaaaaaatcaaccacaatcatcataaaatcacaaaatacatcacaaaacttcacaaaaatatacataaaaaaagaagaacaacaacatacatcacaaaacatcacttgcctgctgccggatccaccctcggccatcgccaccgcggccctcggccgttgccaccgccgcactcggccgtcgccatcgccacccgatccatccgcggtagccgccgacgccaccaccgctgccggagggagaagagaggcggcggaaggagccgccgctccttatccgcccacggacgccgccaccgtcactggatctgctgcgggaggaagacgagaggggacggagggagccgccgcagctagatctgcctgtggccaccgccggcggatctgccacgggaggaaggctagagggagtggagggagcccaccgccacaaccctcggatccgcctgcggccgccgccaactctccgccatcgccgctgtatccaccgcggaagggaggcgagacagggcggagggagcggccgccggctagggaggtgagatggggcggagagagctgctgtcgccgtccccgccgctcgcgggaaggggggaagggcacactacaaccactcggggggagggggtggagggcgctaccaccgctgctcggtgggggaggtcgccaccgccgtcgtcggttttcgattgatcgagagagagagaggatcgggggcgggaagggtggaaaagaattttaggattagggtttttgctgcagacatttatattggttgtgatcaatctagaccgtccattcgatcgaacggctccagcttctcgcgcatcgggccaccggactattgggcctccgcattattgggcctacaaatgggccgcaattaaaataaatgttttctctctcagtaattttaagcaactttctattttcaaaaatagcaccattttaattatttatgactgcttattaatttaattccaactaaattgaataaactagaacattggctagatttttctcatgatatggatttatttttcgactaaaaatgtaattatttatttgtcatgatatagaatttaaatttagactaaaattaaataattttaatttttaattctatatggactctattcttcttccaatattcctatttttttattgttctaattagtttctatatgaactctaaactcttctttcaatatttttattttaaattttaattatttttctaaattgtattcctatatgcactctaggctcttttggagaatattctagactcctcatccaatattatttattttataatttatactttatattaagtcgtattatttatatagacagattaatctatccagtgtagggtttttttttgcaaaaagatttgttttatgtagatatccgattggacaacgtgattttttttaaaaaaaacaaaatgaaagagtcctggtctacaatgagttctccttatttttttatattttactccaattaatatgagaatttctatttgagacttttctagcaagcaaaaataccaaagcagtgtgaaaataacttcggttaaaaacaaatatttttagtgttattacaccgtagcgaagcacatgcattttgctagtacaaatataaactttttacccatagttatttggttccttttttttgcctcatcgcagggagagaacgacgaggccgttagttttgtgatctaacggcgacgatgcaattatgataactagtatggtggcccgcgcagattgcgcggctagcatcattatattttctctcatataatagcatatatgttttctcattatattattaaaatatattacaatgacaacataattttaaattttgcaataactttacgaaactactaatgtgtaatattcatattgtattttatatacatgttagttattaattatttttaatatcaaattttagttatttgtgaattatatatattcctatatggactttagaatcgtattttaatatttctttttttaattctaaatgtttattatttctaattgtatttctatgtggactctaaacttatctttaaatattctttaatttttaatttcaaatttcacttacttctaaactgtattcctatattggctttaaactcttcttcccatgtttttcttaatttcaaattttagttatttgtaaaatatatttttatatggactctaaacactacttttcattttattatgtttattccgaattttagttagttttaaattcttatatggactctatactctacttctaatattccttatttttaattctgaatttctatttttttcttaattgtatttctataaggactctaaacactacttttcattttattatgtttaatccgaattttagttagttttaaattcatatatggactctatactctacttctaatattccttatttttaattccgaatttctttttttttcgtaattgtatttctacatggactctatactctacttctaatatttcttatttttaattccgaatttcagttatttcctaattgtatttctatatggactctagtctcctcttctaatatttcttatttttttaattccgaattttaactatttctaaattgtatttctatatgaactctagtctcatcttctaatattccttattttttaattctgaatttcaactatttctaaattgtatttctatataaactcatctttcaatattctttaatttttaatttcaaatttcagttacttctaaattgtatttctatattgactttaaactcttcttcccatgtttttcttaatttcgaattttagttatttataaattgtatttttatacggactctaaactctacttttaattttattatgtttattccgaattttagttagtttaaaattcctatatggactctatactctacttctaatattccttatttttaattctgaatttcagttatttcctaattgtatttctatatggactctagtctcctcttctaatattctttattttttaattccgaatttcaactatttctaaattgtatttctatatgaactctagtctcctcttctaatattccttattttttaattccgaattccagctatttctaaattatatttctgtataaattcatctttcaatattctttaatttttaatttcaaatttctgttaattttaaattgtatttctatattgactttaaactcttcttcccatgtttttcttaatttggaattttagttatttgtaaattgtatttttatacggactctaaactctacttttatttttattatgtttattctgaattttagttagttttaaattcctatatggactctatactctacttctaatattccttattttttaattccgaatttttattttttttcttaattgtatttttatatggactctatactctacttctaatattccttatttttaattccgaatttctattatttcctaattgtatttctatatgaactctatactctacttctaatatcccttattttttaattccgaatttcaattctttttgactgaaattgcgaatttcagttatttcctaattgtatttctatatggactctagtctcctcttctaatattccttatttttttattccgaatttcagctatttctaaattgtatttctatatggactctgctttttttctttttctccgattaatgcgagaatttctaggtcatgagagcgaacatggaggctcctttttattccgaattttagttagttttaaattcctatatggactctatactctacttctaatattccttattttttaattccgaatttctattttttcttaattggatttctatatgatctctatactctacttctaatattccttatttttaattctgaatttctattatttcctaactggatttctatatggactctatactctac

SEQ ID NO: 4832 - DNA, 6303 bp, Oryza sativa
  unsure (1)..(6303): unsure at all n locations
acacatatgctacataaaagaacttttaataaataataaataagtattaactttttatatcatatgtaaaagtaaatgtatcgcaaataatatggtgcatcacatactcataaatataatagtatcatccaataaatttttacattccaacaatatacttcattaatttattatgtttcttcatagcaaagggcaaaatggactttttcaaaagaatttaacggtcaactaacggtcaactagcggaaagggcatggaagggatccaaactaaaattcaggagtatgtaagggattgagcaaaattcaagggtatagaaggaattaggtgaactttcatgcatacataggtgattttctcaatttaatactcagggtggccatgcaccatggacagagatgcagaatcaataatttcaactcaagaaccttttatttttactgacaaaggaatgcataaaaaacaagtatactcttttttttcaacatattataagttctagtgagtgtttaattatgatagacatcatgttgttggtgctgtttatacttatttagttggatgcataggacaaactattatttgtaattacaccgaataaatatataaggctgccactagtcagaacacaatataaatgttacacctgtatggtgataaataggatggtcttaattccgagatgtgatgattgatgatcgcaagtagtaggagatttccccgcacaaagcaaattttgcgcgtgctaattgaatcggatttgttatacaacttttagctcatgcttacgtatatgcaattatatttaatatcttaactaattaaaacaatcgtcacctcgtccgtgcgctttttcatccgtccaccccccccccctcaaaaaaaaacccagaacacaaatacgagtccacatcaaaatctaaattggacccaaatcatagagaaaacactactccaataacacaagaacaggaacaacattaacacaagaacacaagaagaaaaggggagaatgctgccatcgccgccgtcacagggacacatggacatcggtccgccgccagcttccctcccgctggatccggcgaaggggaggacaccgccgccgggtcgccaccgcctcccctcccctcccgccgtatctggcacaccgggccgccgccgcctcctcccccgctggatccgcggaaggggagggcgccaccgccgccgagacaccgggccgccaccgcctcccctcccctcccattggatccaggacgtcgggccactgccacctcccctcccactggatcggtggaggcgagggcgccgtccctgcccgccgcctcccctcccgctagatcgaccgccggtggtaggggagggcgctgccgccaccgcctgtgatgagggaggacgccgtcgccgccgtcggtggtgagggaggacgccgtcgccgccgccggtggtgggggagccgctgccgccgctcgcgggggaagggcgacgccgccgccgccgccgtttgggggagatcgggggcgggggggggggggggtttgaatcctagggttagggttaggtttcgggtatatttatttaggttaggattaatctggaccgtccattcgattggacggctcaagctgctcccacgtcgggctgcctattgggccgccgaatggaggacacaaaatggacatcaacgaagaaaggaaacaggccagaaacttaggctgcgttcgagcgcaggagaaagagagaaagatagttttgttttccgcgcgcacgcttcccgaactactaaacggtgtgttttttgtaaaaaatttctataggaaagttgctttaaaaaatcatattaatccatttttgaagtttaaaataattaatgctcaattaatcatgtgctaatggctcacctcgttttacgtatctttccaatctcctcaatcccttttttctcaacacaccctcagggcacccacaatggttatctatagactctctataaaagatccatgtaagcatatttttctacttggaagagattaaatgaagagagagagcaaagctatctactaacctgaagatagtttatagagaaaaacgaggcaatttattagagagctatagatacccatgtagacatactattgagattgtttattattaatctagtctattgctgagatgtacatgttttatagatagcaccttactttaccattgcgggtgctcttagaatagataaaagggaaggaatataaacttttctatattcggcccaaacctaaaagggaggattttgattcctttttccaattaaataattgctaaatgatgtttgtattatttaaattagcaattaagctctgaaaattccaataaaatttcaaagagtgtaactaatcatggagaatttaataaaattaaatttaaccatgtcattttatttctcacttactttacttgtaaattgatttaattatacacctacctacttaaaaataccaaatatttcagcaaatttgtattttaattaattacataatgtaaatttttcttaacttttcctcaattttttggtctgtacattttccgttgcaacgcacgagcacttttgctagtatacaatagatattaaaagtagggaaaagctggaatacggtgcccccaactgcattcacaatttcatcctgaccgccctgtcacgcacgtgagagggaaaacagaagatttcccctttcctctctactccacgtcgcctccaccgccagttgcacttctcccaccgtcggtgcaagaagatgctcgacatcaaataatactcctgttcgcgtggaggtcagcttccgaaccaccgaagaaatcgatttgtatcggtttttaaagtaaagagatacgttatacctagctttgtggttgagggatacaatttgctggtgagggatacaatttgaccggcaagagatgaggaaggcaaaatagacttactcctaacaaaaatgacaatacattgctagtacttcagtaagtcacaaatactgtaatcatgatattatttattggctcaataatcatcatttttatccttgttatttcttattgcaacataacagggaaattgaagagggtattccggtaccaataatattacatgtttgctgtgaagatcatacatttaactcagcctcagcagctaatggttcaaaaactgattccacctcacccttgtccacgtcttccagagttgctggcttccactttggattctacaaattgaaaaggaaatttagctatacgtttagtaaatatatatctatagagttcatctccaccaagtttagtaaatattatttctctcctctcttattaagacacatcacctcgattatttctagccctttgataattgatatgtggtccaaataatttccctccttttcttctcttataagtcaaccccctagttttgtcccccttttttttttttgggaaaaatttgggaaatttttttttaaaaaaatttccctttaaaaatttggggtttttaacccctttttttccccntnntnttntntntnttttntntcccctttncttcttcattctaaagccacatcacgtaagttttgcttttgattgatcaatccatatatgatttaaattgttataaaccacaacattttaattgtttatagctttcttttttaatagtcgatcatagatgaaaattatacaaagtgtagccatcttacatgttatttcgactaatatcatacaaaactccgcagcaatgcgtggggttttatctagttctattaatcctaactctagagacataacaccattagttaaacaaaacacaccacacatgtaactatgtgcctttttatattattactaggtatatggaaaaagaacagctatgtgcctatgtctagcaaggcaaaggagagtgaactttgcaccgtgccacacatgctataatgtctgtatccctctttcccagaagtcgcacagtgcgcaagacatggttgaattctaaggtctacctctactggtttacttcttattaacaactcagagaaatgttcaaactctgtagtacgaagtgttcttcagaatttcattgacagaagtttcgatccattagtggatagctccgcgaaaagtagctcaaggcttaaatattagggagtggcaaataaacaattgattttaaacaattaagcttcttaagtttaattacaagttgaataagctggcggatgatacgccacaaaagcaactatttaatgtgacattcatagtttgtaatttgcaacccatgtgctagacatgtggccctgggacccacagacacaggaggtgtctaattatcactatggagaggcaaatgtcagaagatggatgtcctttgaattatggaaatgtgatcctaaaacatttactatacgctatggtgattataaattgtccgccaaacaatttaagtaatcggagagtaaagagatactaagtcacatggataacttgcctggtccttgtcaactaagacagcacgtacaccttcaacaaaatcatttcgaaccgatgacctcaaggcaattcgatattcaactttcataacaccagccaactgaacaaaccaaatgtcagaattagcaatgtccttgcaaaagaaaaagagaagcctgaaaataaaatagttaaccaaataaaagtattcaattgtacaggatagcagtcataccttcgatagatagtgttcattattcctatatgctgatgcaacttgagaaaaatgtttttgagttaaacatagagaaaatggagccccttttttgagtcctgccaaggcctcgttggcccattctgccactgcagacaacaatgaaaaggatacacgtgcaactagtcagtactaaactgaatttataaaacggtctcaatatagaaacactgttggcacttgtgcataaatataacaacattctcttgacgccttagcttaaaagcagagtacctgcagcatcatcactttgactacacttcttaagctcttccacagattcagcaactgatttgtcaggaccaaaggaagaaatgatatatggtaaaaacttatctagctggggccctgactctggctcgttcttgaactttgtcagcaatgactcaacatctctgtgaggatcatctgtgctgcaaaaataaaaaacacgatatcagatgtcaagacactatcaaacagaattataaccgagttttgaatgtgtcactattattctattaatgaaaaattatggaatttatacttctttaaaagaatggaatggtggaggcagtgaatctgacatcccacctactcccattgtaaattttgcaaattgccccttgaatctaaatggatagccacatataaaatcaaattaagatggatgttccctatagaaaaaggatgggtaacacatatcatggaaaatatgtttttatttattttcagtagcaaagcaggggcattcagctagtagtaattaaaagaacataatgatcttgctagcatttagtaagtttttaccaaataacagttcggaacatacaagttagcactcaagagggattccctgagaggtcccaggttcgctgaaggtacataatgagttccaagaccaaagaaaagggcatcagcaggtgatgatatccttttccctgtcatcccaaggtaagatcctgaaagaagcagaagtgagcagtgacccgtgttattaagcgggtatggcgaagtatgccaacccagcaccgccttaccgcaatagcgataagacgtatggggtggcgacggcttaagtgcattgaaaaataagaaagtattaagtaatatggcgcctaaaaatactaatggggtactccattcatcacagcccagcccaatagtagcacttacctagcttagtccaaatactttgctcttttgacctagcaaacaacattttaaccttacccaacagcttccctcccagcagccgccacctcaccttcatctagatctctctcccccattgtgcagcacggctcctctcctccacctttcttctctccttgtgcacgatgcagcaagcatacaccatcatcctatcctttctctcctctattgcagccagcagcctcctctcctccaccttttctctctcatgtggcacagcagcagcaggtggtgcctctcttgatctccctgtactccccatcagcacaagaagggagagggcgatgctagggaggaccagcagcaagacaacagacttttcccctctg

SEQ ID NO: 4833 - DNA, 5395 bp, Oryza sativa
ctatcccgttgggggcaacggtatcccgtcccctcgtattcctgtagatgtaaagatgcttaacgccattcacagttccgattgacaagtcacgttgacaattcaagtcagaaattcgagtcagaactcagaataatcttgcgtgatccaagttatccaactaatcagaaagcagccagattcccccccgagagtattggggaaatcttgatgggcgcacgcacgcacggccgcgcagccagttgaggctgacgagctggcgcactggtccacactattctccacccgcttccttcccctccgggccaaaggattggttcacgacccgcgccgcaagcatggtccagcctcgctggccgcacttcagccgctcgccttttgcttgggccgcgccccgccgcgccggatcggcaggttgacgccgccgtcgaccgaatccaatccaacccgttaattaaaacccccccttcctgtgctcagtaaaacgagcccgattggcagtttggcaccagcaccagcagcaggagcagagacaggtgagaggaggaggataaacggaggaggccgcgatgggaaccgtgctggactcccacttcctggcgctcacggccatcgtcactgtgagcaaatccctcgtcttttcctcttcctctctctcgccggtgcggtgctcatggatgtggttggaggttccaggagacgtgattggtgttcttgggattttttttttaatttcttgttccaatttttgtggtggtggtggtaggtgggatatcagctggtgttcttcatcatcaccgcgctcctgcggttcgataaagtcactgatttcgcaggtaattttggcaattgtttgtgtacaacttttcatgggaaactgcttatattattcttgaatataagttctcctcaacaaggaaattgccttttaaatttttggtaatttctgttactgcgttgttgtcttacaggaagtacgaatttcatcatacttgcaatcctcacgctagctttgaagggagcatggcatttccgtcaggtaaatagttgtctgaagtaaaacgtgcccaccttgttattttcttgttgtaaacatggtcccaatgtcttctcagtcacagcagaatgaaagcaagctgttcatttgagaattaattctcattctgccttcggattattcattctttggacttgccatgattttgttgtttgttcggtttaggatgacataacatcattaatatgttgatgaattaggttgggaatggatgtttctgttgacagatactgtagaatttgcagcaatgttacctgtttatttcttcattgtctattattgagtaatactgttcatgaaacgggataaaaatgcctcacttataacaaaagtgcaaacctgcaaatggtaacatgcctataaaagaaaggatgaaaagaaaatgggtagattagtacgaaaattagtggcatgcatgtgtttttctgataaaatctaatatttccaggttgtagaaaaaaatactgcaaattaacctgaaaaaattcctttcaagtgattttgtttcaagcgatgttgcatcaaagagttaaagataacctcgttccattttacatggaaatctaccgacggatagtagctttagccaactctacagtccatttgtttgtatattcttttataattgtaacaatacatgctttttttaatttgtggatttcttaactttcatccctttatcaggttgtattgactgtgctcgttgtgatttggggtcttcgcttaggactattcttattaatgaggtatattattataaaacagcaaagtttgttcaaatatgaaatgcattactaaactttctactatcttaaatgcttcatgccttcacgcatatattctgtgttgttggtctgatgtaggttattgttatcttttttatgagcaacaaaaggatcttatcagtcaaacctgataattaatattggttccattttggaatttcactatggtgctatctctgaaggctgttgctcagcccatcacataactcatttcacttatgaactggttaatgaatttgatcaataagcatgctcaatatgcaaccaccaaagcacagatgcagatggatactgtgaagagaaggcatttatcatcttcacaatatgcttatgcagatggatgcagatgcagatgcacaatatgcttcttactacttgagtccaggactgatgtggtgtcttgataattctagcagtttctcagttttcaggaaacaagcctggtttttcaaggaaatcaactttattttgacgttattattcatgactatgatgttgtagggctgttacatggcctatatatactttatgtaacttccttacttgctacattgcttatccttagcttgagccaaaacattcgatgttatccaaaatgacttactaatgcttatattgtctaaatttgtctaggattcttcaatggggagaggacaaacggtttgatgaaatgcgcgataacttgggaaaactagcagttttctggattttccaggtaaccttttgtaactttttttgcctgcttaatttgttagtggcttaagagagccttaccgggccttctgtcctgatttgggcaggctgtttgggtatggactgtcagcttgcctgttacaattgtgaacgcaagtgacagcgatccctcaattgaagcccgtgatattattggttggatcatgtggctgatcggggcaggtatggaagcaatagctgatcagcagaagcttacgttcaagaattctccgagcaatcgtggaaggtggtgtaatgtgggtctttggagttatactcgccatccaaattactttggcgaggttagtcagtttattttgcacgaacaagcttggttttcactaacctgtaagcgaaaagtatttgcctatgcagtttgaccttgaaaaataaagtaaaacataggtcaatagtttgctaaaaaaaactgttgaaaacttggaccttctcattctctgccattcatcttgcatagctatctgtttctaccaattgcagatattttgttgtgcactgctggttatatatattctgcacacactttatatgatataatctatttaattttacagtgttttgaacaaatactgacatttgtttgacaatttaattcgacacagatattcctttggtggggaatatttgtagcatctactccagttctctcaggagctgaatggctcgtgatcctcggacctgtattcctgacgctcttgcttctcttcgttagtggaatcccacttctggaggttaacaaccacaacttctctttgaaattatatactttgttacttgcaaaaatgctaacacatcacaccattttatgctcctgttttgaaggcttctgctgataagcgctttggacagaacgaagaataccgcacgtacaagaacactacaaggtaaggaagaactcctagacatgacacttttcatggggaaattttgggaaatacaatcgcagagatttctgagttgtaaagtaccatcctacatgagaatgacatatgggacttggacccgtatatcaatgacacatatgatagtattttctaactctgtgatttttgcgattgtattaagcaaattggcccgttttcatatccccactccaagggtccaagcatttctttgcagatttcaacagcaaagggtgactagcttatgcatttgtattttttatctgcagtcctcttatcccactaccaccagctgtgtatggagccctgcctggatggttcaagatgggcttcctcttcgagctcccgctctacaatcgtgtaccgcaacgtgatcctgtcagctgatgatatcagtgatctctagcgattgttgtgtacaatgtgtgtagtataagatacttcctccgtttcacaatggaagtcattttagcattttccacattcatattgatgttaatgaatttagatagatatatatgtctagatatattaacatcaatatgaatatgaaaaatgctagaatgacttatattgtaaaacggagggaggacattgttattgtcgataagtgatttcttttcgctttggttattagggcagtgaaattgtatccacgtgaaaacattacgttcccttcagctctgtttctaagctatccttttggtccctttttaaaatttccatgatataaacagccaacagccattgactatggttatttgtctgagcaaaacacctgatatgattgacaatggggtcagcactaaacgaagtttgtactcctacacattttgacaattatttgtacagagtagctactccctccgtttcaggttataagacattttgactttagtcaaaattaaattgttttgagtttgattaagtttgtagaaaaaagtaataacatttttaacccaagacaaatttattatgaaaatatattcaattattaatttgatgaaactaatttaatattataaatattactatatttatctatagacaattatttgtacagagtagctactagctactccctccgtttcaggttataagacattttgactttagtcaaagtcaaattgttttaagtttgattaagcttgtagaaaaaagtaataacatttttaacccaagacaaaattattatgaaaatatattcaattattaatttgatgaaactaatttaatattataaatattactatatttatctataaacttagtcaaacttaaaaaagtttaactttaaccaaagtcaaaatgtcttatgacatgaaacagagggagtatatttaaagcccgacgtgcattttaacattgaaaaaaaaacatcagaaagtatatgttaatctttgcagttttaactgaaaatggagcaaacaggccatcctgtcgctagattacgacggccaaatagctgtagagacaatagaacttaaactagggccaaaaatcaaaacattctctttcaaacaaaatatgaaatcgctgtgcaagttttaaaccctttcgagagattttcgctgcagggggttgtctccaggcagcagctacgtatacggagtctacacgtcgcgtcgatcacgctcacgccggcgcgatggacaccttgtcgacctccacgacgtactcgagcgtggccccgggcgggacctgcgcggcggcgtcgccgaagtcggcgccgtcgtcgccgaagccgagcgccggcgggacgaccacccgccgcttgccgccggccctcatggaccgcagcacgtactccaccccctcgcacattcccctcgtgtacggcctcgaccccatcaccagcgccagcggccgcttcccgtcgccgaacgtgtccacgaacgcct

SEQ ID NO: 4834 - DNA, 1008 bp, Oryza sativa
ccactaacaaattaagcaggcaaaaaaagttacaaaaggttacctggaaaatccagaaaactgctagttttcccaagttatcgcgcatttcatcaaaccgtttgtcctctccccattgaagaatcctagacaaatttagacaatataagcattagtaagtcattttggataacatcgaatgttttggctcaagctaaggataagcaatgtagcaagtaaggaagttacataaagtatatataggccatgtaacagccctacaacatcatagtcatgaataataacgtcaaaataaaagtgatttccttgaaaaaccaggcttgtttccttgaaactgagaaactgctagaattatcaagacaccacatcagtcctggactcaagtagtaagaagcatattgtgcatctgcatctgcatccatctgcataagcatattgtgaagatgataaatgccttctcttcacagtatccatctgcatctgtgctttggtggttgcatattgagcatgcttattgatcaaattcattaaccagttcataagtgaaatgagttatgtgatgggctgagcaacagccttcagagatagcaccatagtgaaattccaaaatggaaccaatattaattatcaggtttgactgataagatccttttgttgctcataaaaaagataacaataacctacatcagaccaacaacacagaatatatgcgtgaaggcatgaagcatttaagatagtagaaagtttagtaatgcatttcatatttgaacaaactttgctgttttataataatatacctcattaataagaatagtcctaagcgaagaccccaaatcacaacgagcacagtcaatacaacctgataaagggatgaaagttaagaaatccacaaattaaaaaaagcatgtattgttacaattataaaagaatatacaaacaaatggactgtagagttggctaaagctactatccgtcggtagatttccatgtaaaatggaacgaggttat

SEQ ID NO: 4835 - DNA, 2508 bp, Oryza sativa
attgtaaatgaatgaactattactacaaaacctgaaaactgggtattatgtatgtcacctaaaacttatgcaatttttcatttgtatcctaaccacctgtttatatcactgaccaagtttttacggatagaaactatctcatcaaggactcttaacgtagtatagtaacccactatgacaggttaaaacagagtaatagaacctgaaaactgggtattatatatgccacctaaaacagagtaatagaacctaacgaggatttttctggagatttttcctcgcttttttttaaaacagagtaacagaccgaattttaatttataataaactttatcaactcaaggacaattcaatagccagacgcaacggttgaaagtatagtaacccactatgacaagttaaaacagagtaacagaccgaattttaatttataataaactttatcaactcaaggacaattcaatagccagacgcaacggttgaaagtattaagagagaaacaatgatgataacacaaaccaataattggatggtcaaatttctcatcagctagaacacaatctgtggtatttaaaattcttgaaaatttcaacctttctacaattataaactaaatccacggtatttaaaatacttgaaaataccaacctttctacagttctaaatcctcattgtattgtggattctgatacacaagacaagcattcaagtataaaaaagcaagacctgcccttattttttttttcatatgggtatagaaaatttattaggataaactttggagaagcaagcacgagagtcgttatacagaaataatagtgcacacctgcatgccacatacaaaacaagccttcaaaactaccttgtatgttattcagacggttttagatagttcaggggttatttaggcagtttaacagttcaggaggtggaggtgacagatttctccgttttgaataccaagccaaacggtgtacaaaaacatatgaaagaagaaagaaaattagcacctctttggactcaaatattcaatgttgctagaccacataaaatctccacaatgaagatcagatacaatatatgccctctgcaaaaatgatagaagaacaaatctgaagcaatacgctactgtaaacaacaaacataacaaaatatgatatatatttaggcggtaaaataatgcactacatgggccatagtagagtttgcattgatcaccaacaataagaaaagatacataagtccagaactaaaccatcataaacatatcctaaattcatgacaatatagggcatagttttcagacatataataaaaaacgagtaatcatcataatgtttgtacctcgaagtactaatctagaattagatccttctgtttccaaaagttcccttgtaatactggaggatctttggcccattctgcagtagatgcttcagtgagttgcatagactgtgtcatttcgtcttggaggtctatcaggaactgagcctggcttaaatttggatgcttcatgccttgcaagttcaggtggcacaggactgttgctctgtataagcatctgtttcagatcaaagaaaatgtcagtgttctccagagttaaaaacgaagttgccaatcccttctttcctgcacgtccagttcttccaatacgatgtgtgtatgtatcgattgaactaggcatctcatagttgatgacatgagcaacatcgggaatatcaataccacgcccggcaacatcagttgccacaagaacagtgaaccgccggtttctaaatccatcaaggctcgtctctctctgctcctgtgacttcccaccatgtagtgttgtgacgcggaagcctgccttgtctagatccttcgcacgagcatctgctgatttctttgtgttgcagaacacaatggctggcttatccccaagatctgtgagtatcttctggagccttgacatcttctctgactccttcgtcatgatcacgttctgtgtgatgagatctgtggccttgccagctgtaccaattgtgacaacgactgggttccgcaggtacttcctagcaagccgctccacagcaggtggcatagtggcgctgaacatataggtagtcctatagatcgtttttgcatcaagctcctcatcctcattctcaggtttcaagttactcgatggcatagcatcaaggactccaacaacctgcggctcgaagcccatatcaatcatcctatcagcctcatccagaaccacatagttgcactggttgagcacagcatacctcctctccaagcaatcaagaagccgaccaggagttgcaataacaacctcacagccctgcctaatcttaaaaccctgctcttcaatggattgaccaccaacgatagacacaaccttaatgccaagataggtcgcaaatttcacagtctttttctcaatctgttgagcaagctcacgagtaggtgccataacaacagcataaggacccttagcctcattttccttacttatgggtggga

SEQ ID NO: 4836 - DNA, 2274 bp, Oryza sativa
  unsure (1)..(2274): unsure at all n locations
tacattttacaaagcacgtgcttgtgaagttgtgagcatataagttgactgacggattactagtatgattcataccaatagcattaaatatctagcgaagttattccaatggtttgagctatattacagtactgtgtctagcgaagtagagatgtgactactatgatttgaagcatattgtaactgaaaaaggtgttattactgcttggtaatgcaaatactgaggacctgttcgtgagtaaatacaagggaaatgtaaggagctgtgggtaaacttttctgcccgtaagtgaaggacatgcattacacattacacgttcattttaaaaaaggatccatcatggttactcatgcttcaatcaatcacattatgaacatgaaacaaaataggtggactgtgaagccgtaggcttactttgactgagaaattgtaaagaaaaaaaggaataggttatccaccgtgataacaccatcatgcttcaattattttaaggatataaatatgtgaaactgtaggattaccttgaatgagaaattgctgaaagaatagttgacatttgagctagattcaaactcagtgaagccactagactcatccccctatttgcacaatttgcacaattgtttagtaaaatgactgaagaataaaaaggcagacaaacaaattgtagttttcttttcctctacttatataaatgctgatgattcataccatatcatcttggtgattgctcacacagctactgctgccactaaggcttccattatcactggaatcctcaaattcgtatgcttcatagatgttttcgtccgatggattccaagaataacggctggtgaagtagctcgtgtcaaatgcactatctgaggaggggacaaaggcagcctgcatatgattccgtgttatcctcggtacacctttacaatggagatgcaactatgtttaaagaantaaatagttaaccatttatcccaccttttgcctagcaagggtattcccccagctatatgntnnctttaaaaaattgatgctgcttaactctgaagggaataggaatttaaatnntaagctatcaatcatttatgtatcataagaagttttgaattaattcnctattacnnaacggatgaaggtttctaaaacctcaaagtcaaaatacctcagaggcgccatttgcacctagccgttggtgagggtcttctgtcaataatcgtgggtnnaaagcagtcataatatcacattagttacattacaaacaaaaaagaaaacaataannaccacnnaataaacttcacaaaggattttgaaattgagcatgaagtagatagggagtattgtaataatatgcttaaattgcatgcgtaaagattccaaaaatacaaatcatattgaatagttctacctttgagcaaacagatgctataaaccatagaacacaactgaacacatataatatagcagtgtgctactgttaccctataagctgaaactggaaaaaagatagggactgacctatggcaatataaaatatagcgagtaccaagttatcaagcaagaaaatgtaatattttagagcagatgtgtccctgcctagtttgacccaaaatcctaattaaccccaacattcatttgtgttatttggaacctgaataatacagctaacaatctgacgtacattaattcacaatgctgatacgagcaacttttgggtggtgattttacagtacaaatgagggagctcacttcaattgttattgatggtgatgatcatggcaaaaaccctattgactttagtatagaaatttcatgcttgtcattgggataacacaaaggaaaatgcagtataaagacaacaatttattatataattggtccattgaccctaaaagtgacgtaaaagctgtgcaatctagcataatcatctatcacattaaaacttggaagcaagaaatagtaacatgcaatcctgtaagactgaaacatgagttactgtgtattcagaatactcgaaacatttcttacttgtcaattagatcctgagcttcagaactcatctcttctgggacatgtggccaaggtattttgcggttcagaatgttgtcgaaaattgtctacaccaaatacaacaagaatgtcaagttgccacagtttcaatacagcaaaaaacaacattgacttatatagcgacattttgcattaaatagatgaaaacccatgtgttttctagcagaccaaaacccatgtattttctagaagacctctttctctcatat

SEQ ID NO: 4837 - DNA, 15972 bp, Oryza sativa
atcatgcaacagccacaggcaataattttgttcctttttagttcttgctctgtttgttgtgaaaccaacttttctggaagcaagcaaaagtgcaaaactgcgaacattttctagtcgagtaaattgttaaagtggcgttcctggccttgttgtttcgttgataggtcggtggtttgcaacattccatttgttatgttaaacttggtggtgaccacacagttcagcaaattttgcatctttgatttcttgaatgctgttatcctaagtgcaagcaatgttcctcacctggccaaacgtgacaacgtactatactaccgttgaatctagaatttgctgggaagctgagaacgcactgtctccgctcttaaaaaaaaacaatctaaaacagtccccccgtccttagaaaaagccaacctaaaataggatgcgaaattttattatctcatactccctccgtccttaaaaatgctaggatgctgatatttttttgacggagggagtaatacagttctagaatttgctgcgaggatgggaaccaatgtttgctgtcatctagaatctacatggcgttaatgtatcacgggctcggtgtatttaggccctgtttagatctcatcctaaaactttacaccatgtcacatcgaacgtttgaacacatatataaagtattaaatataggttaaaaaataactaattatacagattgcgactaatttgcgagacgaatcttttaagcctaattgctccatgatttaacaatgtggtgctacagtaaacatttgctaatgatggattaattaggcttaataaattcgtctcgtgatttactgaccgattctttaattagttttttattagtgcccgaacacctcttacaacaccatatataatatctaatgtgacacgctaaaactttacgcccctgatcttaaacacccccttattctactgtcccatgaatccatgtctccctgacggcaagtcggcaacccttagaaggtgagcgagctagcgaccgatttccgtttttgacggggctcggtgtgtcaggctcggtggattcagcttcggtgacattgatatggcaagtcaccggatgacataccgtgcatgtgagccatccaaaacgaatccaacgtctgctttagttgggcccgcacgcagggcaaaaaatcgccgttttcatccccgtaggccgtagcggagacgtactggcgggagacggcgcccccaattcctcatcgcgcgcgtccgcgagccagcggggagagtcgccgccaccgtgaccggagaggtgacattccgacgagctcaccacgagtgtggaggcggtcgggcggccgccgcgtgaggttggggccggggcctgccgtgccgccgtggccagaggcgcatggaggcgaccggccagaggcgcgtggaggcgacctggagtcgacgaggtccagccgcctcccggtgtggaagaggtgcgtgcgcggccctgtgtttcatcaattttgctgtgtgttcccctttcggttgggtgctttggctctgttgctcgattagtgctagctgttggattagctagcatatgttcagtagaattggcgagatgtaattagctagcatattttacagttggggaatgtgggctgcacttgtagagcgaactgagaagtagcagtaggaaataaataccagtaggaaataaatacatcagggtcctcgcgcagccaccggccggtccccttcctagtcgcggccgcctggcgcggcggcagcctgaggcgggcgaagggaagcgaaacggcgaggcggcctgccgccttttcgggctggcgcggggacggctgccaactagctcgcgggggcggcttgacgcgggcgaagggaagcaaagcgacgaggcggctgcccggtccccttcccactcgcggcggcgcggtggcctagcgcctctccggcctggcgcggggaggcggcgaccagagcacgtgagattggggcgagactgaaggagacgtcgtctagcagaaagggtagcgcgtggggtgaaaacggagtcctgcaggtgggctagcgcaccggaccgttggattagttttcaacgcctcagattgctccaatgtcacaccgtgccatgccatagcaaagtcaccgaatctgaatccgccttatccaccaacgaacccaccccaacccacaccgcgcacgcgcacgcgcaatcgcagcatcaccagcatggcgtcccacgcccactgcgcccccgccgccaacctctcgccgtccccgggcccgtgcctcccgctgcgcctgcgccgtcgcgaccgcgagctccctcgcccagctcgcgccgcgctccagcgccgtcacgccgtcggcattgtgcggacgaatcgccgccgcggcgccgtcgcctgcaggaggcggcgggtgcggcacgaggaggaggacgaggaggagtacgggcacaacgaggagatggcgcggttggagcggtacagcgagggcgcgcgcgaccaagcactcctcgtcaaggccagggtcgacgacgaggtggaggtcgtgctcgtcttcaaggtagaagcactgcactaccactggcagagctgttctatccatcctaaaataacccaatctaataaagcatgcgatatatcatactacactgatttggatagtcacatttcagcactataattttgaacagtatagatgtgttatattatatattagatttgtttattttaaaatgaggaaggacaatgattctaagtctaaattcagtttaggatgtgtaggtttatttattttattttagaatggaggaaggacggcaattcgcaatctaaataccacagtttaggatgtgtcatgttctctcagatttgttcattttagaaggaagaaagaatgtccgggaggcgattcggtgactgatctttctttaaatatagtttaagatgtgtcataattctcttagatttgtttattttagaaggaaagaaagaacgtccggaaggcgattcggtgactgattttttcttttgtgtgggcacagggattctcgtcgaggctgagcgggagaacggcggcggatccagcgatgagcgtgctgccggagagggcgatcatacagacggtggacgtggtgaggggcccgttcaatcccaccaacatcgagtacctggagaaggatcttccatgggacgacttcaagagccgcctccattagcaaaaaatgtagctctaccaagaatgcggatcctttcagttggcaacaaggcatctaaaatctctcatgatatatcagtggaggtgctaaatcaacaaagaatatatatatctgcattcatatcagtgtgatcccggaggaccagctcatcatcatcaacatcatacaaaaaggccaagatggccaaggaaatatacttgtctgacaaggtagaaaggacactcgcatgaaagaaaaaagaaagaaagaatagtgtacggatctccatgtgaatccagacgtaaatggaattagagcattctacggcaatgatctgtgtgtcgcagatgtatgtctatctcttccagctgtgacttcgctaaccgatcatttccacgcgactgagtcgatctcgttccgggcagatttgtacagctctagcctcttgactaaggaatccctcttctccatcaaagcgggatcctcatccaacatcgcgctgagctgtttcttctgcgttatggaaataaaaagcaaatggtgtccaagttaatataaatgtgcaaatcaatgcgacacaaggataaaacaagaaaattttcatttagccacaaatacagtgtacatatattttgaaatggatggttaatattttgaagtagagtgcaatttactcgatattaattatgagccaactttctaatcactatgaaacacgttatctttttttagttttgaactaaggtagtataaaacatacctccttgcttcccacatgagcatagaaacggttaagcaagtttctttttgcctccttcacttgacagtgcaccacagcttttggaatggtgttcctcaatgtctcacaaaccatgttaatgtaagatgatacatttgaccctgaataaaacaatgatgatgtcatgaatatactttgtcgatttaaaaaattagttcgcataattgttgtcatcgaaattcacatatggtcatatcttgacatgtttgctagtgtcagcactcagcagaacgtgaatggcactagtaccctatgttacatcttagattctgcttattaagtcagtttgttaagtacttcgtgtgacctctgtgttgaggtcttagaacagttgactcaatcaattgccattaaagaaacaaaatagaatgttgaattgttaccgattcttcttaaatggttgtcctgatatctgtcattggctggagtgttattattagcccccttatctggttctgtagggagttttctgaaaaattctacagttaggtagctggcctccatctcaacaagacgaataactgtctttcgaccatcctcacgaaatctttccaggctttcatttgctgcagcagctatatctgtctgaagtgttgggaaacgcttcaactcctgtggcatccaagataaccaatgtaaacagtcaatgcaggagtgtcattgagtgatcagtaatatctactgaggttcactgagaattgaaaatcaacacaaacctctgttgctgcaatcgatctacgaacaagttccttcaagaccaaatgaacctagcagatacgagaacataatcaaccagatgtagtgaacaaaacagacgtagtgcaatatggcttgacatatgaaaatgcccccaaaagcactggaatcaaatgccttcctttgttgaataaacaaatggtacattccaattaaatctatagtatccctctctttccgcaattgagcacttgatgaacttaagcactcttatattcactactttgacaagaagctcgtcatggttctgcaatcttctcatatgatgttttagttgttcaacacagggggaaaatgtatatattggataagaaaaggctagtttatgtaagtctatatatcagtcattggaacaggatcctacttgcttaataattaaattaaaagtgcctaaagaagatctattgatgagaagtataccgcatcaactgaagcttccgctggacccctgaagtagtggagcgaactatctataagccttctgtacccttgctcaggggcaatcaagtggggttgataaccatcagcctctgaaatgactttccgaacattttgcaatgaaagatgcttatcaaatggaagctttttcagtgctgctggtaattggtggtcaaagacaccataaatacgatctccacctggccgactaagagaacaaaaaataattgagtgttattaacatgcctgtagattctttgccattcatctatgggatactatttatcaatatatatggcataaaaagcaacagcactcaagaaaagggcctaataaaatatcttacccgccatctaggtgctctttaaaaactcggtcaaacgcacgacacatgtccaatattgtgtacagttgtgcctgtagattatgataagtttatgagacagcatgatgtagacatggtttgggaatagataatgtgctagggtgccattcaaatgaatgttgcaggttgtggcacgaacaacatgaacctgaacacttgcagaaagttacaacaagcaaagtacggtttttcttaccccagcatcacctccaattggcctaccaaggcgatccaactcagcttcaatttcatcaattgttttgttaatcatggctataatacttggaatttttgctctgatcacagcctctaagtgctgaatgtgtaaatagaagtgtatcagcagtcagccttttcaatccagttattttttggggagagggaaagtacaccacaatagcaaaatgccctgacctgagacagaagcttagcaaggtactctgcacccattttatgtgccaagtgaccataatctgggctactttcaaagtactccttttctttgcgtcttgctgctagcatgtcgacattcctgttgatatcagcttgtgaccggttgacaattcccacccaggggtgttgcaaacgatactgcctcccttcaagtacctaggattacatggcgttgaaaatgagtgctgtgtccatagcgtacaagagttaagaaaaaatgacaagtcacatacatcaacagcattggtacccttatccatcaaatcaagctttgtcaacactccaaaggttctgtcacctaaaaatattatgaaataaattgtcaacagataagaatggaacaagacagatcactgcaatactgctgtatggcaataaaataaaatatgcataaaattattgtcatatgtgagaaatatttgaaatgccacagtgaagaaaatataaaatgtacctgaaggatcaacatccctagcaagcttgatagcatctgatgttgctatatcttgattagctggagatatggccagtatgatagaatttggctgaagtttccaaaaagaacaaatgtaggaacaaaaatgaacagttttaatcagaacatgaccaagcagaatttgcagcatatagaaatacattaagttatattagcatgaccataagacaggccagagaacaaaagaataatgtttctagacttgactcgtagtacccactacccaccccagaaaaaaaaactgtcaccacaaataaacattggacaagaacaatagtaaagcttagaattgatatggcagggtggacagtactcattaagtgaatgtagcacatggagctaaaataaacatggcactaatggcatgcaacagacttcttttaccttatcaacataagaccgaaccatgttttcaatatcttggacaatagattcttgttgcccctctgttaataaaaagttcgtgtcacaaacaatcacataaaaagagtacgcatagaaaactagaagcatccaagaaaacatacctacagcaaccttcgtcaatccaggaagatcaataagtgtcaggtttacaactgcaagaaaatgggtgcaaaattacattagtgaaaaaatttatgacaaggactaggatctgctgagcacaaaacgtctctatataacaggtcatatgctgcagcacaagcacaatgtaactactttcaaattatcataatatgattatttgttcctcagggttaagaaatagatttccagaatgattccttttatgtacaccttttgaattgtttctatagtcaatattttgatgcttaattttgttgcatataaagcagggtcgattattaatatcaaacatgaaattttgaagtgctaatataaatctgcagagatgcctcatacagtttggtgtgattagtctgaaaggaccacaatggaggggtttagaccaacatcagaactaagaacaggtggagagcagagcaaatatacattttttttaaaggaaacatatgccagctctcaagttttgaagaattataagggataaatcctgaaaggaatccaaatttaaaaatgtaaaagtaatagtagaaattatcagtctacatcctattgatcccaaatttcatccacaacatacaatttaaagtttacaggcatttgggggagctgagagcgagtcagcgaagcaggttctgtttgaatgaaacattcatagtacacatcacataccaaaagttcaaaacaagcatcaagacttaccatgtggagaatatatactcaaatggatgggaatatttgatatagctttcgtttttccagtaatgcgatcggtttcatcagcaatctctttcctaacagcagctgcaattatacaaagaatttaaatatttcaactgaacatctcttgcaatagctatgttaggacactagtaatgaaccgggaaataactttgctcagatactcactagtatcctacagtgattgtgacttgtgagatctactcctaaacgtcattagttccttagttcacactgcatatagcaatgtgtggatgctaattgtatatgttcttgtttttaggttgataggcaaacttcagtgaagtaaactataaccagggaaagcggtatcatcctccttgctgatctctcgtggaaaagtctactcgttggaattaagacaactttgaagtttgcacaacactaactctaataaatgaaattgaatacacaaatcaacctgctggactgcaaagcacaaatatggcaatgatcccttaccaaagtcagtgaaacgcttccgcggggcgtggaggaactcggcgtactcctgcccaccctccgtcttgtgcagctgcagcacaagaggcctcctcgtcacgattcctaatcaaaccgagagaatgcgcattaatccctcgcaaaccaagccgatccagacgaaatggcgcgcgaaaaaagaaaaaaaaacgagcgatccagcgtcggcattaccggatccacgaggcaggaagtccctccccactatgctctcgagcaccgacgacttcccggaactctggatgcatcacaaacgcaaaccgaaggggggtgagcgccatatccagatctggccgccatggctttggatctgagaggtaggtacgcagggtggtggcgagcacgcgtacctggcctccgacgacggcgacggagggcagcgcctcccagagggaacccccctcgccgccgcccccgtggtcgccgaggacggtgcacgcccgctggatccggttcaccagcccgatcaggctccccatcgtcgccatctcgggcaaagcccccaaccgcctacccgcccaacggctctgcgcgacgtcgctgtagtctccggctcaccggcggctcaccggagcacggcggcggcggcggcggtggagggtgggatctaccggagagtggagaagcggaggcgagagaaatcgaaggaaaaattttttttagtaccagcggattttgaaagcgaggcctatgtaagcttcgcgaggagggtggtggtgatgacgaacgctgcgtggaccgggtgttggtgcaccgggatgtgtgagccgggtcactgcatgtggggccagggttgcagaggaggactgcaggtgggccccagggagtgggagagcagaggaggcgtgggggtaggggaggtttgggtggaccgggtgcatgggacggaagccgttggattcgcgttgggagggagccgacggggggagtggtggtgggaccatgatgtctggtgcgtgacgcgtgagccgcaccttacctgggaggctggagcgtgcgctcacgttggatggggaatcgacggtcacggtgagatcggctaacgttcggaaacagccgagaggagtggcgaaagagaggaactacctccctacaaaatattggagctttcttatatcttactattattagcttcgttctaaaatataatattttttaaattatttaattaaaactaagattaagaaagaaaactttagtattatgaatactaagataagatgagaaaacatttgaatgggtgataattaatagaacaaatactattatgaatagtgcagcaaaccaatttcatatcatcttaccttatattatcacaatctcaaatatagttacttttgggttatgtaggtggacaagcatttgtccaagtataaaaccaaaagttctcgaggaattagaactaatggcccttttatttggaggaaaccataataattttggaggatttcaaccctatggagaaatttcctatgacctttgaaacaaaggattgaatcatatcatatcctttaaaatttctatagaatgaacaatcctatcagaatcttatgttttgcacttgtattcctaccataattttgtgtttttcctatccctccgtttttccattcctacaattcaaagaagctctaaaggaatgctctagatcaactgtttagatgccatacggtaagagagaagcataagcgtaactccaacaaactatctatcttactcttcgaagcaaaatttgacaaacttagataaaaaaatcctcgaacaaacttgccaagccaaatgagtggccaaaattctcacttggatggccaaatctaacaagttgatagcctcatcggttgtccatatccctagtaagtcgttttggcttactagggaataaaaattaatttaaaggtaaaatttttatacatttgttcgtagcgatttaagttaatataaaaagaaattacgttgaaaatatcttaaaatcaagttaaaaaattcaaattttggcttttgttttgactcattaggccgaccgatggggcacacctcccccaccttctctcttccctcccccatccctctcaagcacaacatataggtcccactgtcacaaactcaacggagggtgtagatggagaggttggagcacaaatgaaatatggagaggaaattttttttatcaacttgccaaatgtggagatggagagtttgatttgggtatgctgttggagatgctcttaggtgaagatctcatgtttatttcctaagaattcaaatagagctcatctcatatcatagggacttcagtttcaaaccctccaaaattatttccttcgttctagaggagccataaactcggaacgatgtggttccaagaggggaggaacgggaagggcaattaggatcaaattagccataattagtgatatgccatgccattctattgctcaatggaagcataggcattagctgggggagccattgcccattggtcaaagaaagcaaagagaagagccaatccaagagtaatatatctgcatccattttccattgttagatacaaactctaaaaagggggagataagtaaaccatttccattatctaatggggagataggaaccacagacataacatgacccagagttacgtgaatacaaacttattatcattattcggcagattcttggtgaagtacaacagagaatcagatcaataagtacaacacatacattacattacatactcaacacatcaacaaatggcacacccaaaattctggagtacataaatagatgaggcgacgcctttattccaaaagatgaagcaaatgaccctactacctgaatggatcgatcttggtaagcctcaccaacttatgggagcaaaggaactttaacagtcggtccggttttgattcgagtcagtggcattagatcttcggatcgcgcaagaggagccggtatatctcgttgttctgctccgacatgtactcgtacccaagattgtcagcacggctcttgaattcgtcaaactcctccggcggcacttgtatgccaaccaaaacattcgctccggtttcaccctgcagatgataatttacgtatatgctggagttcactaagatgtttaagggttttgcaagttcggcagaactaatgtaaccaatatgttaagtctcaacacaatttagatgtacatttttgtcaagtgaaaatggaaagggaatattgtacaggatagatggcaataaaatgacgatttcagatgcatgagattgcaattttcatacaagactactttacagcagggaaactgatgaataataaatctgtcacacacctgtgcacggtaatggaaaaggctgatattccagcgggggctgaatgcatccaaaaatttcataagtgcaccaggcctttctgggaaaatgaaccggtaaacaagttcatctgttacttctgacctgccaccaatctgaaaatagatggaaaggaaaagcaaattaaggtagccgcatatttgaatataaacaaattaaaagaacaccatcccttaagatcagctgcaacaaaatttagcagaggttcacaaaattaacttggacatatctgtgttttgggaggtaattttttttatttgaatcacaaggcaaaaccagaggcacggacatatgattgactgctttgtgcaccaaacaagttcttatttacaatgtagcagttgataatttcatcaatttatctgcagccttttcaactggaacatctctataaaaccagttgtaacatgtttgcatgcacaaattcagtaatgaattttatggcacttgcaatgctatcactgaggatgtttagggacctagatgaaactgtagacacgtttaatcactgttagtgtcatttactctaaaagtgattagatttagtttccaaaaaaatgtgtggcattgttataaaattggcagagaaatccaacttacaaagtatcttagatgatcctttgccaaatcattgtcagtaagatcaacagttctcaattttgaagattccatacgttccaccattgctttaagttcatcgtcagtgtagatgccaacactgggatatataaaatcaaagcaatcgtatagttagccaggagcccaagaatataaaagagcaagggacgccatattctttccataaataagtgtcaacagaaaatagtaaagaaattatatgttggatagtgagcccaaagatccttgatgttaatgcacaatgctattaacatattagtgtccatgtacctgtaaaggacaagggcatcttttgcattgcaatcgtatctgtatttgaattcagtaatattcatccggccaacctgcagagagttggaagaaaagaaatgaaattagaagttgcaaatttttacatattggtagaaataccgcaaggcataccagctctgcaaactttttgaagcttccctgctcctctggcaaaaatgtggcaagaactgcttctcgttttcgaccaacatcagccagctcagttactaatctgagccgatcaaagttcatatttgctccactagttattgcaacaacattttcccctttcaagccatagtatttgcagtaagcttcagctcctgccagcgcaagggcaccagcaggttcaagtatgcttcttttctcctcaaacatatcctgcagccatgaccaaaaaaaattatagggcagaaccgcagaagcattataagggtaagattggaatatagcagtagtccgatcatagattcctagcaccctataaagaatgtcaatggaataggattatacattagttgaaaaccaatgcccacaagcaactcacaaaaaactaggctagtgtacaacatttataagacatgtccgctacagagggttttgaacaagtaatctttttaaactatggagcatagtattcacagaccactgcaatatagaattttgatgcaggaaaccggtgtatatttctttttcttttattgaaaccagtacctttaatggagcagttgggatttaagttagttgagagaaacaggttagtgttcagttttaacaacaatctaaaatattatgtaaaacaagacacaaataatcgtgagttcatacctttattgaagcacaaatagcatctcgactgacaagaacaataccatctacaagttcccggcacaagcgaaatgtttcctcccctacaactttgacagccacaccatcagcaaacccaccaacttgctccagcatgaccctttgaccatgacacaaggacaatgccattgcatttgcatctgatggctccactccaattattttcacctgtagaagagctgctgtaaaatatacagaacattccatcccaacctgactagagtgcaacaatgcaatgaaacacatatattaattgcaacactgataacagctacaactaggtccgaaaaacaacttaataccccccaatttgggcttaaaactattgccatgctccatgatgacatttataaagaggtttgtttcctcttgcattaaaaaaacgaacttggccccaaagggaaagacctcccaaggtattataattaagaagcacctgaaactagaccgaaaatggtcatgaaagccagcccctccctgtggatcagtccttaacccgtgctttgaggcttaaagaaaactagtctagaaaaataggaagctaacctctgggcgaaccctttttacataggcagcgatcccagcaattaatccacctcctcctacaggtacaaatatggcatgaagtgggccttgcaactgccgaacaatttccatgccaatcgttccttgtccacttataacatcaggatggtcaaaaggaggtatgaatgtgcggccttcctgctcgcatctttgttttgcatatgattgagcttcatcatatgagtcccctttgagtacaactgttgcacccaatctctccaccgatcgccactagaattcaaaacaataggtttactatgtaatgagcaaaaggtaagataaatcacatagaaggacaggcttaaagtgatgaaatctgcagatcaagaaccttgatttcaggcgttgtcacaggcatgacaataacagcatcgcaaccgagtctttgagcggaaagggccactccctgggcatggttcccagcagaggagcagatgacacccctctccaactgttcacgcgagagctttgccatcatattgtatgctcctctcaacttgaatgagaatacctacacaacaagtaaccaaaattatatctggccagtaaaactgccaattgtactgtcagaagtcagaagagcaatatatgtaaagctacagaaaactaatgctaaagtagaaactaatgctaaagtagaaattgcgtgtacttctcaaatttcaatcaacatgaaactagcattcaataacattaaaaaaacagtagacaattatgaaaaacaataacaataacgaacaatacatgtacagtgcatgtgtatagagagataattaaatatgcaatcaaggatatccccttggtgctattgctatgtcaatattttcttattattttgaatgaacaggcaggagaactgccaattatactgataaagcaggagcaaataaaataaacagaaggcataacaccaatacatcatgctagtcaatgacaatgataatgacggtagaaagtccttcaggtatatcagagtatgaacaaactttcacgttccttgaaggcttgaaacgggtagcccatccatgaaacataataagttcaaaactttgataagactccaacaaaacccaagcgcctaaacctgatgactctacattcctcagtttaatattagcgcagatgaacaaaacattgtactccccccgtccctaaatatttgacgccgttgacttttttaaacatgtttgaccgttcgtcatgttcaaaaaatttaagtaattattaattcttttcctatcatttgattcattgttaaatataattttatgtatacatatagttttacatatttcacaaaagtttttgaataagacgaacggttaaacatgtataaaaaaaaatcaactgcgtcggagggagtattttccatacaggaacatcaaacaagcaccctacgagtcaataccctgtccagcactgaaagtgcactcatctcaaaatttcagcaatcaataggatgtaactatacaaaatcccttaaaaattgacacgataagaaccctgtaaattaaatgtccaaccaggagtattggttataagttgatgaaaaacatttaaaattaaaccaatttgagaacaaaaattcacaaagaagaacgagcaaaagcaaaacacccttaaacctctattaccccgagaaagtttgacagcaacgtgtccaagcgaaggtggacaactaaagaaaatatcccaatacttatccaacaatcaaagaatccagagaatccaaacattctattcaagcccactgaaaacaacacaacacaccgattccgaggtaaaaacccccccgaaaacccctaaacttatcgaacgaatgttctatctaattacacgattgtgacgatggacaatgccaaatca

SEQ ID NO: 4838 - DNA, 1130 bp, Oryza sativa
gccgtgtatttggccacctttccggccagagccaactcggcctgctgtttgttgccccagaggaggacaacatggagacgatcgtcgcgcaggatgcgcttgtaatcacgtggaactcgtcgccagacaccgcagatcttgcccgtggcattctgatagacactgagagtgcccgccaaggtggtctccagttgatgctcctccaggattacacccgcatcatcaacgaattgaatggcacgcggacgaccgattcgcgatgaggtgtagaaggagtagtatagattcttcttgtggaacaggaaacgggcggtggccaccacattctgcggattgtaggtggtgtacatggacttcatttcctcacccttgaggaaataggaggtgcggcccgttagcaacgcagcgtaatctataaatagggatcaaatgaaaggtggagataatccaggtgttagataaatacaatagttctcttgttaattaaatgtaggagctggtgaatgggattacaatttcccgcaggatttggcggattctattgggatctgggtgggtgtccggtacttttgtacttacgtttcatgttgcgctcttcctcttcattgggcacgggcacatccaaggctacatccgtatctgaaagatggagggaatacaaatagagaataagatgatgctgggcgataaggtacgaccttaaatggaatttagatagcaacaaatgcttcaaagcaaccgaaccgccgccagccattcaccatccatccagccagccatccagccagccatccagccagccaaccaactatccatccacaatttgtggacacaattccggcattcaaccaaaattccagttgaatgggtgaatggtgaatggctgaatggacgaatgccaggggatcatcatgaatggcaatgcaactatcaggtagagatcccacctccgaactaagaccttccatttccacctctcgcttccacccaggtggcattcattaatcgtgcataaattgagggcaggtagaaggtagagtttctcgaacggcaagtctaacctacatctaatagggaagtgctttgtatttgaggatgtgcggactctggggttctgaattcgtgggtac

SEQ ID NO: 4839 - DNA, 12139 bp, Oryza sativa
ctctcttctctcctgcaaggctgcaacgcaacttccaaggcttaatggcgatggtcagtcacacaccgaagaaaatgaaaagctttgcagtgcagagcaggtagttgatgcgcaaagaggagtgagttcaggatcggttctcttgaaagttcagttcaggatcgatcgatcgattgtcacatgaagaacgataacaaaagtaataataataatggagactccctctgcaggtggtagacccgaaaataatacagggcccatggagcctactgggtacacggatgaataatacaaccacgcatcacatgggtagagatggagagattagacggggagaattcgcattatgaaaagatctaccccaatcgctagcttagccctcttgttaattagtgccgctctaacctaatcgacaggaaatactagtcattagtcaaatggcacaccatacacgtacactaaccacccaacaacgcaaaatattgatgcgtcggctgttacattgcagatgcaagatcgatcggttcatcgatgggttgctctgctgctggcgatcagggtggatctacgatgttagcatcggtatcaggtaattccgacgatttttggcacctatggttaaaatgcttattcttatattataacacataaatataagtataactagaatgctatgatatctatagacacatcatgatatcagtgaaccagatccgtcgttgctggcgatgcggatgagcaggtggtgtggttcactcacgcggttgtcattctctcgcgccacgtctgagctgtggtggtgtggcgtggcacgcgattctgtttcgccggcaatggtcccggtctgcggcctgagcccggggggatcgatcggattgaaagctaaaaagcgctgaaaagaggagccgtacctaaccgccaccgcggagccttacgtacgtactccactccgcggagtacacacgcacacgcatctgttgctgttgctgttgttttggtttagcctcgtgccgtcatgatgcgtggcaacgaagcggctgggtcggcgggcggcggcggcggtgcggctcgcgtgatcctctctctcgccgtgccgccgcggcctccggtctccgcgaggccacgacgcggtcgtcctggaaaaccaagggcttttgttcgaaatgatgccaaattacaccctattaaaattttaggaacttcggtagttttaagctgtattcgtttgggatggttgggaaccaaactccccgcatggaaaacggagcaatctattagcatgtgattaattaagtattaactatttttttttcaaaaatagaacaatatgatctttttaaacaactttcatatagaaacttttttgcaaaaaaacgcaccaaaatagtagtttgaaaagcatgcgcgcgaaaaatgaaaaggagagttgggaacaaggggaaacaaacttaatgtgccatataaagtgtttgatttgctaccgatttatatgtttgctaatatagtaccaaatttgataacaccaaaacctttggcactgccaaaatatttggtaggataaaaatcggcactaaaccaaacaagtcctaaaacctcgggttgtctccttttaggcgtggcatagatatgaattatccctgtcacgtttttagaagtaggatttctcaaaaatattcgtctgtaacagcggttatatagcctttttctaaggtatgcaaactttagaatatttgattcatccttttcttttctctatccaaaatctatcaaattattcagttagaacgcgacgcgacctaaaatggggataagtctctggcttcgttcgcaacagatgaatttacccccccaaaaaaaaacgatgcatgcacccgtggaagtgtgtctgtcgacttttttaatccttaacctgctcgtgcgcaagatggggatggatcacgaatcgggaatggatgttttaccttttccctgaaacttttccatctccagcaccgcgaaattcggtttagattagagttgaacgatcacactgaaggctgtagtggaagccaggtcaaagggagagctcccccgtgcagctgggggccggccggcttgactttcacttgcaatgatggggacacgcactcggcggcatcagccgctccggccggccacgtcgccggcgccgccgtgcagccttgcccgtgtcgccccgttccggtcaaaccagcagctgttctcctcgccattcattgctattttttattaccacctggtcccggaattattatgcactaatgcacctgaccacacgcttgttgaaactgcctgagacaggtcatagagtcatatagagaacaaagatctgggtggtgaaattctgcactgggtccggctctaattcttgaacagatcatggcatctgaatggccaggtttgcatcgaggagattggagaatcttaaggtgtatagtagtatactttctgagctactcctaactggttagtggcatggtggttgctactggaacaaacatagcctgatagccaatgacctgcctagcctaaaaactagtcatcctgtactggatccagaactgacccaacaaacctgagcctaacttgagcaatcaatgtatcgcacccatttattagagccagaaaatagccccaggcccagtggcacgtccatgcacaggaacggtcccgtgcttaagcaatccggcgctagattaggcacacatcactgacgcagacatcttcaaacacaggaagttctagtgacagcaactcgcgaacaaccaaaaccgaaagaaaagtccgaaaggttcggctgaatatatactagtttagccagctaagcaattgggcgtcagcacatggctgcctaacagcctctccgcgagtgacctcacgggaggaagccgttcagtacgagccctgaaagctgcagttcagagtgggaaagatgtgcacagcgtacaggtgatcatggcaaaaagttttcaacaggaaaaatatgggtgcctcaacaaataattgccaaaaccgatattatacatggaagtgggccaagaacaccactagagcatatttaaaggcattgtttactatgatcaactcccaaaattctgttttcgattccacttttccaaaacttggggggtaacaactaattgaaaacacagatgatagacagttctatcgccagtagcaacggtagttagtaccttatgaacttggatagcagcatcaatcggtggcactcaggtaccttctttttcaccccccaggcatgcagaacttgagtatctttatgcagaaaaaaaatccaacagcccagtatttacggaaatagcttctttaacctattgatggccacaccagctgtcttgttcatgggttctagaacaagggcgtggctgaaatctgcaaattgtagtaaaatggatacacaataagaacttgtacaaaatagtggacacagtttgcagattccaagggagacctgttaatggttaatactgtgaaatactggtaaggtatacagaggaagaaaggtaagacggaccatcaacagcctccttgtagtaacccagcatctcccttgcagtgcctctcctcaaataagcttttacaatctgaaaaaataaaaagatcgatgtgaattctcacatcaatgtatataaaacactactcaatgaattgcgaaaaggatcacacttatcagaatctcaactagatgtgaaagcacctactaaaaaacttataaacagcactgcattaatcagaaacagcccaaattctttggatggttgattcaatgacagaaccagctcatcataaagtaggaaatatagcatttcgagaaaagaattggaagaattgtcctatatcttgtacttccccttttgtttcattatcaataataacatcttaatagtagaataatatatacaaatctgaatgtgcgtataaaagtctgaaccaagaaagcagatcctaacctttggatcaatatcgatggcacttgtgcaatctgcctcagcttggcggtaactgaaaggggtccgaaaagacaaaccatgaaataattgatgcgcgaaaaaaataagttacagaagccagctcatcaaggtaatctttgagaaaaaagatgccatagaggttaataacatacctagctagctctagaaaagcagcagctctgttgctgtagtatgtagccactttattatttaatttgattgcttcagtatagaaatttattgccttttgccattgtttctccttaaatgcaatgttaccctgtcaaggaacaagtaacagaaagaaaaactcagtaaggacacaaaaaagggaagatattaatgtaataaatccataatggtggctttgttttttacttcaacagtggttcaaaagaacaacttgaacataattttgggccattacaaatagttttactgcactattagacctactggttggtactgatctgtatacattactattagatctgtaccagtgagtatactctgacatactgatttctaggttattactattagacaacctttttttctcttttcctttaacatgacaaattataagatgtaacacctaaaaactggcatgtatcgactagtgcattatcattagcctttttcttcaatttccatctagatggcaagctaagtgctactacggaaagtagtaactgtgttgagcagatgttagaaaatcgaaagctatgctaaaaaaaaatcatcaaaataagaaaggaactgactttctctttagcagcttcagcagcttcttcactcatcgcctgtttactcgagacattagactttgctagagcgtcaacttgctcttggatggtagcataaattgtttgaatggtgtccaataaaaatcgatcaccaccatgccttgcaatcaaagaaactgaaactggacacttatcatgtgtacccagaggaaccgtcacctgaaaagggtcatcaaaatagttgaattagttaagatgcaataagggtttaccagaaaagcatgcaagtccatgtgcaatgaagctaaagctagccttatcagattcatgccctcccaaacattcgcctgtatccatctcaggccaaaacataaccacggagagtttgctcctccagaatcaggagcgaaatatcaccacaaaatcatcaattgaagtcagataaaaactagcaattttcaactttcatggttagctatcagcaatgttaacttattcatatgctatcattctgtgttattcatgtgtcttaaccatgttagtgccttaggctgcagcaatttcgaaattatttttgcaagtctagtcacttcactggctatgttggaactgcccttgtactaatgatgaaacttgcatgcagagctttagaaactcgattgtattgatgcccagcgaaattgcaattaaagttgcccaataaaagcatactattgctgactttaagaggcatgtaaattttgtagagtttatgttgttgtttgttaacttccatgaaagtttcacccgtctaaaatgccaaatggatccaaagagttgcaaaattaagcagcacaacttccattggaggaaaagaaagaacaggattatatgttagcaacataacctttgaatagcatatgaattgtactatcatacctggcaacaccctgacatgctagctaaagatgtaagacatgatgtctgaacattgtagtcctgagatgaaagttccctggcatttagttttggggggcatcccagaacagttggaatgaccagaattccatcatcctgtggattaagaaacatcatgacaaagaaactaacagtatgataacactaaataagattatcacagcacattcaacgacatgttaacgaaatagcatcataaaataagtaatcagtacaataccaacaaataagattatcgcagcacatccaatggcatgtaaagattatgaatcagaaacaagagcagttcaggaaaactatcaccacataacatggatcctcaggtagacacttttactctaagcctttctgtttcacaaagaaagttctcaaatgtatacttcaggctaacagtacagtactaaaagtaaatgaaccactattttcatttccagaagaagctttgtaactgggcccaacattgtgttaactgctaagtaattggttcaaaacaataatatagcgaaggaaacaagagcaacatgaaatatcactgatgaaaataacatatccaagttcacggttgcagaaatatgttaaatatttcaatttgtccatatattcaattgattctagatttcatccacttgttttcaaacaacataaatttcaaggaaatgacatttgtaaaacctaaaaagcattagatatgctttccatctatcgttcagaggaataataatatgtttttcaataacatttatccaataaaaccagcaaaactatcagtgatggccaactaagtgtgttgagaaatcagtcagaagatcaaacaagcagttcctgacaatgtaggtactcgctactgaaatctcgctaaattccagttcatcccaaactcaattctttaccaaccttaagaagagcaccgagagctgcacggacttctttccttgcatcttgactgttattgatagttgactcaccatcatcagacaaattaccaactatgcatgcatcaacagcaggcttaacagagtttatccactccatatgttgatctttgaattcatgtctggaccgaataacatgatactattaatttttttggcacgagttaaatagaatacaccaaatagaacaaacagacacgagaaaaattatcagtttaattattaaaaaaaacaagccatgtatataaacaacagagtttgtctagtatgacttctaaaattagaaaacctaagccaaagccaaagtaagaccacataatagagcatggaatgtgttctttgtttgcaaatgccaaagcttgcagtagctaagggaaaaaaaacagctattccaattattaattatcgtgatctgaaaatagatatgtaggagggaaataatctacatgcaagcaacgagggaaataatctacatgcaagcaacctacggaagtatgtagttcaagtcaactaacatcattgtttcataaacctgtgaacatcatcagtttccacataaataactatacaggctagaactcacagaggaaatttaatactaccatattttatatgtaaccagtagttacttatttatttaataacatgatcatgtagggcaggagcatacttgtgaagaaactgcatagccctagaaagtgctagcaatgaagaaaactttgagtcaccatgaccatttgaattgttcctcaggctgggtattcttgaagccaaataattttcaagattaacatgacccaggacttgtcctaatgtaatacgcaagggaaaaaaatcaacatgaggaagttggtggccagcaaaaactaagggaattttaaaataagaatgacaagtgtaaagaggagatacatactcccaaatagcttttccacagatttcgtcaccacctgagtcaatcttcttgcatgcacctttgacatttcaaagcaatcatctgctatgtagaaatgtctgggttgtcgaatatcagcgtagggtagcctcagaaggagatggccaacacgacgcagtacacttggatccctcgcaaaccaacctacagacaaattaattaaaaataaatggggcacggcaagtttacaaatttgaattaagagtgattctggaagagattacaagtcaatacatattttgttctttaaaagaaatatattttcaaaggtacctatggcatccaggctaggagcgacaggaataacaccattgttggggacaacagcatgtgaaggccggaatgccaagacgccacaataactacctggtacccttactcctccaatggtatcaatacctgcagaatcacattctcagcacattatttatctattaaagtatatatgacccatgcacacaagaccttatggttccacaactgtcacaaagaggatgtattaattttggaaaccagtgaaatcatggacaggcaccaaagaaatttcaagtcaatgcctgaccctaaacatagaattgttttggatcctctacagtcgcaatgaaggttaacatctaatggagggaagtcagatggatcagacttggtagaatgatgcaatgtaaaggaaggcagtcacatcagaacaacttcttttcttgagatgcacataatagtaaaccaggaaaatggattgaaaaaaaaaatcatacatcaaccctaaaactgacaattgtcaattgtcaatcctgaaatccagataatcactaccacacataaacaactagtgaagtaattcaaatgtacaggaaattcagatttatactaagctctgatactaaaggatgaggagaaagtggcattaaacaaaatgttgcccaaataaggacagcatgttgcacgcataaatctctagacaatgaattaaaatagtcagctcacctaaggaaaaatctacaatgccagcagcaacagcaacagctgacccacttgaacatcctccaggtactcgatctggagcagcaggatttgttggtgtgccaaaatgtttattctcaccatggatactgcacgtgtattgcacaataagtaagatgtaagcacacattagacaagtgaattatggcaaactaatcttataaaatgtagagaacatttctgcttttgtgatatttcataaaatgaaatagaacatggaagggtttagtgaacccatatgcagaaagaaaaaatggttttacctaaatgccatttcatcaataacagtttttccaacacacatagcaccaccatctacaagagatgaaacgactagagatgtttgtgttgctgcatcatgtgtctttgcccattctaagctgccaaaacttgttatataaccagttacgtggaatctgcaaataatcaaaacaagacatctgaggtcaaggataaataaaatgatgtacacgacgaatgttaacaccaaattgataataccggtctgccccttcacagtgctgggaacaagttaagtacaaaaatgaaaaggtgcaacagcattttgtggccaatagtgcgcaaatttaagaaacacactttgccatttttggcactaaaaaagaattgtcatgcaggcatgcacagttttagataaatacatacatagctgctgcggatcaaatgtccatttggataatttgtgtaacctaaaatttgtgccagtagttgggttgcagaaaatagcattttctccatgaagcagatatgcccacaatacaattttcaggtcctaaaataattaagttcagattggtatctattagcaagtatctattaaatttataaggatataagagcctcagaggagaactaagttcacttcagaagaagtagtggtatcttgacccagagaaaataccttattccagttttagtgttagaatatgcactgaactgtaaatgcaccttaagtaggttaaaaactaaaaggttccaaaaaaatgtctggctttgagttgaaccagatgagagcatatccttaaaagttcaaaactatgatattatctggtattttagaacaagataattaaccatagtgtttataagtttgcatcacagcttcatgactgtatgaatgataaggttgacattcccccccccccccacccacaacaatgctttcaaaaaaaaattttcacaatgaagcatagaacatcttattatttcaaatttgtaacaccttgtaccttttatacacaatagtgtctattcataaagctgcaaatactttagatgggtggtttcaatactcttccaacgatagttcaagaattctttggcaatagaaaaaaatactattctggtttcctttgaatggttaagtaatcagcatcttgaagcaaattatagtccacgtgctaaaaaactgtaatctcaacttcaaagctaaactttaggaaacaaccatttgtcatgcaaaacttaaagcggatggtttcatgaataaaaggtataagtatctaataatgatacattcatgtaagtttagatacatgcatgatacattgccttgccaaaggcgaagcggccacaggatgctatgccttcttgcataataaattcaccttaccacaaaccatggtacagttactaagcaatgtaatactatggtagatcattaagtaatcgaataaacattacatggcattgtttcccatttcagtgtcagccaataatatttggcaagtgatacatgaatatatctcatttaaagggcgttataatgaactgtaagaccatctccactctgcatcttttggaccaaaatagtgtgatgcaaacacacctagctacaaactactcgcgttttgaaagctttccatatatgtaaacaaaaggatgatataattcagcaaacccaatgtgccatctcgagtaaattcgtgcctccctaactgacctgataccaataccccaatgagaagtagtgataccctgatagcatgatcaaactgatcaaattaccgctcttaaaccggtgctagcacgctcccaaccaatccaatcagggactaccaacttcaaatcacgcaaaaaaaaaaacacaagcgaggtcggggagcgcggagagagcttacgcgtcggcgatggcgaagcagagccccgtgagtgggtgtcgcgcctgggggggcggcggctgcggcggggggaggagctcgaggcgggcgatgaacgcgccgttgtcgggccgcgcgggccgccgcagccgcttcgccgccaggaggaccccggcgatgccgaggccgagcagaacccacaggttggccgccgtcgaggacgccatggggtcgggttggggtagccgctcgcctgctccgcgcgggggcgagtggggtgggggggagttcgagggttagggttttgccgcgaggcggcggcggcggccgcggaggcggacggcgaggcggcggcggaggcggaggcgtggcggaaggattggataataccgggggttcgctgctggcttcgaggacttaaatacgtctttggaaatgaaatgaaagggaactagctttttctgtgtttagatctaaagtttgaatccaaacttttagtccttttctatcacattaacctatcatacacacataatttttcagtgatattatctctaatttcaatcaaaatctaaacttttgcgttgaactaaacacagcctttatcaaatgggttatcaaaggaatttgtctctctcttttttagagtttttttttttgcagggcaaacataatttttgtctggtggtacaaattgagaacttgacggtattgtatcgtgtttacgtatgtgtctaagttgcaaataatgtattgaaaagttgttacagcttgcaatgtacactaaaacctaagaatgaattaaaaagcaaaatctgcccttcagaagcttttgtctaaggtacgtaagccgttgaaatataagcaatacaaaatactgaacgtaaacctaaggctgcgaaaaatggtgtagacagtatttttaataccgtcagtttattgttatataattttctatgtgcaagcagtacacggttcggttatatgcagaatgaacgatcgtataggggtctaagaaattagggcaatttaggtttcaatccaaaccattgtattttttaacatatttttggtgtttcttagttcattctctttatctccttctctctttgtttagcttaaatggatttatttttcttggccgcaaaaagtgttacataataatcgtaccgactcaaatatatgtattttctggaaacattgtgaatgtgcatttcaagcattgaagtttttttttagagtgggttttataaaactccaccagttatggacaaagttgtacaaaacaaaagggattttagcacgtaactcatagccatgaatattattgctcaaaagtttcacatgaccacaccattaaccaatttaacatacttatatatcaaaatttaaaaaggctata

SEQ ID NO: 4840 - DNA, 7793 bp, Oryza sativa
  unsure (1)..(7793): unsure at all n locations
tcttcgattcccgtcgctccggtgagtctcgcgtcgattccttgcgcatgaaccaccctagggacctcactaataacatcagagcacatgcatgtttattagatcggtggatcaagccgtcgccgttcaccccggaggttcttgccgccgccgagcacgattccggcgacgagacggcgacggcgcgatggagaccgacccgccgccgccgccaacccgacccccgtccgtcgctgccgccaacccgacccccgtccgtcgccgccgccaatgcctatgtggcccctgctcctgtgaagacaaacgggggagaaagagatgagggagagagagggaggaggaagagctggccccgccgccgaccactccctcgaccgccgccgccctagtgtcgctgaaagggtcaattaggcctagaggagggggggtgaataggctaatttaaaactttatgcggaagctaaaactgagttagggtcggaaagtctgatccacagtcagactatccgaaaatatcagatagtctgatgttggatcagactgtctgatccactaaaggaacactacaagtagatctagtgcacaaacaagagtatggcacaaacagcgactagatctaaagcggcacaaaagcaaagctaaataataggagaagagatatcaccaacaatgaagttcaccgagttgttcccggagttcaaatccttgaggggattctactctacgttgaggagctcactaagagccgggtctttgctaaccctttcctcaagaggttgcactaagcactcctctttccactaaggggtatctctttccttgtggaggcgagatccggccttcacaaacttctcccggccaaccacacgtagatcggtggctcgggagtgacacctagccgtttaggagtcctcaacctccaagagtaacaaacaccacacaactcttggtcaaaccctagtgctcaagatcgagtgaaacacacactaggccctcaaacaccaaatccacaaccaccaagatctactacacaaagaacaaagagggatttgagagagggagagagagctcaaagatccaaaacactttagcaccaagctcaacccaaagtgaatgtgaatgaatgagttgggtaaccctagaaaagggttaggtggggggtatttatagaagcccccaaaatgtggccgttgggagagaatcttttcatcccacctcggaaagtccgaggtgacatcggatagtccgatgtttttgacccccaagcaggccagagacagagaacaaaattctagaggatttcggacaatccgatcgatcggaaagtccgatgtcatattggatattccattatttttgaaccaagaatttcatcctctcacagagactcaagttccattgaatttcggagtctctggatcatcggatactccgatcacatcggatagtctgatttaaaactcactcaaaaggaataaaaagcaattcaaaatagagagtgaagttctgagaaatttcagatagtccgacgtatcggatagtccgaccttatatcggatagtccgatattttttagccaacactcagaccgaagacagtgagcaaagttctgtgaaatttcggatagtctgagcatcggatagtctgatcaacatcggacagtccgacagacataaaacaggaacacttcaaataaatgattttgagcactagtgttctaccaattatatgcatgtggcatccctcttaatagtacggcatcctaatactcaagaacacaagatatacatggattagaagacaattaccacaaaagatgccgcaatacttattgtgttgacatccactcctttttcatccttgcatacatctcaacaaaaagcattagttaccctctaattgtgttgtcattaacaccaaaataaatgaggggtcctagatgcactttcattctccccctttttggtgattaatgacaacacacttagaagtaataaaagattaggattttggtggagctccccctaaatatatgctagaaatgaaataggagagctccccctcaatctatgcactagattagaaatgacaatataacctcatgcatatgccaatgacaagatatttcacacatttgagcatggataatagataattgcacataacaagacacaaaaacccaagggtcgactagccatcacgaaaggagatagattagagatttttgatgataggtggttctccccctttggcaacaaggcaccaaaagggaaaaaatagaggatcactcatccttatcagaatcctcgccctcctcacttgactcctcagcatagtcaccttcctcctcctcttcttcttcctccataggagccttgccatgatccgcacgagaggagcttgcctcagctgcaaaagggtcctcaatcacatcctccccactgtcctcaacctcagaaccatcgggagaacacggcaaatgggtgttgcgaaggagggtcttgatccgtcgagtgtccttcttccttgctctgcgttccttggcttgccgaactgagatggtcttgcataagttgaagatggacttgaagaacctcaaggacgagttggagtccggcttggtgacggtagcggagggaccggcacgagaagaagcacgagtggttcgtccagccggcacagcagcaaccttgatgggacggacttggtaatcggtatgtgccacctccttgtgaaacttcttcttggacacaatctcaatcatcttcataatgtaaggcccatagccaagtcctcgcttaggcatcatggagataagccggatttcttcaaagatgaagtcaaaggcgtcaaagagctgtgggtgagccttcatcttgtaaagcaaatttcttgtataggcaaggacgttgctagcatcaccttccttgggattgagagttttgcgcaagagcttgttgagataggcatagaagggaaggagacctttgatggtgcctaactcatagtccacatcttggtacaagaagtgaagagaatttgtgtccatgggcttctcatcatgaatcttgacacgattggtgcgagagcgagtcggaaaccccaaaatggcagcaaacttagcatatgtcacggagtatatgatgccatctgtcatccaatgaataatcttttctttgttgggctcaaaataaagtgtggcatagaattgtgcgaagatttctttgcaccatgggtattgcaagcccatgagttccttcaagttttgccgagcacaagcttcaatgacttcatcaataattgaatcatgcaactcctccatatacttccaatcaacccactgcataagaataggccccttcttaggtgcattcactgtctcatagtaatcctgctgaaaaaggttccaaaaccgaggatcagtggacaactgttgaaatttgtagagatctttcttacgctctttctccacttcagtccacttgcggttccaccttatgactctccgatgataattaggatctctagagggagcagtgataaagaaaggcccttcttcctgagcggcttgctgagcggcaatgtcctcttctaaatgaatctcttcctcaaaggatggtgcatgagaaccactaccttgacccggctcagaagaatccgtaggattgcctctccttacttttttagcaggtgcacttgatctttctccactgactcggctgcggcgaggaggaagaggagcaccatgctccacattagccacttgagctgcttggtcagaggcttgagcttgcgcgtcaatggcatctttgcgagattcggacatacgccgtatagcatgacgagccttggaagcgggagagcgacctcgagaactcattgtcccacggcgagagtaaacttgattcttgaactgacccgtgatcatgaggatacactgatttagaacagaggataatgattaagaagaagtggaagaagaatatttaaatgtgaagcaaggagaaatttggactgggccaaaaggaggtcggatagtctgatttgacgtcggactatccggtgtacatcggactatccgacagcatatcagacaatccgacggccttttgccctagaccaacaaatctcgattcacacaaacatatccaatggaatcaaaggatcttctaggtactagatctaggcactaaaacaagaagattcaccgaaggaaatcttgaaataatacaccatgagggagatcgagggaaaacaaggaaatacctcaagaaccactaagagaatcactggggaaccagtgatttggaaggagttgagggagggaaaccaccctaaagtgaaggaatagcaatcggagactccgaaacgaagatttttggtggcctagaactagggtttggagtggagaagaggggtggagagagaaacgactgagacaaatgactgaaggggtaagaaagagttacccccggggaggttaagtccccttgcccttggccccacgtcggatagtccgatttgaaatcggactgtccgattgtagtcggatagtctgacttgatgtcagacagtccgacatcctttgtggcagagacaataaaggatggctcaaggaagatttttttcaacaacattttgataggatgaactcgatggctagactattacttggacaaatgcagcaaaagaaagaaaactaggcaccctcgagagagggaatgtacgaatctatagcaaattgtgcaaggaccaagattcattagagaatgagatccccgtacacatagatttcaagttatccacatagattatgactagtgtttattcatgaattgaatgttcactttgtcatgatatggcaagcaaacctattctagtaaatgaaaaacacatgcatgcaaaagatcaagccacattccgagaatccaagatatttagctcacttctcaactcacaaaacctagcttcatctagaggcttggtgaagatatccgccaattgtttgtcggttctcacatgttggatgtctatgttgcctcttgtggaatggtctctcaagaaatggtggcgaatatctatatgcttggttcgggaatgttggatggggttattggctaacttaatggcgctctcattgtcacataagagtgggattttggacacatttaggccatagtctctcaaggtttgcttcatccaaagaagttgagcacaacaactccccgtcgaaacgtattccgcttcggcggtggatggggcgacggagttttgcttcttggaagaccaagaaacaagggacctacccaagaattggcaagtacccgatgtgcttttcctatccactttgcacccggcataatccgcatcggcataaccaatgagatcaaacctcgctcccttaggataccaaagaccaagattaggtgtgtgcactaaatatctaagaattctcttcacggccacaaggtgacactccttcggagcggcttgaaatcttgcacacatgcacacactaagcataatatcgggcttagatgcacaaaggtaaataagtgagccaatgatggaacggtataccttttggtcaacgtctttaccttgctcgttgaggtcgaggtggccatttgatggcatgggagtgtggattggcttcgcattctccattccaaacttcttgagcatgtccttcaaatactttgtttggcaaatgaaggttccttccttgagttgcttgatttgaaggccgaggaagaactttaattcacccatcatggacatctcaaaacgtttggtcatcatcctactaaactcttcactaaaagacttgttagtagaaccaaatataatgtcatcgacatatatttggcacacaaaaatatcattatcatgtcttttagtaaaaagagttgaatcggctttcccgatctcaaagccgtttttcacaagaaaattgtgaagacactcataccaagctctaggggcttgcttaagcccgtagagtgccttgtggagcttgtacacgtggttgggatacttcggatcctcgaagcccggtggttgctccacgtataccaactcgttgatgggcccgttgaggaaggcgcttttaacatccatttgatatagcttaaaattgaggttagtagcaaaagcaagcaatatgcgaattgactcaagtctagctattggcgcaaaagtttcaccaaaatctaatccttcgatttgggtaaacccttgcgccactaacctcgccttgttccttattacgaccccggcctcgtcttgcttattgcggaagatccactttgtgccaatcacattttgccaaggtcgctccaccaaagtccacacttcattctgggtgaaattgttcaactcctcttgcatcgccatcacccaatccggatcattaagagcttcttccacccttagaggttcaatagaagacacaaacgagtaatgctcacaaaaatttgcaatacgagaatgagtggatactcccttgttgatgtctcctaagatgttgtcggtggggtgatctcgttggatactttggtggattcttgggtgagctagatttatcggagagggtggcacttgctcgccttcttcaccttgatccaagcttgaagtggagggattgtcggcttgggttaatgtaggtggctctacttgtgttgaggaagaggccccttgttgtggctccctaggacgcacgtctccaagagccaatcttttgattgcttcgctagggtcctcctcttcacctaacacatgtgagtcgacttgctctacttgagagccgttagtttcgtcaaatgtcacatcacgcgcgatctcaacaataccggaggtgttgttgaaaacgcggtatgcgcattcatttgacccatgcccaagcaagaacccctcatcaactttaggagcaaactttgaggatctagccttcttattaagaatgtagcacttactaccgaaaacacgaaagtaagagacatttggtttgttaccggtaagaagctcatagggagtcttcttaagaaggcggtgaagatagaggcggttgatggcgtggcatgcggtgttgacggcttcggcccaaaaacagtccgatgtcttgtactcatccaacatggtcctcgccatctcgatgagagtcctattcttcctctcggctactccattttgttgaggtgaatatggagccaagaactcgtgcttgatgccttcttcatcaaggaaactctcgatgcacgtgttcttgaactccttgccgttgtcggttcgaatgttcttgatcttgaggtcgaactcgttttgggctcttcttgcaaacttcttgaagattgcttgtgtctcactcttgtcatgcaagaagaacacccacgtgaagtcatcaacaataacgagaccatatttgttacctccaatgcttagataagcaattggccctgtcggtgacatgggaccgggggtatcgtgactagaggcttgggtagccgcggtcgcccacgtggcctgaccccctcggggggggggggtcntntccaactgtaacatgtccacccatgctttatatgaacttgttggatttggctatatgtttatgctatattgaatgcactttggaatccacaaaatgagaagttatgctgtcaaaattttgtttaattcattttgtcaaaattctgacaactttttagtcaaatctgtcaaaatgaatcatttttctcaaatttatggcaaatctgtcataattgtgatacattttatttaatttattttcataa

SEQ ID NO: 4841 - DNA, 3074 bp, Oryza sativa
aaaagtcgctcgagaagcacattgcatttgaaaaaggcaagcgagtacgcgtggtcgaaaaggatgcggaagcggctcccaaggagtcggactcagcatatccagactctgacctccacgtttcacacatcttcggaggttccacaacgtactcctcaaagcgagaatacaagaaagtggaacgtgaagtctgttcgacatggcagggggctgcacccaagatgaagtggtctgaacagaagatagaattctcggaagaagaccaccccaagactgccgtcatcccaggacgatatccgatcgtggtcgaacccactattcggaacatcaaggtcacgcgggttctcatcgatggtggcagctcaatcaaccttcttttcgccggcactttggacgcgatgggaattccgcaaagcgaattgacaccaaccgattaaccctttcatggaattactccccagtcatcgtccaaaccattgggcaagattacgttgcctgtgactttcggccaagctaacaacttccgaatagagcagatcacctttgatgtcgctgaattcgatacagcttataacgccatcattgggagaactgcacttgcgaagtttatggccgcatctcactacgcgtatcaagtgctcaagatgccgggaccgaagggaataatcactatttaagggaatgcaaagctggcggtgcaatgcgacaaacggagcctcgacatggtcgagcaaacgcccagcccacccgccacgaccaagccacccaagaaagtgagcaagacaaacaagacgccgaaaccggacggcgcaatcaagatcgttccactctccagtgccaatcccgacaagaccgtcaagatcggggtgacactaagcgagaaataggaactcgcgctcatcaccttcctccgcgacaatgctgacgtgttcgcttggcagccgtccgacatgctgggggtccccagggaggtgattgagcacaaactcatcgtgcgacccgatgccaagccagtaaagcaaagactgcggagatttgcaccagaccgaaaacaagccatacgagaagagctcgacaaacttctcaagcctggcttcatcagagaagtactacatccagagtggctagccaatccagtcatggtgcgaaaggccaacgggaaatggagaatgtgcgtcgacttcaccgacctcaacaaggcatgtcccaaggatcacttccctcttcctcgaatagatcagctggtggactcaacagccggctgtgagctgttgagctttctcgacgcttactttggctaccaccaaatcagcatggcaaaagaagacaaagagaagacaacattcatcatgccattcggggtattttgctatgttaagatgccattcggactgataaccgcagggaatactttccagcgcacggttcagggcgcacttagcgaccagctcggcaacaatgtcgaggcatacgtcgacgacatcgttgtcaagaccaagacaagcgactcattgattgacgatctgcaggaaacgttcaacaacctccgacgatatcgcctcatgctcaatctagagaagtgcacgttcggagtaccatcgggcaagctgctcggattccttgtctccggcagaggaatagaagcaaatcccgagaagatcaaggcaatcgagaacatgaagtcgcccacaagactcaaggaaatacaaaagctaaccggatgcatggcagcactgaacaggttcgtcgctaggatgggagaacgagggcaacccttcttcgctctgctgaagaaacaagacaaatttgtatggacacaggaagccgaagaggcattcattgcactcaagcgctacctatcaaacccccctgtacttgttgctccccaacctaatgatgaattattcctctatattgccgccacgccatattccgttagcaccgtcattgttgtcgagagagagaaagtacaacgaccagtctattacgtcagcgaagctctccacgacgcaaagacaagatatccacagatccaaaagctgctttacgtggtcatcatgacatcaaggaagctacgccactactttcaagcccacagagtcacagttggctcctccttcccgctcggtgaagttgtgagaaacaaaaacgttgtcggccgcattgcgaaatgggtagtcgagctgagccagtttgatgtccactttataccacgaacagccatcaagtcccaggtactcgccgacttcgtagccgattggactatgcctgatgacaaatcagacaaccaagtcgacaacgaaacgtggacaatggcgttcaatggtgcactcaacagccaaggagcaggggcagggtttatcttgacgtctccttccggagatcaattcaagcacgcaatccacctcaacttcagggcgaccaataacacagccgaatacgagggattactcgccgggataagagctgcagccgcacttggggtcaaacgactaatcgtaaaaggagactccgagctagtcgtgaatcaggtgcacaaagattataaatgctctaaccccgagttatccaagtatctcgcagaagtcaggaaactagagaaaaggttcgatgggatcaaggttcgacacgtttaccgcaaggacaacatcgagccagatgacctagcatgacgtgcgcctagacgagaactgctcgagcccgacacttttctggacatcctgacgaagccatcagtaaaagaggttagcggcgaagttagcccggccgccccagacattggcgcggaggccacaaaggcagaacgcgccgttgccgatatcgagatcacagatgactggcacatcccacttatgaaattcatcaacagcgaggagttgcccgaggacgatacagaggccgagaaaataacccgtaaagcaaaaatctaaagtgtggtcagcaacgatctatacaaaaaagcgccaaacggggtacttctcaaatgcgtctcgtccgacgacggcagacacctcttccttgatatacatgaaggcatctatgggtcacatgccgccggtcggacattggtcggg

SEQ ID NO: 4842 - DNA, 8030 bp, Oryza sativa
  unsure (1)..(8030): unsure at all n locations
cccatcgcggcatccggtgaagaagcggtaaagccaacatccgctgcaacgcgcgtggaatgcttgcgccggcgcgcgctcgtcacgcggcggttgaaggtgaaggtgccactgcccgcgcgggtggcggcggccgccatggtggtgttgttgttggtgcacgggagtcggcggctgtatttggggtggggtgcgtcactagtcacagtagggtgggcaagggcaaggcgtagcatgggaatggaattgattatatgatgtggcacgggcgaccgggcggggcgggacgaacgactggatccttcacgttttaggccctgtttggataggaagcacacaaaaattggcctgtttggtgggagtttaaaattctgagaaacaattggttggtaaccagcttctaagaatctggaaaagctggaaaatccagtttctagcttatagttcattttttggattatacatttacagcttctcagaatcgagaccaaaagctatactgtttgagggagcttctgattctgggagaagttgcagcagctagaaactaatatttctgtgagagccattcaaacaacccattagactgtgtttagtttctgaaattagggagaagtttggggaaagttggtagtttggaaagaaaaagttgggagtttatgtgagtaggaaggttttggatgtgatatgatgtgatgaaaagttgggagtttgggggaagtttggtgtgaactaaatagggccttagtcttttttctaaaatataaaagttattttacatattgatccttaaaaaaaacctatataagtataagactttagctcggcaccaaagttattggcgcgcaggttaaatgagttgacctaacgatattgtcgctgacagagttgggtatttagctatttggcatcgaccaccagtgattcagtttcgtgccaacggttgtagttttggcatcaacacgtttaatgttggtaccaacgactctagcgttgagccaggatttgtcatgggataagtttctttcaattgtttaaaagagagggttaatgttttaagaggtgtattagcttttcagtgccgaccacctagtgacttaagttacctttggtatcaagacatcaaatgtatgcattatcaaccccagcgttaagttagaggttagtaattgttaggataaacttttctaaggtctatttacaaaataaattttataaaagggctaaaatgtcataaatctaggagcgggcgatgtggagtggggcccgatggcgggagatcgggggattcctggtccgcgcctttttctttccttttcttgtgtggcttttgtggcgtcgttttcctgcgcgggccggaaccatgtttaacacaagctctttttttttctttttagttttgtttaagtttaacccaaacaattgagctaatgaatgatgacgtgtgtggaagaagtcggtcagtacggccgtttgtgcaggagtacgcaggaacgagcagcactttagtacgtacgtacctgtggttcgatacggtatttttgcttgagtgaagcgtcaaacgattaattggccgacctaaaccgtctaatatcatattgactatcgggttaggaataacactattctctaagcttaggtatatacgctatcgttatgtaatattgtggcattattatattgcttccgtagttaggcaaggccgtagtagacatatttttattagtacttggtgagtactccctcaattctaaaatgtatgacaccgttaatttttttcacaatatttcactatttgttttattaaaataaattagtataaatatgtaaaagtataagttaaaattatattttatttaatgataaattaagttataatatatacaaatattttaaataagacaaataattaaatgttataaaaaaattaacggcgccatatattttgaaatggaaggagtactaaaactgatgtttacaacacgaacgacataatgtgtctaaaatatctctgaaactgaccaaccgcaaattattgtagtccgctccgaatctgaagtagaactacaattttttgcgccgttaacgcccagctgcacaataacactgggtagcttgcagggccgaatcttgttcacgtgacagtgcacgtttgcacgatattttacatgcaggctcgatggtttgttatacaggtgcacgcggaacacgaacagggtagcctgacgaattaagtctaatctaagattagcatcttggtcggtttcggttggcgtgttttgtcgtaattagcttttcaagtcgtatgtggactgtggagtaaactaccactaccatctctcaaaaagaggtcgtatataaccatttataccacgaagagagagctgcttttgtaacaaatctcacatcctcgagcagctatttgctcgacacacgatggaatgcacttacgccgaacgcacgctgttttgaacgcttcgcaaggtcatatataaccatggcaaatgagaatgcacatgttgataattacagtagattgcatggcaagcgtccatgtttatcatttgtgaaaacagaaagtttagttgtgatgcaagacgtaaagattcacgcattcattaacaccatggcacgttgggacggacaaaaccttgcccgggcactcatttagaacacgttttttagaaataaacaaaaaaaaagggggttcaattctcgcaagaacagaaagcttttcaaaatttccaacgaaacagtttacctgggctccatttggacggacgctgatgtccgtgactcctacaccgtttcactgatgaaacgtgcggttggccccagcctctggcatccaatcagcacttcagcagtacagctgcaacctacagcaaaaaggggcaacactggagttggattacagtataacgtcaccgcaaaaacatttccatggttttaaacaagtttgggtcagaacttaaggacatggatcctctgcattactgcacctgccgtagcaatggctgataggtgagtccgatcccccatgtcagcgacaattactacaggtgcagtaatgtagaggatccccactgtagaacttaaaaaactgggcagactcaatcttcaagtgaatttttgttctgtccactttgaagtttttacatcgatccagatagatgatgctacttgtttagacaagaatataaaaaacagcagtgaaatagatgtatagagtagctacttcagaaatatatgatccaccctaaaaaaataaatatatatatgatccagggtacggtgagcaccttgagagtagcagaatagaaatgtttcgagaatagtacacttcaagagcacgttcacattgtgctcggtaatgtacaggataacaggacacaatcccttgcatccctctgtgcctattcaagtgccaaaaatgccaaacatgcgatagcattggcaatatgtatgcttgagctctccactggtccacttcgtattaagttcacaactaataactactgtacagcatagaggtcccccaaataaatggttacaaactacacaagaattttaatcccaaaatctatctttctacccacatacatatagttatctaggagtatttgaaagtatacacaaaaggtgtttatggttaattccagagcaactcatcaatggtcatctcaacatgttaaagcaataaatccaagattcataggtatatcttactgcacagataaaaaaaaagaagaagtatctttctgttctaacatccaaggttcctcaatttattgtacgtatgctgggagaaatccactatcaatttatcatgggcgtatgcagggggacctataagattcatcaaagattaatcctaaataaacttgaaccaagagttacactaaagctctagctacatagtatgatgattaatttgctaatcaactgggatggccagttttcttaagctctagcaaattgctctgttgatttttttttttggttaaaacaccgtgttttcttgaaaaaaaaactagcataatttcctatgcaacacagatgttaacaagaattaaacagtacaaacgatgcaaattgcattgattcttcctagccatggcagcacaggcaacacattagctagaagttacaaacaaacatccaaacccacaacttcatgtcatccaaatgaccaaatcatgctttggaactgccaaaacatgaaacgagtcaattaaaattaagagaaagaaagaacaatgtgaaataaatcaaagataacagaaaatagtgcagacagcttagcttacacagttgcagttgccctttgttatgaaaccagagagcttttttttttaaattttttttgcatccatcacactgccatataaaaaattttcaatagctggtatatcagtatctgcaagcttagtaactcaaccattggcctaaccattgttaacaactcaacagcaatatgaacacccttccagaagctatgggatctaacaatcttacaagatagctttcatttatcgttcatacaagaaacgagaagtccacaaccatttagctcatgaaatccaaacaactgttaaatttaaaatgtccagtggcaaacaagtaacaggagtatgagcatagacaattggtgattacctttgccttgaaggttatgttagtcacactttaggtgtagcccaatatcttctagcatgaggtcgctgatgtgggctgtgtaattgtgccaatataattgttgttgctttaacatcaacaatgcccatggtctggtttgctcttcttgtttcagtggccatttgacagcttttttctcacctaatttttcaatacaatcatcaattagctccacaatcatccttatcaactgaggcatcaacaatcaagacaacaaaccgcataaagcaaatttattacctcagaagtggccaaccatgcccatagcctgtcaaaaagctcatagaaaatcagaacctttaaatttcaaccatggccaccaattggttccagcagactgtgaaacctaagcaatgttactatattaaatggagcatcagcttcacagaccaaatgagcaatatatcaacaagtacaatctctcttctctaattttgcttttgtggtcggtgaactgcatcgtctctctaggacctgctcttcttgactcttctgacttgaagtttgattgatgtgataatgaacgtgacctggttgacgaggcaaagctgcactgggaataaaaggactaaacactttaataacactcagcagacaagaattaagattattttgtctagaatctatacaagagacttggatagacaagtatattctagagcagaagagcttagaggaaagattagagcatcaatttcagaactcaataaattaaatgactaaataagaaatattagcttcatggttacaagaaagatgcaaaatgtacaccaagagggggttctcctattgtatatgtggatacttggctggctttagtgggcctaatttcaaaatatctaaccgcatgaaaaaaacaaggaacaattgcttatttgaccctgttttgaaaaaaacaatgaatatcgatgatatatcatgcatggcacattggcgcaacacaatatatcatcaataaagatgataaacagctacaatattgtatatatccttctagcgctggtccctttaagatgctaaataatgctatagcacatcacatgtcaccattatttgcaagtatgtatgccaattatccattcatgtaaaaatggaagggaaccaggtcaagcatctaaggggagaaaacttaaaactggataggtcagcacaatgaaaagcactgatgaccaatcctaagatgacaatgttcatgcacatctggacatttcaaaaaaataaatatcacttctagaattgtaagtgtatgtgtatgtgtaacaccacaatttgtatgaacaaaaacagatcccagttatccgatattttaaccattcttcgaaggaattttcacttcttcagtagataagcgtgatcaagtaactacaactatccctatacatacattacatttccatttatcagatgttcatatgataagctctcaaaagataatgaatcaaaattcgaccaaaatttattctaaaatttaaataaaatactgcaaaatgtaccttgtggagttttaaatccactctctcaaatgtcatctggccaaacacctgtcttaataagtgatgtttggtatttcatcacgtcatctaggctgctgccttttcttttcaatctccttatcaaggaaaaccaatattgtttccgtggcatagttcggagcaattccttctgcaatcatcttcctcaaatacttgtcagcttcctttaatctaccagcttttgcattaatattgatcaaggtattaaaagtgacaacatctggttttatgcccctcccaattatctgctcaagcaaagagtttgcttcgtcaaccttcccggcctttcccaattgattgatcaatgtgttatacatgacgatgtccatgtaaacacctttctttgacagttcactaataatcgagccagcaacctctgcttttcccatctgaccaaggccttgaatgatcagattgtatgtagctatatcattggggcagagctgtccacctctctcatgaagaattgcccatacctgtttcaaataccctttcttgacaaatgacgtcatcaatgaattgtatgtataactcgttcctttccttcccagagttgtgaagatctcaaacaacttgcaagctacactcaacttccctttcgctaaaaaaattgacatatatgtattaaccatgtcagcatcaaatgtcttggctcccataccttgcaccctctgccctctgtcaattgtgaatatagcagaactattcaaatgatcagcatgtttagcaagatgatctaggtgcggtgacaaagaccaatcatccttgggctcatcttttggtgtttcttcatttgcaccagtgcataccacgggattgaccaaactcatcacatcatcaatattgccatcaaagggaaaaattgatgttccatctttctctctgtcctgtggtccttgcaaagcagacatcatatttgatttccatcgaatagcatctggcaacacagaactatctctaatgaacttaactatctgctcttccaagtcccaacgtctactcttgttaaaccctatgagcaatgatgttactgtgaccaaatcaacagcaaaccctcgctcctccatttccttcattaactctaccgcctccgcaacttggtcccccttcccttccttgcaaaactccctcaccataatactatatgcaatcccatccaacagttggccttttctccttagatcataaaacagccggcacgctgcttctgctctcccattcttgaatagcccatcaatcactgtgttgtgtgtgcttgctgagcattgaataccatccgccaccattgtctcaaaaaaaccgcatgcctcatccagcttcttagctttgaaaagcccatccagaagcgaattgtacaccacagcatcccccttcaccccatagctccctcgcatctcctggaacaaacgcaaagcatcatccatcctaaaactcttgcagcacccatccacgatagcccggtaggtgaacacatccggttcaatcccaaatgacttcatctcatcatacaccactaaagcatcagcgacccttgcaccaaccacaagcgcacggatgagcgaattgtgtgtgcatatgtctggcacaagaggaggagaggcggtcttcatagcagcaaaaagctttagcgacatatccagcctcctccacttgccaaacgcgtggatgcaaatgttgtagaaccttatgttagaagggaggcccctcctcgacatttcgccgaacacgtgacggaagtcatcgtagannnnnnnnnnnnnnnnnnnnnnntatagtngtgtgatactatcngggcgcacg

SEQ ID NO: 4843 - DNA, 2824 bp, Oryza sativa
ctagaacatgaacacaacgacttgtttattcaaccacctgcccaccatccaaattaccaatccaacgaacacaagcccattgatcatcgtactcgatctaagcattacactactattttaaatgtctgccatgtttccaaatgcaactttagccatggataaacgtcttgtattagaagagcatgacgttatgagaagcagaccagtgtttattaacttctcatttctaattaattttctagattatacttcctcaattttaaaatacagtaacttaagatgagattagatcattctataactatgagggcatgttcactttaatgacattttcaaccttatcaaattttggcattaccaaaattttggcacatgatttcttatatagttaccaaaatttggcagcaaactaaatatatgcactttttagcaactttaccaaaatttggtaaggttgaaaatgacatcaaagtgaacagaccctgaatcttaatataattatcttcagattcacatgttgctgtatattaggacgaagatagtagtaaaaatctaaattgtttgaggagcttaagaagctgcatttgctaaaacttccacagataagaccaatttatatactatgaagtagtaccatattgatatgatttatgtgcgtccattcttaaataacaatagtcggagttaccctcgtttggggtacagtaacccctcttccccggtaaagcaaaccccagtgcacgacatgccaagagaaagcagcagcagcgagaaaccctgtccgcaacgcaatctatgcgaagcgcacacgattccggagctcaacaaaccgagatggcgacgcctagccccttaggcaggtagacgacgcttgagcttgacatgagcacattagcatatggatgcagcgacaaataacagatgcatcatcacgcatataccacacctcgcttgccctctcgcaacccctttgcttaagcaagaggagattccagacagttgctccccacctactagtcgttccagcagaacaccacaaatgttaacttctcccccatacatacaaactatgtttgtatgcttagggtgtgtttagttcacgtgaaaattaaaagtttggttgaaattaaaacgatgtgatggaaaatttggaagtttgcatgtgtagaaaagttttgatgtgatgtaaaagttaaaagtttaaagaaaaaaaatggaactaaactcggccttaatgtgagaaaaatatactgtgcaaatctaaaaattactatagaataaaaaataaacgtctaaaatttatccatacttatctaaatttgcattacatatttcccgcttaatcatatataaacaacaatttttactgctactttaatttctttttctttttgattcgttcaaaaaccaaaaattggatagtgcttgagagccttataaatatctctctgaatttcttaatcgtaacgtggcaagctcgtgctacctgtacagctcactgtttatgacgtggtaacaatgttttgccaaagatttgtcatgccatattttgatttttgaacgaatttgtttttgccacggtgacatggaaggccctgccgaacggtttaaattaattacctgagcgttcatttctgaaacttattgaaatcttctttaaaagaacatcaaattcgcagcaaaggggaacccggtctcaataattaatcgaaggaataagcacaaatgcttcgcattacaggcgcgtatacatatatatttatcgtattttttaatctgatatatatataattttcttcttctagtctactacggcgaatgaatgccatggcgtgcgtacagcgagaggagagaaaaaacccaaaaaaaaaaagaaaaaaagaacgaatcaaattgcgccggcgatgtcggtggcggcggacggtgagctcgctcggttattagtcgaggcgcatcatgtcgttgtggaaggcgtcgacggcgtcggcggcgacgcactgggtgatgaggcgggcgccgggcttgtgggcggaggggcggacgaggatgcaggtggcgatgtagtcgaggttggtgagcggcacgacgtggacgggggcgccccacccgtagtccacctcggcgaaccccagccgcgaccagtcggagaccagcagcgtccggtagtcggaggtgatccggtacgggtcgtcctcgccgccgccgccgccgccgctccaccgcgcgaactcccccgggagccgcttcttcccctcccggatcagcctcaccacgtcgttcaccgacgcgtccgccaccgcccccgccgccgccgtcacccgcatgatgtagtagcagttgccgtagaagccgtccgggagcgcgcgccggagcacggggcgcgcgttcatggcgaagcacacgtggacgggggaccccggggcgaaccccgccgcgcgcgtccgcgactgccacgccttggcgatgagcacctcgaacgcgctgcaccggtggcccgtctgctccaggaacctcgccttgaagtggtcgatgtagtcggtggagatgtccatggcgaggtactggaggcggagctccgtcgggacggggagcgggcccacggcggcggacggcgggcacgggatcgcgtcgcgcccccacgccggcgccagcgccggcgccgcccgcccgcgcgcgatctccccgaccgccgtcatgaactgcgccgcgccagggccgtccgcgacggcgtggctgaaccggaacccgaccacgaagccgccgcacgcgaactgcgtgacctgcattggggaacggacagctcaatcacacgggctgcaggaat

SEQ ID NO: 4844 - DNA, 22690 bp, Oryza sativa
  unsure (1)..(22690): unsure at all n locations
ccgtcccacctccgtacgcgtcgcttcccgtccgtctcacactctcgtcgtttgccagcgatacgccgccgctagcgcagtaaaccgggcccaagggcgggaggaagagcgtgccaccagccgcctctcctcctccgccatcgcgctcgtctcacctcgccacctcagcctcgcctcgcatcacctcgctccgctgccacgttcctccctcgccgccgcctctgcgtcacccgccgcgcactccgtgtcccccgccgccgccgacccacccgtgagagagaggaagagtgaaacagagagtgagagagagagaggaaaagtggaagagtatgacatgtgggttcgacattttttttataaatagaatgatgattggactgccacgcgacgccacgtagaccaaaaccaccgcggattgggtcgagagggggtaattcgtctagtttgcatagttgggggtgaagaatgtccggttttatggttcaggggggtaattcggtcaaccgcgatagttcagggggaggggtaattcgtactttttcctattttctttagataatgtattttcattaaactggcctctatatcacgagagatatacatagccaaaacgatataaaagcatttggactcacacctcaacaaagagaacacacaaccaaaaaggaaaaacctacaagttcggcacatccctgcattccgacatcttcttttgaaacagtcaaaatcgatgagtggaagtcgtctagtcaccaccacccctaatgctttgtcactgcgaaactccattggtgccatcttcatacacttaagtgaactaatgccacgcgtcgccggttagcccacctttatctgtcgtcatccagtcagaactaaccgaccagacacaagatgaaaggttatggttccgtttcgtcgtattcctaagcctctgccaacgatagggctgccgccggcgtcggaatcctcctccgctacttggactcctagcccgctaccatctctgcttgaatcctctgccactaacgccgaggatatcatctttcgcctagactcccagacctttgccgcccctagagccactgtcaccaacgagatccacccacctgatccaccttgcatcgacacttaggtcaccgctgcccctagggcggcaaccaccgcaaccgaggaggtctctgctcagattcgcatgccaccgccattcttaggatcactgatgcctcgaaaccaccttcgtaggatccgccttctccttgccgaggattggtcgtcgacacttaagagttaagacgttatcgtcctctgcgacacccgctgtcccccaaagagacgctgctgccaacgtctcgccattccaccgcctccccgctgccatgcgcaggcccgcccaccgccgcccacgacccgtcatctcccgctccgcccgcgcgggctgcttggttatgtttgggtagagaataacacgtacgcgtggaattgatcatgtgaaatacctgttgttgtatatacgtagtatagtagtagtagttttctaaccgtttgtgctggtctataaagaaaacacttgtgctggtagtagtttgatccgttcatgaaattaatatatacttaggctatttaagacttttacagctgcagtacagtggtgctaacgtgtacagtcagagaagttgttgacgtatcgcccccttctttgacccctcgggcccgtgcgcgtgcgcctccattcgtcaaccgtaaatgctgcaatccttgcacccaatcaagttcacataatctgatgaaatttcacaaaagcgttattcacaaaccggtcagtattagctgattctcgtactacgttaatctaaagtcgtctgtttttattagtttttgatagaatttcagtatacattaataagaagcggttttttacttcgaaatcaaaaaagacaaaccctgcaaccaattgttcgctttctcacacttcacgttgctacttggcccacccgtctcacgatcgactccgcgatgcaacgttgcgacgcgacgcgctcgctgccacggtgcgggtggtgcatcctcccgtcatcggtggacggaccgacgacggtgtggtgtactggtgtggttagtggagtacgtactacgtccgtagccactgtgactgggcacaatctctcgggtattggggcagcgggctagacgacggcgacgctaccggccaaatggacccctcaattcccccaattcgtcttgtcgtggtactacctctgtcccaaaataagtgcagccatgagtttcagcgcctaactttgatcgtccgtcttatttgaattttttttataattaacaatttagttgttataagatgataaaacatgaatactactttactcgtgacttatgtatttaatttttttcaaaaaaaattaaataagacgagtggttaaagttgagcgcggaaaatcatggctgcaacttattttgttacagagggagtacatttgtgctagcacgtactacgatcgagtgcacggtacaggtacagtgcaggaccatggtggacagataggacaccacgcgtgttaatcctttgcaatttatttggatttcatcatttcattatcataataaattattagtcaaacacaaaaacttcgcaacttggagaatgaactgacaacctgacgtcaaaaaccatatttcatgcggcttaatttattggaataattaactatttaccactcttacgagtgggtaaattatttgccacttgacccatatgtcataaacacatgaggatccgcatgtcatagatagcgagtggcaaataattaattatcacatcttaaaagtggcaagaaattgaatgtccctaatttatctcacagaacagtaaggcagcgttcgagagggtgagagagtatgtttgtttgtttcgttttccgcgcgcacatttccaaaactactaaacggtgcgttttttgcaaaaattttctataggaaagttgcttaaaaaaatcatattaatccatttttgaaatttaaaatagttaatactcaattaatcatgagctaatagcttacctcgttttacgtatcttcccaatctcctcgagccccttatcctcaaacacaccctaagaacaccctgagactcctccctctcaagaagctctttggcaatcctgcggcctctttccaccaaccaatcaaccaccgggaggcccttaattcttaccatcggatccatgatcatacagtcaagtctaatagcacaacgaagaatgcagtgtgctagctctatcagcccctgccaatgacaggctccagacatgaccaccctcctgagctttatcatgccgatacggtggcatatccgctctgatcacctgtctgatgacgaaatcagagatgtcaaactgcacgcaacaattcagcgcacttgtgagactcatcgcataatgtttccgtcagtaattcatccaatgtttggaacgcatgaatttgtggaagaaggaaaaaataattggaatgaaaaaaagcaaacacaaaagtcaaaaccagagtgtttgcaatcaggttggtggtgttttatgagcagctgcaacaacaacatcatcaccaacaatagttagaaaatgataataataataatgcactaatatgttgtcttcagaacagatgttatcctaacgaatctaccttcattaatctactagattttatataacagattgttttaatctatttttaaaatttttctcttataatcatagatttcaagatgagaaactgggatacatcaaatcactctaaccctacggttttctatttcaaactgtgttcggataggggaagttgggaactaaactctccgcacggaaaacggagtggtccattagcgtgtgattaattaagtatttgctaattttcttcataaaatggattgatatgatttttttaaggaactttcgtatagaaactttttgcaaaaaacgcaccgtttagcagtttgaaaagcgtgcacgcggaaaacgagggagggaggttgggaacatgggattgcaaacacagccgagcatgtacacctgcagcttaagaatagggtcatcgcaattgccaataatttttataaggtgccaacatatttcaaaatttaaagagtgaatttcataaaaccccagctattattataatgcaagttgcacaaaaccacatggattttggcacgttgcacatatcctcacgtattatatcctaaagtttcacaaaaccaccctgttaaccaaattgacatactcctatatcgaaattttgaaaaacatttacttacatggatctaatgtttatatgatggataaataacttataatatgttattgtagaactaaaaaatatggtaaatcaatatcaaaatgatcaatagtgtggttttgtgaaactttatggccagaatacttggggttatgtgccacgtaccgaaatctctggggttttgtgtaacttagatcataatacctggggttaggtgaaattgactcaaacttaaaacaatccgatagtatatataggctatgtgacataaatgggatgataccattgaatatgcatatgaaattacttccatattgtcatgactttgtaattacaaaacaacagttaaagtaagctcaaaggtcaaattgtaattgtggcttaaaaatattaaaagaaggaatggttctagaacattatgccaataaagaattcaacaggcttcgaaatataaacaaatttgtattgtatcaccaaataataaggtaataaagcatggtagtctccaatttccaatagatagaaactttgttacccttttgtatttttcaactataagatcaaaatcaaccaactcgtatggtattccaattttaagcaatgtagttgtagctttagatgaatgaaaataacaaacatacaggaaatggaaaaaaataaaaagattggtttcagatgaatgaaagaaaagtaggtaattgaaaataacaaggatgatgctgtgccaccacaaaaatgtctacatataatgcatgcttaagaaactgtcaacatattatgaagttgttaaagccactcacgtgcagttccaattcctctagaactggagctacctccaagaggtaggccaaacgaagaatcccatcaactgacctgccgttcccataaagaggcaaatacaagttcagatgcctcaaattgatgaatctgactgaggttttggcgaaccttttcaactgaaacacaaccatgatagtctaatcgattatggatgagatgacgaacagatgtctaactgattaatgaatttaattgctttcagaaagagacaaattaaacctcatcatagatgtagagtgtctgaggtaatggagagtttctgcacaccaggaagaacagcaggaagctcggtgcatatgtaatccagattatcaccatagcgcacgctcttatgtagcagtttaaacttcatcacctttggagattcacttagtgccaacggaattggccgattgatcaagtcaaacgatgtgagatttggagcttccagctcaatcttttccaggttgcagtagtgcaaacaaagataacgcagccgcagcagcggcttgcacaaggttagctcggtgtaggaacagcagatgatgctcagccactcaagagcagtgcattccggcagcatgactgcatgaggcattgggagtcactcaaaaacaaaactttgtgcagggtgagcttcttgaggtttgcaaagccagcaaaaccagtggttgttgtgttcaggcagacgtaggccaggttaagagatctgacatgagaaggggagctgtccgggccactgaaaacatgcagtgggaagatgtacttgtcatcaggcaagcccttgaaaatgttcttcgctccaggagtgaaatcgaaagcgatgtgccttgctctcgacgcggcgcagaagcgaacccatccatcgacatcaacatcgacatggcaggtgtgcttcctgcgcagcccgaacttgacaacaaacttcctcagggtaggaggtgaacatagatgccgcagaagactgttcactctcctggcaaacttggtccttgtacgtttcatgcttgtattcttgggctggaacatggtgcctcttttcaagaccaatttcggacagcagcatctccacagctgctgccacctgcgagaaagaaaggccatccgcgaggactctctgaatgcaaccgtgacaatatgctgcgtagaacatcctgcacattcatatgtaggcaggtaacatgaataaagatttattaccgagtaaattggtttgttgattaattagtcataagtgataagtgatgagttcagtggaatcgtttagcagctgtttaagtatgaaaggcacattgaactggttgcttacatcggacagatggtgtagttgcagggcttctgaattgaccatgggaatagatttttatctgctatacagatgccaggttatgagaatgaaagaaacagattcatgcacatcttataaccatattcatctagaagattataaaaaaagcattagatataacccccaaataaacattggctaatgccttgttcggattcatggtgatcatcatctgtaaacctcaaaaaaaaaaaaaaaacggacaagtccctagcatagcatatcagtatatcactgaacagtcccaatattaatatgcaaataaaacacacttgcatacagatcaacccaaattactacttcaacgcttgtaataatggcctaagatgaagaagtagaactgaatcagagattcagagggcggcaccgtaaaaggaaagaaggcagagcggcggcgagcaggaccccgccaaggtggtaggtctggtgcccccagcgagctgatggcgcaaggccggctcgccggcgacggcgaagaggaggacgacgaagacgacgtcgtggacagcaccggctcacggcggacggcgcggacgccgggagccctcgcgccgctcgaagtttcggtcgcatccgtttcttcctctccgattaatgtataccggggattggatcttttgggctgacggctaagtgggccaggcccacgcggccatctctgggctggcgaggcccagtaactattggcgaaaggataacagagaggctgggcctgcatccagtgtcaagcctccacgcgcctcgaggagccgagccagtggcctctgggcccaccatagccgaatcggatgccgcgattgatagggcaacgtcccaatcacttgtgccacgtgtaaacctgggaaaacgcctctggaaaatggaaagagatggggagttcgcgaccacaggattggatcgcctctgccctctggaagtggaacctggatgatgacttttgattttactgcttcatactaataaagaaagttatttaggataatatttaaatcaaatctttagaatataaattatgaataactctcaagttgttgagtttagaaatataaaaattatatgtatagatttatcttgaaaaatactttcataaaagcatacatatatcacttttcaataaatatttttttatagaaataagaagttaaaagttgtattttgaagattgtgtcgttgtcctaaacaattttctttactttataagtatggagggagtactagttttgacgttgtttacatgtgcgtcaatgctcggaggaaaagtttgattaggcaacaaaaaccagcggctaatttttggagattaaccattttgccttcgtgatgatgggaggttgggatacttgctcaatgcctttctatgcgtggttttgattatgaatgctgtcgttatcttggaactttgacagcaacggtacatataaacttgctgaatactaatatgtcactacatttaggatgtatttgaggagaaggggattgagttgattgggaagatacgcaaaacgaggtgagctattagcttatgattaattgagtattaactattttaaattttaaaaatggattaatacgattttttaaagcaactttcctacagaaaatttttacaaaaaacgcaccatttagtagtttgggaaacgttcgcgcggaaaacgaaacaaacaaactcactctctcaccctctcgaacgctgccttagtttttttaaaaaaaaaatacattttctaacactgtacaggtagaggcgagcttcaagattatggcaacttggatgattgctgcaacagatgtctggcttcagctaggctagctagctagtcgggaataactttgtaaaaaggaatttgcttggggacttgtcccatcaccttatttctcattttgatttacttttatcttacctttttattactattaaatttatggctgtgtgtcttatgacagaagccggagatgtaatccatttttattattaaaaaaaggaatttgctcggattaacaattattccctgcaacatataacagcagagactatagacactcaagctgatcatatcatctttactcgtttcctttgtttattttccttaacccctggatgaaaagcacaagtaggtgcatttctcttttaatagtgagagaatattgcttcttcttcttcttcttcttcttcttcttcttcttcttcttcttcttcttcttcttcttctctctctctctcttttaaagatggggcatctacaacttcatctactaatgtgtcgttatatttattttttaaatttacatttgctattacatcacaggcaaatttgaaattttggatgttctttgtgatatatggtttcacctagagtagctaggcaagaataactatgcaaaaagaatttgctcatattaaaaagtactccatcatattaaaaaaaagtcaaattaggttgggatttgacaccatatataactacgaatctagatatgaggttgtccaacttcattgctttagatggtgttaaatcctcacctaggttattttctgggacggaggaaatactcccttgcaacatgcaacagtagagttagttaactgaataacaaatcatgttagtttttcttatctccgtcgtttattttccttatctcctagatgcaaagcacaagtaggtgcagttctctttaacagggaagaatgttactgtttctttataggtatctaacttcaactgtaaaccataatttttcttattaactactgttaggtcttatgtcatctagaacatcaactatatgtaaatcggtatccaccatatagttgcaaactggtaaccatagaattgtgaaataggagtattttccaagctaatcatgccacacaaatgaaaaaaaagagtaggttgtaacatgacaacttaacgatatataaatctatacacaattatatctctaaattcattaacacctatataaatgtgaacaatgctagaaagtcttataacctgaaacagaggtagcaacaaataagcgcaaaaaataacatgagaaagtgtgcacgtgccccagtgacatgcatgtataaaatgtgagcaccattttgaaaaggctgtacaccagtattttcggacaaaattatgaaaagtaaaatcactgccaaaacctagcaatcgacaaaatcagctgaaaaatcattgcaaaaagtgcatatgctgcccacggatacgatggaaaacaccaacatacggcctcttaaaagccagaaacggtacagatggcaccagccaccagcacagttttttccacggcattctctatttctttacgtccacggtaaaggaaaagaaaaaaaaaagcccatcgtttcacttacgtttgcatgacttaatacaaaatttatatatacgtgtccatttaaaataatgctaataaataaaaaatgttaaaaaatatcataaagttaagttttaaaattcaaattctaacatataagatctagttctcttcttcaacttcaaacttcaatattcctgttttccattagtgcgtttttaagctgttaaatgatacatattttaaaaaaaaattctatacagaaactgtttaaaaaataattaaatcttttttaagagaaaatcaattaaatatatttttcaagtttataattattaaatatttaattaatcatatgctaatgatttttctcgttttgcatatgctaaaaatatgtagcctaagtataatcataagagaaataataagctgaagaaagaaaaaaacactttaaaaaccgccccaaaaatataagcggcggaaaagaaaagggataaaaaaacaaaacggcacaacggaatgatcctctcccgcaccagctataaaccgccacacgccctcgtcgctctcgcccccgcaccaccactccctcctcctccatctcctccgctcccgatctcacaaccaccgactcctcctcctcgcgcggcggcggcggcggcgtgagccagcagcagccatggtgctgttctcggtgacgaagaaggccaccacgcccttcgacggccagaagcccggcacctccggcctccgcaagaaggtttcccatcccaccaccacctcttcctcctcatccgattgtctccggtttcccgtcactagggccccgatctggatctaggcgcgacgcgtggtggatgggtaaaggttgtcccgatctccgggttcccgccgcggatctcgtcggcggtttgctcgcggcgcgggggccttttcggctctcgcctgaatggtggcgtgggctgggatctgatactgactccgatgctcgccgtctcgagtctggaatgtgcggttcctcgttgcggtggttgattttgtttgtcccgcgaccagtcggatcagttagtctcgtctggagcgttggatcgatgccggattcgattgatctgaattgtatgcgttcgtgggatttgattcaggagatttttttttcgctctcattgattagctttggctaattgtatcgggatcttgccgagtagtttttttttatttttactcattgttagcgatttgagcccgagcagataccgaaggtagatagtgactgtgtgccctctggcttaggatctcaatccggcttgttgctgctctggatttgttagttgttagcttgttagtcatcgtgaggaatgtccataagattctagaatgtttcgctgcttttgattgggcatgcctgctgcccaattagtagcatgttgcatgtatcagtgcccagtctattctgatgagtctggatccaggccaaaatgtggatcaagcttgtattcgtgtgcattttaaaataggatgaaaaaggagaatttggttcttactcaccgttgctaaaaaattgttgttaatacatgctgctacgagtgcagaaattgatgagcaagtttattaaatgggatctggtggccagttggtgttatttttagggttcaagctaacgtcacaaactgcctaactcctgcgcttgaaatgttgtgtatggcacattgctcacaacctgatctgtgctactgtaactgttaccaggttactgtattccagcagcctcattacctccagaactttgtgcaatccacatttaatgcccttcctgccgacaaagtaaaaggttagctacttatcagatgaacacctgtcctgcttcaataatctatctgagcccttctttattcttgaaaaataatcaaatatttaatttcgttttgaagtacatattttgaatatggttaggaaaactggaaacatatatgactgaatttgctatccctaatccatttccaggtggtaactttaaccatctggtaagaaagaaaataatgtagttaactagttttagagataccatactgatttgataaattatcatggagctggttttatgcataccattttctgcatatcccctgtaagttagaaatgctattaccactttccgtaattaaagtattttctgatatttcattgtcatttttcatatctttctatcatttcttttcttacaggtgcaaccattgttgtgtctggtgatggccgctatttctcgaaggatgctgttcaggtaatttatgattgattaggcctcatggttcttgtgcaattttgtgatccttattgtcaattttgttatatatttgcagttgcttctacggatttccctttaaatatttgtatagccacatacttcaacatttatcgagctatgtgatggaacccacgcatgattagactcgtcttgcttagttatacatgcctccacatcatgtgacacatgttgattgttgagtgcagacgtaccatagtaatagtattgtgtttattgaggtcaaatattgttcatttttctatgttgtgtcaagttaaatggtttcaattgtttaccagaagtcacaccaaaacaaaaatgcgacatcataaaattgatcataatacctagtacacaattttgtatcgtgcagtgcctatgcatagtgcttcttaactatgtagtttatttattagtggttgtaatctatctcagttgtagattgctcttgaaagttggaactttgaattgtggttggagatttgacatttattttgcttggtatagatcattacaaaaatggctgccgctaatggagtaagacgtgtttgggttggacaaaacagcctcatgtctactccagctgtatctgctgttatccgtgaaagagttggtgcagatgtaagatttattttacaaagattaactttttgcagtgtgactgttagtactcactgcttattttctctgtgttaacaaattaccttactggtgctttatcaaatcatcaaaaaatagggatcaaaggctactggtgccttcattttaacagctagtcacaaccctggtggtcctactgaggtatcacagttatgatgtatctctgctgctaatcaagtggcacgattttctgtgtttatcagcaacttttcatttgatcttggcaggacttcggaatcaaatataacatggaaaatggtggacctgcccctgaatcggttactgataagatcttctctaatacaacgacaattactgaatatctcatcgcggaagaccttccagatgtaagagttgacgctgacttgttagtttttgttgtttgttttgctcccagggtattgaaatatatgtttcactcctttattcttgcccacatcgcaggtcgatatttctgttgtaggtgtcactaccttcagtggacctgaaggcccttttgatgttgatgtttttgactctactatagattacataaagttaatgaagtaagttgcttccatttgaatttactgaatgctatttccatatgtattgttcgatgttttcttttcaataagtgaattttccttgtagcttcataagaacctgcgaaaaatgggtgatttaatttgtaatttgtatttaattccaggacaatctttgactttgagtcaattaaaaagcttctggcatctccgaagtttacattctggtactcgcttttatcctgaactatgctcaccctctcctcatattaactgcctgttgcacatctgaacctttggtttgcacttttagttatgatgctctccatggtgttgctgggacttacgcaacacgcatctttgtggaagagcttggtgctgctgaaagctcattgttgaactgtgttccgaaggtaatttgttttcttctatcatcacaatttgaaaatagaatttagattggtgttcattctttacttgtatttttacaggaagactttggagggggccatccagatcctaacctcacctatgcaaaagaacttgttgaccggatgggccttggaaaatcctcaaatgctgaacccccagaatttggtgctgcagctgatggtgatgctgatcgcaacatgattctgggtaaaaggtattcttcagcctagatagcttgaagtttttgtatatactcataagtgctatgagaaatttatgatgtgtcctttgccttctagattcttcgtaacaccttcagattcggttgccattattgcagccaatgctgttcagtcgattccttacttttcttctggccttaagggagttgccaggtacaatgtaatcctgcatattaagctgcagataacccctgcacttttctggtttacaattttttttaatgggggcttttaagttgcatactgcattcactgtggtaaatcgcatctttcattctgaatgtgcatccaaacaagcatgaaattcagtgttcatcatacaatgctaatattaggatattagaaaagatcaatttcccgatggggattgactggttatgtttattgctgaaaatcctggaatgttagtgctctgatatctagcctcttcggtactggactccgtagctagtgtttgctagaatttgtactacaaaaaagaagaagcaaaggatccaggattgataaaacagcacaaataaaacaaacagatgaaaaaaaaagaccccatactgcctaccatccattcttgaatcttttatcaaacaataactgttagatggaaccctggatgaagatgactgacatctgacatacctatatcggcggctgtctgctgcttatagctgtcactggtctaggatccaagaatctgaacagaaactggacgtttcttttgatcgtggcattgatgtttcaattcacttgctttctgatattatgtcaatatgcaagaataatgtaattctcatccatcaaaggtgttaactgaccatatttgcagtaaacttctaagtcagaacttttaatgaaaggatgtaaaataccgctgtgctaccttatgttgatctattgataaaattgcaggagcatgcccacatcagctgcccttgatgttgtcgctaagaatttgaatctcaagttctttgaggtaagtattaggaccgtcagtcacatgattttcaaaatgccggacaagcatatcatatgaaaaccatatttcaggtgcctactgggtggaaattttttgggaacttgatggatgctggaatgtgctcaatttgtggtgaagaaagctttggcactggtaattactatgaacttgatctatggaacacaatgacatatagcagtgaataaaatgcatgtaacttcatgcattttgatatgtggcacctctaattattgagaatttaggatattccacaaacttggcttagctaaaggaatagggcaatggccttttattgtttccatacgcaacggaatgttcttattttgggtaaaatatcatgcatcaatgaaaatcaagtggatcacatttaaataatgagtcacactgcagtcaggatatgactagctcaccaggatgcttatacctactatgttgtttaggttctgatcacattcgtgagaaagatggtatttgggctgttctagcatggttatctattcttgctttcaagaacaaggacaaccttggaggcgataagcttgttactgttgaagatattgttcgccagcactggggtacttatggtcgccattattatacacgatatgactatgaggtactttacacaaatattcaatgtacatttatgtgtatgtatatacatttggcaacatgctaaccatgccatttttttcttcctgaagaatgttgatgctggagctgctaaagaacttatggcaaaccttgtcagcatgcagtcgtccctttctgatgttaacaagtacgtacattgttcactaacccatgatttagggagcgatcaatacttcgccagctgctatagaaatcagtctatttcattttaaatgaatgaataattttgcatacatctgattgttgtgttttgttctttgccactttgcacagctctgtagtatttcattaatgttattttatggtcgctactgcctagtggttttccagttagctaaaatattttcattcagtactagctctaaactgtaccttatatcctcagattgatcaaggagattcggtcagatgtttctgatgtggttgccgcagatgagtttgagtataaggatcctgttgatggttctgtctccaagcatcagggtgtccggtacctcttcggagatggttcccggctggtatggtcccattctgttattgtttgttgaccttataatatccttcattttgtttcttgaaccaaagcaaatgaagtagcacaatttggcattgcaaattcgggtgtttatcgcagagtgtgagtgcaacaaatactggtgaactgaccattagttcctcaaattctaggtgttccgcctctctggaactggctctgttggtgctactatccgtgtctacatcgagcagtatgagaaggattcttccaagaccggcagggattcgcaggatgcccttgctcctctggtaagacatccgcgctgtatattggctttgccttttggaccgttttccgagcaagtttgcggacctttttcttcagactttaattcagcaaatctgaccatctgctttatccaggttgatgttgcactgaagctgtcaaagatgcaagagtacactggccgatctgctcccaccgtcatcacataaacttttcaagagccattctagaatgcttttgaggctacccatgaactttctttatggcctcctgtttgatagcctttttacatctctccccgaataaacgtgtatgtatcaactgttctcgttttcttgccaatactgcgtttctgctgcaggtccggtaaagtgtgcggcgataatgttgtcagttctgaaactgaagagggtactttatataagcgatatatcgatgttttttttgcttatctgtaatgccgtttctagttatgatctctcattctcatgggatgccattcttgaccatccatgattacaaacaatccagaccccagtcacaggcagattatacgattaggtcgcagttgacgcagcttagggatctccgtgaccgacacgaaatctggttgtactccgaccgaaatcccacttcgactcggatttcttgggtatgtggttgtctatttaaccatagagaacagggggtgttacattggaaattgggagatcagatcgcatggacgagccgcgcgtcgcccccgtgccatgcctggccctgaagcacggcgctgactcggacaagccagtgctgttcagcatctcggacgcaacggccatcgacaacaatggcggcgtcgacatccccggcctgacgaacggcaacgcctgggtgacgccgcaggggtggatcctagtccgctcggcctcggacgcctccacgttcctgcagaacccccaggatcccgacggcaagatctccctgcctcatcttccccgtgaattgccgagcacctgctcctgccggctctccggcaagcctaacggcagcgaaagctgcatcgtgctcctcgtcgagactgaagaagatgtcactgtactctggtattgccgttttggcggcggcggcggcggcggcgagggtgaggggtgggtgaggcacgagtacgacgtcggcacgcagtgggacatccgcccgggcaaggagggccagcgcgagaaggtgccgatacgctcgatcgccgcttgccggggcaagttctacttcaacgccacgcccgagagcgtcggcgtgctggaattcaccccgacgccgacaacgccggtgttcggctccatcgcgatcgccgaccccctccccggtgggtacggcgtgctgggtgccgcgctggggttcctcgtcgaggccgaggatgacctgtacatggtgcgcctgttgctggaccgggacttcgagaccgtctacgacctcatcgtctacaaaatggatttctccgagcagcagtggcatgaagtggacgacattggtggccgcgcgttcttgctagctccggcctacttcggcgcttcacgtgcggctgatgaatgtgggttggaaaaggacagtgtttacgtcccttacgcacataagaagtgtttcgaggtgtgcaaggtagaagagaaaggagatatcgatgtggttaatctcatcgaagctccagatgcgaagatcgggatgtggatcatgcccactgattagccgtagtatacgtttcaattgttagcttgtttttttcggttctttaacctgtttttttgggccctcttgtaagtctatttaacaattaattggcttggtattatctacctcgagttcatgtggaagtgacaatttgcaaatctatgggcatctctatccaaatgatttggttcaggtttgttgtgctcaggttgatcctctgggttgcatcccataaaagtacaagctggttgactaggtctaccgtgagcttcaagtcaagtttatgtacgtcttaaaaaaaatcctatgaaagtggccagggatggagctagaacgaaataaagatgaatgccactcacttactttactatgtttttgactgaatttaagttgataatggtgactaagtttgaatttaaggttgcataaatggtaaaaatagatgaactctagctaaaaaattttcttgaccaagttcttggcaccccctatcttgataatgtagttatgtccctagaagtgacacaatttatcggaaccattgtgagggtttcctctcaactttaccctcctgctccaccatggtggaagccaccattgacatccttctgctcgccaccgtaccactatcagagcttcctagccatctttccctcagcgtctggatctgaaccttgccactcccgttctagccgtctccatcgccttacgggatggtcgacgccacatttggacaagccaaactggcgcccttagccttctcctctatgtattgagttggcggctcacatcaataaaagtgacaaaaaaatcaagaaattgtttctctccaatgtcgaaaatgtaagaagtgtagtaaagatggtgtttgaagacatctgaagtggtgtcgttttggggtgtccaaggtagcctaacccaccacacagtagggtactagggttaccctaatcacaataagtccgctctaccacaggtccaatcagaattagaactctagatcctgaggtatgcgctcacaccttctaatctgtactctctcattatcatttttcgatgtttgattaacccagagaaacaattttattgtcattattgaggagagtagatggtatctggaggtaccataaaattttgcgttgccattggtattgtcattgcaatagatctatttcatgagatgctgcaggtgatggcctcatgagaaatttgagagcacatcgcagttatttctgaattattggaagtttctaacagcaccagcgtcagagaacacacacacacagatttccaggggatcctctagaacgcgagaaagcaggcatgcaagccgggcgaggcgactcctcctcacttgccgttggattggccgtggccgtggccgtggctgggctcccagaggatggtggtctcggcgatcatggcggtcaccaggtacgggtccatgttggacgccggcctcctgtcctcgaagtaacctgacgaaacaaaccaaaccaaaaccgaaaatcaacacgcgaacatcaaaaatagcaggagaaatttctcccatcgatcaatggcgacgcctcctttacctttgccgtccttctcggtgtcccggccgacacgcaccgacgcgccgcggttcgctacgccctggatgaaacgaagcaagaaaaacgtcgccggagttaagcaaaggaggagcagaagcagagtactataaattgagttattttaccatctttgaagagataccataatataataattagagataactttatcatttattttttttccggctagatcgatatgtggttgtctattacgctagtacataatatagtaattagggataactttattatttatttttttcccggcaagatcgatatgtggccatccattacgctagtattattcatattccatcaaaaaaacaaaaaaataaaggaaaaagatttaatcactgctaaatgacgattatatacctctccgcgtcttttttttataataatgtccctccatatttttactaccgctaattagggttgtagtacaaatagatctaaacccttcgatcaaatgagattaatagttcagattattttctactaactgtagagagtaacgtagtggggctcaattttttttttttggtacctattaagactaaaatttttcactagagatgagtgtgacgagcgatcttgtcctacccagacgaagttgttgatgtcggcggtctcgtggcggccggtgaggcggcgctcgttgccgtcgccgtaggcggcgatgtgctcacggtggcgcatgccaagcttcttgatcgctttcttgatcacctcgtagccgccattgctcctcatcgacttggtgctgcaaccgcaggtcacatactcacattgcagcacgggattttgcagaaatgcaggtgattttttatcttattttgcaggatttgaagatgatttcttgcttacctgtagttggtgtgagcaccggcgccattccagtctccctgcagcgtatgttcatacagattcagagatgacatgtttatgtgcaatgagaatcagtgagcagatcagattgaaaatgtttggtgaaatgtgtgtgttcaccggaatgggcttggggtcgaaggacacgacgacgccagcaatctcagtgatcctctgtaatccaaagaagagcatgtcttatcagcccaaaaaaaaaaaaccaatgcaagaattttgcaggattccaaaggttaaaaaatgtaaaaaaaaagatgatggaatcaaaattttccagcgaaatccatgtgttcagattttgtacgtttgttttttcagtctacctcaagaatgtagcgtgccacccagacatgatcccctgcggagacgccaacgacagggccaatctggaactcccactgctcacaaaatcgcacatcaaacgcatgatcagctcatggacaaagtgtcgggaaaaaaatggcacagaaacgcgaggtgtgcagaattcagaaatgtgttctacctgccccggcatgacttctgcgttgatcccgctgatgttgatgccggcaaacaggcaggccttgtagtgggcatcaacgatgtcgcgcccgtacgatttatcggctcccgccgcacagtagtacggaccctatcacaccattttcgttgttcaagattcagtgccgaagatgtaaaccatttccattatgtttttaaaaaaattgactagcaaacattgctggtcaggttatcagcaagtgaaatgaataaaattcagtatgtaaatgtaattcttctcttccttgttaatgatttaggtaacaactggtattttaacataaaaaggacaataataactgataaatttctctagtttgaaaaaacaagagaagaaatttgttgtggttgagatgcaatactgaaagtgtataagaagttcagaattacctgagggcctggatagccacctagtggccagccaagaggccagttgatgtgcttctgaagaagggtgtactcctgctcaatcccatacctgatttttgatttggcaaccaacataagttccatttgacatcaggattacatctctgaataacaaagatatatactgaccatggctcttcagccttgacatcaggatgactgaagatccttgctgcattgtaccggttgttcgtcggaatcggctcgccattcggcgcataacagtcacacatgacctacatttacagcatggttaaaaaggaatcatgaacaaaaattcatgccagaagctttttgtaactatgaatcagaaaagaggggaaaaaattcttctaccaggatgttctttccctttctgaatgggtctctgaagatggcttgagggcttgtcacaaaaatgtgaaaggtacatcagtgtaatgcacacacaccaaggtgtaatcaaatcaaagagtacaaacaagaagcatactggaggatgacttcactgtcgtcaccggtagcctgaccggtgctgaagccatcaaagttccactttggaagcttgcttgggtcatcaacaggtccagacaacgtctgatcagaggcagtaatcacaagtcacaacaactttcaggtaattactgggtcattgctccaagttttcagatatcaagagaaggattaaaggatatatatatcagggtgtaaagagagtgtttgtactctggctttgctcctcacatccatcccagtaccaccaaccctgaattatgggaacacatggtgtgattaggagcagattggtaagtataaacaacatgcttacgtgattaacctcttttaaatgtaaaatactaagtaaagatccggcattctgggataaggagactaggagaacaaccatgaaaaggaattgatgatgattcagaattagatgaatcctataatcaaatcaagaacctgtagaaacatgcagttcatgatctctttaaacaacttactcacaaataaacacgcctaataaaaaaaaatcaaagggcgtcagtgaaatacctgaaaggcaatcacaaaaaaaaaaaaaaattagggccggtttttgcggcctttatcggcacnngctgnagtgncttataacagtgattacacggc
